United States Patent Application Publication US 2006/0134663 A1 - sequence listing, part 92

SEQ ID NO: 261773 - DNA, 796 bp, Homo Sapiens
aatttcccgccagcactttatgagtatgtgacctggagaacttggactggccctggtgctggttttgaacaaggtggatctggccccgccagctcttgtggttgcctggaagcattatttccatcaacactatccccagctccacgtcgtccttttcacctcttttcctcgggacccccgcaccccacaggatcctagtagtgtcttgaagaagagtcggaggccggggagaggatggactcgggcctggggccaaaagcaagtttgcttgaggagcttgttaaaggccattcaacttgtggggcggaaagttgggaccttgtatccaggcctgggcgcgggagaaagaattggctccggcggattgttgggctgggggggccacccttggggggtaaagtgggcttctgggcgagggagtgaaccggaagagggagtgatgggcccatgcagtcccttggtggaggcaagccacgacttgaattcatgccaaatggatgcccaaacttgtggccaagcccaagaagcgctaacaagcgattggcgggtggtgtaccagtctggcttgtggtggagtttgcccttaactgtgcggacaagttccttccgctggatcacaattggtgctaggtaggggaggcgcgacaaggtccgtgaagctgttcttcccaggaagaccccccgggggccaattaaccccggaaatacgttttttgccaagaaacgcttaaactttcttttcgttatttaacccacccccgttacttgggtcttggaaaaagaggcctttccttga

SEQ ID NO: 261774 - DNA, 1199 bp, Homo Sapiens
  misc_feature (438)..(438): n is a, c, g, or t
aggtagaattctatctgtgagatccagggtattagcaataccaatcagcaccaagtgagaattgcttagccatggccattcaaatagcgtgtacaatacattctggcctttgctgtccagttgatccatctcgtccaataccaacacaatcatggggcccttctctgcagtcatatgtttttccaatttcctcatcatgtccttcccagctggcctggatacctcttcctgacaaatctcttgagcaatagctgggaatacagcctgggcagtcctcaaggacatgcaattcagcatgatagttttaaagcctttcagttccttcttgaggtcttgcagaatccggcttaagcaggcagtttttccagttccaggagcaccagaaaggtaaaggcttccagcttttttcccacagatgtgttccctcaagaaattccntgatgacatccatctcccctttccctggcaggcagccgatctgggacagctgtgttcaggaccagctttgcttgctggtagcaagtgccttcttgcttgaatagtctcacacatgcagattctttcttcagtggacatctctgctcagaatttgttgtgaatctcttgactttttctaactgaagaaagtattttgttttggtgaactttggctagttctcttttgctaggagacttaattgtcagctgattgtcaaataccaatcttcgtcccttaagtgtatgtgagtgagggggaccattctctttcttgccttgctttggtggagaacaaggaggtaaatggggagtgttgcataggttgtcatcgcccagacgtttcctggggctgagaggcagggcttttacacgaggagaacaggttacggtttggacatttgttggttctagtttggcatcactggagtttttagctttgttcaatgcccgagacagcttcctttttggaaaactgattgtagcctgtgcctgggatcgggtttgaggcatgacgacagcacagctcaggcctcgccggaacccgcagccttcacccagctccgctgcctcacagaccccaggcctcctcgagcaatcctcttctttccacctcctcagtgcaggatccttctcacgtctctcacacgcagcctctcggactcaccaccacaagcccctgaacaaactgcacagcggcagcagcaaactccagccgcgctcgc

SEQ ID NO: 261775 - DNA, 933 bp, Homo Sapiens
agaaacttcatgatgaagctgtggctatttgtttagatggtcagcctctagcaatgattcagcagctgctagaggtggcagttggccctcttgacatctcacccaaggatatagtgcagagtgcaatcatgaaaataatttctgcattgagtggtggcagtgctgaccttggtgggccaagggacccactgaaggtcctggaaggtgttgttgcagcagtccacgccagtgtggacaagggtgaggagctggtttcacctgaggacctgctggagtggctgcggcctttctgtgctgatgacgcctggccggtgcggccccgcattcacgtgctgcagattttggggcaatcatttcacctgactgaggaggacagcaagctcctcgtgttctttagaactgaagccattctcaaagcctcctggccccagagacaggtagacatagctgacattgagaatgaagagaaccgctactgtctattcatggaactcctggaatctagtcaccacgaggctgaatttcagcacttggttttacttttgcaagcttggccacctatgaaaagtgaatatgtcataaccaataatccatgggtgagactagctacagtgatgctaaccagatgtacgatggagaacaaggaaggattggggaatgaagttttgaaaatgtgtcgctctttgtataacaccaagcagatgctgcctgcagaggggtgtgaaggagctgtgtctgctgctgcttaaacaggccctcctgcttccatctctgaaacttctcctcgagagccgagatgagcatctgcacgagatggcactggagcaaatcacggcagtcactacggtgaatgattccaattgtgaccaagaacttctttccctgctcctggatgccaagctgctggtgaagtgtgtctccactcccttctat

SEQ ID NO: 261776 - DNA, 644 bp, Homo Sapiens
tagtgatgattgcagtggggttcttgtgtcttcttatgttaagaggagccccgtctgtcatcccaatctgtgacctacctcagaggtgctcgtgacccacacacgcttttaaacccaggccagggcatgaatgatgatgaaggcagcccagtggagagcgagggatccaagggggaggcgaacaaagcaaacacccccatcacgctgtgcctgtcttatttcttgaaggtgaatgattccaattgtgaccaagaacttctttccctgctcctggatgccaagctgctggtgaagtgtgtctccactcccttctatccacgtattgttgaccacctcttggctagcctccagcaagggcgctgggatgcagaggagctgggcagacacctgcgggaggccggccatgaagccgaagccgggtctctccttctggccgtgagggggactcaccaggccttcagaaccttcagtacagccctccgcgcagcacagcactgggtgtgagcgccacctgtggccctgctccttagcagaaaaagcatctggagttgaatgctgttcccagaagcaacatgtgtatctgccgattgttctccatggttccaacaaattgcaaataaaactgtatggaaacgatgagcaaa

SEQ ID NO: 261777 - DNA, 828 bp, Homo Sapiens
ctcctcatcctcctcactatcgagatacttgtgggtggcgtagcccatcagggcaccaatattacctatgacgacgctgctgccaccagccccgaggctctgcagcgtggccactagccccccggcgggcacgccgcccccattcaggatcgcagaccagctcatcagcgaggcagccaccgagttggccgcgatgccggcgccggtgaagcccagcgcgggcagcccggcgactgcgagtcctcctccgacggccatgaaggtcagggccttccagaacccggagccgctgtccgagctctccgagcactttttcttacctgcctccaccccactgcaagtgaagagcagcaggtagcacaagaaaagcgataccgccttctgccgcatggtggcgccgcgcgcgggctccgtcactagaccttggaggagagaagagaagcaatcttcagcccggagcctgctgatagatgggcacagcagcgagtaaactcttaattgctttaaaactggagcatctttttcagaaattaaataattattactttttgttgctttggtaatttcgtttttacctgctttatttgtagcttcaaaaattgtgtaatttggaataatgtcttctttatttttataaaattctgttccagaacctgaagatgttgaagttttaataacaaaagactgaatacaccctgtaagagtaattccaaaaatacagaaataaaaaattatctttaaaatttttagtgctcttttaaagatttgtttatttttatcttcgccttgagtatttcctttgaaataatcgtaggcactagctcttac

SEQ ID NO: 261778 - DNA, 863 bp, Homo Sapiens
aatgctgccgtgcgccgcgggagccagggggcgtggggccatggtggtcttgcgggcggggaagaagacctttctcccccctctctgccgcgccttcgcctgccgcggctgtcaactcgctccggagcgcggcgccgagcgcagggatacagcgcccagcggggtctcaagattctgccctccaagaaagtcttgccatgattggataggacccccagataaatattcaaaccttcgacctgttcacttttacatacctgaaaatgaatctccattggaacaaaagcttagaaaattaagacaagaaacacaagaatggaatcaacagttctgggcaaaccagaatttgacttttagtaaggaaaaagaagaatttattcactcaagactaaaaactaaaggcctgggcctgagaactgaatcaggtcagaaagcaacattgaatgcagaagaaatggcggacttctacaaggaatttttaagtaaaaattttcagaagcacatgtattataacagagattggtacaagcgcaattttgccatcaccttcttcatgggaaaagtggccctggaaaggatttggaacaagcttaaacagaaaaaaaagaagaggagcaactaggagtccactctgacccagccagagtccaggtttccaaaggaaacagatggaactcctttcacaggggctctgagaaaaactggagctgatctcaagaagccccacatcttcctaatgggccccatggcctgtttgggggcagggtaggtcctggggcactgtgggccacctgcctgctgatgtgggctctaggccagcttgttggcacgtaagtggtgtgaaataaagcccaagcactggg

SEQ ID NO: 261779 - DNA, 795 bp, Homo Sapiens
  misc_feature (312)..(320): n is a, c, g, or t
  misc_feature (770)..(770): n is a, c, g, or t
  misc_feature (776)..(776): n is a, c, g, or t
ttaagtgttgctatttcttaattaaattgatttcctgtcattttgaatcatttatcacctgcgatgcatgattctattaattttgttatgttactgttttaaccaaagctgaccgtaaggataaaacacttaagttgttgctgagtactatatatcctcaatatgcatgtctgcccatcacatcaaatgttctgtcaacaagatgtttggtaattttttttaaaaaggttggaaaattaattatagaaggttctatactgtttttttaattaagaaactaaatctagcaggctaaaggttaattgtagtgannnnnnnnncacatagatatctttctatgacctagttagttactgcaattcagaattagttcacattgcataaagaattacttgttgtaagcaaaatgctgaaactaccaaaccagtggatgaagaccactaagaactttgcacataatcatacaatcttttgaaaatattttgcaaatatgtgtttagacaataagatggactagagttcgacaaaatgatttctttatttaaattttgtataagtattttcttcgacactttcaaattatattgtgttcttgatatatgctgtatatttatttgttagtgcatgtgtttttaatttacatgaaaacatgagttaggagaaattacaggttgaaagatgaaatgcctggtatgtggctccggaagaaatgggtaattccagattggtggcagggggggaaaccaatccaatttgggtttggttttggntttttngagaccgagcccttggccc

SEQ ID NO: 261780 - DNA, 391 bp, Homo Sapiens
  misc_feature (347)..(347): n is a, c, g, or t
  misc_feature (357)..(357): n is a, c, g, or t
acatagatatctttctatgacctagttagttactgcaattcagaattagttcacattgcataaagaattacttgttgtaagcaaaatgctgaaactaccaaaccagtggatgaagaccactaagaactttgcacataatcatacaatcttttgaaaatattttgcaaatatgtgtttagacaataagatggactagagttcgacaaaatgatttctttatttaaattttgtataaggtattttcttcgacactttcaaattatattgtgttcttgatatatggctgtatatttatttgttaggtgccatgtgtttttaatttacatggaaaacctggaggtaggggnggaaattacnggggtggaagggtgggaatggccccgtatggggc

SEQ ID NO: 261781 - DNA, 1375 bp, Homo Sapiens
aaaaagtgctttcaaaagaattggcgtccgctgttcgcctctcctcccgggagtcttctgcctactcccagaagaggagggaagcacaggtgggtttctttagctctgcgtcggatccctgagaacttcgaagccatcctggctgaggctaatctccgctgtgcttcctctgcagtatgaagactttggagactcaaccgttagctccggactgctgtccttcagaccaggacccagctccagcccatccttctccccacgcttccccgatgaataaaaatgcggactctgaactgatgccaccgcctcccgaaaggggggatccgccccggttgtccccagatcctgtggctggctcagctgtgtcccaggagctacgggagggggacccagtttctctctccactcccctggaaacagagtttggttcccctagtgagttgagtcctcgaatcgaggagcaagaactttctgaaaatacaagccttcctgcagaagaagcaaacgggagcctttctgaagaagaagcgaacgggccagagttggggtctggaaaagccatggaagatacctctggggaacccgctgcagaggacgagggagacaccgcttggaactacagcttctcccagctgcctcgatttctcagtggttcctggtcagagttcagcacccaacctgagaacttcttgaaaggctgtaagtgggctcctgacggttcctgcatcttgaacaatagtgctgataacatcttgcgaaattataacctgcccccagagctggaccatggagggggagcagggggaatatgcagaaaatggcccctggcccttcgaatgggggaaggggataccatctatgattactgctggtattctctgatgtcctcagcccagccagacacctcctacgtggccagcagcagccgggagaacccgattcatatctgggacgcattcactggagagctccgggcttcctttcgcgcctacaaccacctggatgagctgacggcagcccattcgctctgcttctccccggatggctcccagctcttctgtggcttcaacggactgggcgtgttttttcacggcccggcctggccgagactgcgaggtccgagccacatttgcaaaaaagcagggccagagcggcatcatctcctgcatagccttcagcccagcccagcccctctatgcctgtggctcctacgggcgcttccctggggctgtatgccctgggatgatggctcccctctccccttgcttgggagggcccccagggggggatcaccccaccttcggttttcatccccgatgggaaaccggttttctctccgggaggcccggcaagggttgctggagcctcccggggg

SEQ ID NO: 261782 - DNA, 1010 bp, Homo Sapiens
  misc_feature (44)..(44): n is a, c, g, or t
ccccccctccgcttcaacgggtcatgcgtgcggcttccgtatgngggctgggtggcgaattcggcacgagggtgggctcctgacggttcctgcatcttgaccaatagtgctgataacatcttgcgaatttataacctgcccccagagctgtaccatgagggggagcaggtggaatatgcagaaatggtccctgtccttcgaatggtggaaggtgataccatctatgattactgctggtattctctgatgtcctcagcccagccagacacctcctacgtggccagcagcagccgggagaacccgattcatatctgggacgcattcactggagagctccgggcttcctttcgcgcctacaaccacctggatgagctgacggcagcccattcgctctgcttctccccggatggctcccagctcttctgtggcttcaaccggactgtgcgtgttttttccacggcccggcctggccgagactgcgaggtccgagccacatttgcaaaaaagcagggccagagcggcatcatctcctgcatagccttcagcccagcccagcccctctatgcctgtggctcctacggccgctccctgggtctgtatgcctgggatgatggctcccctctcgccttgctgggagggcaccaagggggcatcacccacctctgctttcatcccgatggcaaccgcttcttctcaggagcccgcaaggatgctgagctcctgggctgggatctcccgcagtctggttacccactgtgggcccctgggtccagaggggacccccaatcagcgaatcaacttccgatctggacccgaccggggcattcccaagtgaggggggcaccacgaagcggggcttgtcttctggtgtggggaaccccggaaccgggccctgggcaaatggatggggaaagcccggaagcccccgggggtttgaggttttttcctgccccccacaaaaagggaactggccaccccaaattggggcccttgtaaacccccccgcgcca

SEQ ID NO: 261783 - DNA, 955 bp, Homo Sapiens
  misc_feature (860)..(860): n is a, c, g, or t
ttactctgttactctaagtaaattcagttgtgtgataaaaatgggtcaaatgtaatatgtattctataaattgtagaaaaaacatttcttagaaaaatttccaaagatgaaggactttagtattcagggatagtgcactgctctttgaaaactattaagtatttgggaatgtctggattatggtgggccaatgcttttgatcaactgccctgcacaaaaatgaaaaatgcttgagacagtgtatgcgtatatgtttattcctggaggatttaatctatttagttataattgtgactaaaagtttcacatctcaaaaagtttattagagattatgggctgtacttcatgggttttaatatttctttcaattataccagaatgtaaagctaacaaatctcttttaaggataaagtagccaatatttggtgcagcttcaatgtctttctgaagattaaggatattttgccacgtcacatccaattaataatgagcttttgttctacgtttttgagcctgcttcctgcatgcataaaattaatacttcagccctcttccaaaggattcaaatttacactggttagctgtgcgctatcattctttttattttctttccaagtacatgaaaaatccattctcttggtgtcactaccagtctgcttagttttaagtgaaattccttttatgtctacttggtttttacttgtgtcaacatttagtatgctacctcttctattgaaggatgaactcctaatgccctctgttgtgacaacaatggcattttttatagcttgtgtaacttccttttcaatatttgaaaagacttctgaagaaaaactgcagttgaaatcctttttccattnttctgtgaggaaataatcttccatgttttacatttctttccagaattataccatatttgtttcttatctcagtcatcactatggtgcttctgacg

SEQ ID NO: 261784 - DNA, 985 bp, Homo Sapiens
  misc_feature (569)..(689): n is a, c, g, or t
  misc_feature (697)..(710): n is a, c, g, or t
  misc_feature (792)..(913): n is a, c, g, or t
  misc_feature (930)..(940): n is a, c, g, or t
aaaagcctgccgggagcttggtgcgctatggcgacacccagcctgcggggtcgtctggcgcggtttgggaacccgcggaagcctgtgctgaagcccaataaacctctcattctagctaaccgcgtcggggagcggcgccgggagaagggcgaggcgacttgcatcacggagatgtcggtgatgatggcttgctggaagcagaatgaattccgcgacgatgcgtgcagaaaagagatccagggcttcctcgattgtgccgcgagggctcaggaagcccgaaagatgagatcaatacaggaaaccctgggagagtctgggagtttacttccaaataaattgaataagttgttacagaggtttcctaacaaaccttacctcagctgaaaatggacaagtattttcaatgactgaaatatagcttctgacaactatgcagaggcattttagagacattggcattgccatgccctctttggagggtagaagaggcaaaacacttttttcaccctttggaatcatagtatgggtagaagttatgatttatcttgaaataaaatcctctgaacagnnnnnnnnnnnnnnnnnnnnnnnnnnnnnnnnnnnnnnnnnnnnnnnnnnnnnnnnnnnnnnnnnnnnnnnnnnnnnnnnnnnnnnnnnnnnnnnnnnnnnnnnnnnnnnnnnnnnnnnnntttggggnnnnnnnnnnnnnnaaaaaattttttaaaactttttttgggggcgggggccccaaagggaagggaaaaggggccaaatgtttccccaggaaaaccnnnnnnnnnnnnnnnnnnnnnnnnnnnnnnnnnnnnnnnnnnnnnnnnnnnnnnnnnnnnnnnnnnnnnnnnnnnnnnnnnnnnnnnnnnnnnnnnnnnnnnnnnnnnnnnnnnnnnnnnnnacttcttattaaatttnnnnnnnnnnngggcattttttggaaaaagggggggaaatttattaaaaacttctc

SEQ ID NO: 261785 - DNA, 1260 bp, Homo Sapiens
  misc_feature (582)..(593): n is a, c, g, or t
  misc_feature (602)..(692): n is a, c, g, or t
ttaacaaagatttctcaggaagacagcagagcagaggaatctatatagatgtatgcacagacctgtctgtatgctgaactttgttaaaaatatctgccagttattaaaaagcacagtttaaatgggtggggttaaagttcaggtaagtaagttagagagaaaacattgtatgatcagctcctgcacttgatctatctatctttggcttcccaaacagtaactcactccaggccaagtgtgccttagcacgagtgaccacagtttaatagaccacacacatcgtttaacctgctcttggtcattggaaatttacactgaacaaagtgcaattaactgtagaacagttttatttttattaaaacttgactgaacaaaaggggaccatcaacattgtagacactggaggccttacagagtgctagcctcttccttcaggactcacctggggcctgctgcttttatattttgaaagagtttaagggctaataatttaatttgttgtttgttaaaaattaaaatctccgttctttccggctgcattgcttttgcatgttcacatatgatgtacttttatgatgtacnnnnnnnnnnnngagatggannnnnnnnnnnnnnnnnnnnnnnnnnnnnnnnnnnnnnnnnnnnnnnnnnnnnnnnnnnnnnnnnnnnnnnnnnnnnnnnnnnnnnnnnnnctgagtaactgggattacagtcgtgtgccaccacgctcagccctgagttagtttctagtatttttttctgactttcactctaaggatagcgttgaaaaaagaatgcacgtgtgagttactaaaaagtcagaataatgtgcatgggaacagtgcagcaacatgctagaaaatcctcactgcactccaagcagaggctagaggaatgcccagtgttaccttacgctttctagaagcagagccactccagccagaacccattttgcagtcttctcttcgctcttcagcctgaaggtccagatgtagctggggcctctcagtttggttctatacacagggcactcgtaggtctgtttggtttcttgtctgtccacgggggtggcttttgcaaagatgaccggcatagggcatgccagctccttgagacgggcttcaacaatggttcctgcttgggtgtcccagcgggcgcctatggcaaaaacacagcggttgcaattgtgtggcagcttgctactaatgataatgatcaagttgtttgatgcaataaacattcaacattctggttttgtct

SEQ ID NO: 261786 - DNA, 1266 bp, Homo Sapiens
  misc_feature (90)..(150): n is a, c, g, or t
  misc_feature (153)..(153): n is a, c, g, or t
  misc_feature (288)..(320): n is a, c, g, or t
aagaaccttcgtacgaaaaaagccttcagcgggcccatctgtgtgccctgccccatcaccaactgctttcccaagggtgtcatcctgttnnnnnnnnnnnnnnnnnnnnnnnnnnnnnnnnnnnnnnnnnnnnnnnnnnnnnnnnnnnnntcnaccaatccactgtttgacattccagctggtggccaagagattggtgtggaggcagaaagaggaaggagacagtgccaggaggaagaaggaaggagtcccttagctctcttcattgtcccctttacttcctgctannnnnnnnnnnnnnnnnnnnnnnnnnnnnnnnnatgcctgtatttctggcaatatgacaggcctgcctacccaagatcagaactccaaaaccactcccacccctgaaggtcgggagggtctgagcagccctggtggctgcctgtgctcaggtcctcagctccatgggaaataaaaatggcaccctgaatctctaggattttgtcacttggagtcacagcaaagttctcttcctcttgtccccccgttgctgctccttggttatagaacatggtaaatatttattactttcagagaaaccagatattttatagaggaaatatgtttgaggtgagttgtttttcacttggagaaggcggagggctcttcctgggacggagacctcctcctccggaggttattgagaatccgggctgctgctttgaggatcttcccaccatacagacagcgagatccaagaagagggctggccgggggcaaagtcacctcccagtgtggctgcactggaactgactaaaggctttaccttggatagttgcgtattcctggtgagagccttacatctcccacagtttctgcagagtgactgactccattctggcagcccaggaagtcctgggtgctaaatgtgatggccacatgtagtggttaggggatgttgtgtgtgtcccccaactgcctgggtacttgttcctgatccctggggctgtcctgtgggagcttttcctcctgcttgggcctagctaccatctccctctaatcccaggttctctacactgccctgggggtttaccagctgggattggcttctggttgagaaatccaagctgggcgtatgattgacgttacccttcaggtcatcgttacttgaataacgtcacgtgcctagcctccccacctatgatctgtccttttcccagcctcgctggtagtcctggtcacgggagctctacgtctactccattcctcctggcccacctg

SEQ ID NO: 261787 - DNA, 398 bp, Homo Sapiens
ccaatataatatttatacatgataaaaacagcatttgaatttgtgaggacatgaagtattcactccacgttgtcaaaacacccagtagacacgtgcagtgaagccagtagcctctctcgtgagcttacatgagctgtgtggactgatccttcctcacacgccatgctgtcctcagctcacacgtgcactcaggaagcttgcccatactcaagcctcactctagcattgcagacacatcaggttttatcttcagaaagacaccttaaaagtatcagaggaaaatgtgaacacatttttttaaatggtcttggaatgaagagacaaaaaccagaatccatgaaggaaaatagtttgacttctatacagaaaaagaaaataccgtatacaaagttaaaaaa

SEQ ID NO: 261788 - DNA, 856 bp, Homo Sapiens
atagtgctagagtgccctaacgatgggttactgggagcagaagtcagagctgcaaaaccacattgctattttgtggaagcggtgcggggcagggaaacattgtatctttagctcatccccgctccccacaggagcactcaaaattgcgaagatcttcccaggaagcaaaatacctcagtttaccccaaggttgagaacaaatgaacttaaatcatttaaatcaccacatcacaaaaggcagctatttgaaagactgaaaatgtcacttggaaataaaggttgggggaacacacagaaatggatcggaacacaatggagagagacggaggcgcatgtaactacagcaacctacacgccacgtatctcggaggagcaggctcctgcacacgcgggctctgtgacaccagacggtctatttgttcacaatactgaagggcatctagaattagctacagtaaggaatcgaaagttgcctgaagaatgggcacagaacggctgcgtcccgaaaatggcctgtccacttgggagggtggagctgctgggtcttcctgttgaccatgtcttgcaaaaagtgcagaggggaaaggcggctttagtcatctgctgtcattcctttcactgggtccttttgtctcatttcatccagctgtctcttcgtctcttcttccatccttcgaatgtcgtccatggtcaggtcaacccacttatcgagccaacagaacagctgcctgtggaagtttgtaaacagacgcctctcttgcttatggatgaagttctccactttgttctgcaggccccaccacttgaacttgacggtcaccagtttgtatgcacacatatatgggcagtccttctg

SEQ ID NO: 261789 - DNA, 773 bp, Homo Sapiens; identical to SEQ ID NO: 175039
  misc_feature (611)..(641): n is a, c, g, or t

SEQ ID NO: 261790 - DNA, 1039 bp, Homo Sapiens
ggcagtaatctcagggttataaggtagcgaggcctgggtggcgaattcggcacgaggggaggttcttgtctcccctggtttgtgaagtgcggaaaaccagaggcgcagtcatgtcgggattcgacgatcctggcattttctacagcgacagcttcgggggcgacgcccaggccgacgaggggcaggcccgcaaatcgcagctgcagaggcgcttcaaggagttcctgcggcagtaccgagtgggcaccgaccgcacgggcttcaccttcaaatacagggatgaactcaagcggcattacaacctgggggagtactggattgaggtggagatggaggatctggccagctttgatgaggacctggccgactacttgtacaagcagccagccgagcacctgcagctgctggaggaagctgccaaggaggtagctgatgaggtgacccggccccggccttctggggaggaggtgctccaggacatccaggtcatgctcaagtcggacgccagcccttccagcattcgtagcctgaagtcggacatgatgtcacacctggtgaagatccctggcatcatcatcgcggcctctgcggtccgtgccaaggccacccgcatctctatccagtgccgcagctgccgcaacaccctcaccaacattgccatgcgccctggcctcgagggctatgccctgcccaggaagtgcaacacagatcaggctgggcgccccaaatgcccattggacccgtacttcatcatgcccgacaaatgcaaatgccgtggacttccagaccctgaagctgcaggagctgcctgatgcagtcccccacggggagatgcccagacacatgcagctctactgcgacaggtacctgtggtgacaaggtcgtccccggggaacaggggtaccatcatgggcatctacttccatcaagaaatttggcctgactaccaacagggccccctgaaaaagggggggccgtggggcaatccaagctcctacctccgggtcctggggcatccggtggaaccacaatgctctgc

SEQ ID NO: 261791 - DNA, 1119 bp, Homo Sapiens
aggcagcgaggcctgggtggcgaattcggcacgaggcccctggtttgtgaagtgcggaaaaccagaggcgcagtcatgtcgggattcgacgatcctggcattttctacagcgacagcttcgggggcgacgcccaggccgacgaggggcaggcccgcaaatcgcagctgcagaggcgcttcaaggagttcctgcggcagtaccgagtgggcaccgaccgcacgggcttcaccttcaaatacagggatgaactcaagcggcattacaacctgggggagtactggattgaggtggagatggaggatctggccagctttgatgaggacctggccgactacttgtacaagcagccagccgagcacctgcagctgctggaggaagctgccaaggaggtagctgatgaggtgacccggccccggccttctggggaggaggtgctccaggacatccaggtcatgctcaagtcggacgccagcccttccagcattcgtagcctgaagtcggacatgatgtcacacctggtgaagatccctggcatcatcatcgcggcctctgcggtccgtgccaaggccacccgcatctctatccagtgccgcagctgccgcaacaccctcaccaacattgccatgcgccctggccctcgagggctatgccctgcccaggaagtgcaacacagatcaggctgggcgccccaaatgcccattggacccgtacttcatcatgcccgacaaatgcaaatgcgtggacttccagaccctgaagctgcaggagctgcctgatgcagtcccccaacggggagatgcccagacacatgcagctctactgcgacaaggtacctgtgtggacaaggtcgtccctggggaacagggttaccatcatgggcatctactcccatcaagaaatttggcctgactaccaacaggggcccgtgaaaaggggtgggccgtgggcatcccaaagctcctacatccgtgtcctgggcatccagggtggacacagatggctctggccgcagcttttgctgggggcgggagccccccggaaggagaagggagttcggtcgcctggctgcccttcccaatgtctataaggtcatcttccaagagcatgcccccttcaat

SEQ ID NO: 261792 - DNA, 1010 bp, Homo Sapiens
cgtcctaggtagcgaggcctgggtggcgaattcggcacgagggagcgtggaggttcttgtctcccctggtttgtgaagtgcggaaaaccagaggcgcagtcatgtcgggattcgacgatcctggcattttctacagcgacagcttcgggggcgacgcccaggccgacgaggggcaggcccgcaaatcgcagctgcagaggcgcttcaaggagttcctgcggcagtaccgagtgggcaccgaccgcacgggcttcaccttcaaatacagggatgaactcaagcggcattacaacctgggggagtactggattgaggtggagatggaggatctggccagctttgatgaggacctggccgactacttgtacaagcagccagccgagcacctgcagctgctggaggaagctgccaaggaggtagctgatgaggtgacccggccccggccttctgggggaggaggtgctccaggacatccaggtcatgctcaagtcggacgccagcccttccagcattcgtagcctgaagtcggacatgatgtcacaccctggtgaagatccctggcatcatcatcgcgggcctctgcggtccgtgccaaggccacccgcatctctatccagtgccgcagctgccgcaacaccctcaccaacattgccatgcgcctggggcttcgagggctatgccctggcccaggaagtgcaacacagaatcagggctggggcgcccccaaatgcccattgggacccggtactttcatcatggccccgacaaatggcaaatggcgtggaaacttcccagaaccctgaaagctgcaaggagcttggcctgatgcagccccccccacccggggaagatggcccaagacaacatgcaagcttctactgcggacagggtaccctggggtggacaagggtcgtcccctgggggaaacagggtttaaccatcatgggggcatctaccttccattcaagaaagtttgggccttgactaaccaacagggggcccgtgaaaca

SEQ ID NO: 261793 - DNA, 808 bp, Homo Sapiens
  misc_feature (251)..(251): n is a, c, g, or t
  misc_feature (522)..(530): n is a, c, g, or t
ggcagctgccccagggaggaggagggcagcaccatccccatccaggaggattaccgaaaaccggagcctgcctgctccccctgagccagcacctgcgggagctgcactacagccctggcctccacccccaccccgccgacccatccaagggagagtgagacctggcagccacaacttgcagtcccatcctcttgtcagggccctttcctgtgtacacgtgacagagtgccttttcgagactggcagggacngaggacaaatatggatgaggtggagagtgggaagcaggagcccagccagctgcgcctgcgctgcaggagggcgggggctctggttgtaaaacacacttcctgctgcgaaagacccacatgctacaagacgggcaaaataaagtgacagatgaccacccctacaacgacgaggccccaacccgcggcataatcctgccggccgccccggccctccacaagccttcccgaacctccctttgggccgcgggccacccaggccacgggcacatgnnnnnnnnngtccccaaccctatccccgccatgacctcgccccgcggatccacctccgaaaagtatgccccgcgccacccactaggcttccttgaacacgcaatcccccgcgaagtccctgccgacccccgccccgcccacgtcacggccccgccctacttcaccgcgcccccgcggcgatgacaagaaaacgcccgcgcccccgggcgctgtagccggcacgcccgcggaccaccagagtccacaactccgacccagcctttcgcggcgcaccccccccaccgcgg

SEQ ID NO: 261794 - DNA, 602 bp, Homo Sapiens
cttggcgtttcctttggcggattttctgttttcggaagttgctgggttcgttttattcagcggcagtggtgctttcccgaatctcagaatgcctgttaaaagatcactgaagttggatggtctgttagaagaaaattcatttgatccttcaaaaatcacaaggaagaaaagtgttataacttattctccaacaactggaacttgtcaaatgagtctatttgcttctcccacaagttctgaagagcaaaagcacagaaatggactatcaaaggaaaagagaaaaaaattgaatcaccccagtttaactgaaagcaaagaatctacaacaaaagacaatgatgaattcatgatgttgctatcaaaagttgagaaattgtcagaagaaatcatggagataatgcaaaatttaagtagtatacaggctttggagggcagtagagagcttgaaaatctcattggaatctcctgtgcatcacatttcttaaaaagagaaatgcagaaaaccaaagaactaatgacaaaagtgaataaacaaaaactgtttgaaaagagtacaggacttcctcacaaagcatcacgtcatcttgacagctatgaattcc

SEQ ID NO: 261795 - DNA, 1287 bp, Homo Sapiens
  misc_feature (17)..(17): n is a, c, g, or t
  misc_feature (34)..(34): n is a, c, g, or t
  misc_feature (49)..(49): n is a, c, g, or t
  misc_feature (92)..(92): n is a, c, g, or t
  misc_feature (123)..(123): n is a, c, g, or t
ggaacatcctggggttnaaacaaggcaagctgtnccgtaaaaaccatanaaacgacctccataatcaaatggccccatgtccttccttgggnccggggtaaaagtggggtaagtaacctcccnctgggtcaaagatgtgccttgaagtattcggctgaatctgtctgaagttcccggaagaactactgatctccctcggcccccccaggtggaaaagcagatctgtggatgtcaagccgaagaactactccgtttatggagaggctgcagggctcggacacaaactgtacttgctttttgtcctctcgagacagatcggagtagctgaaaggcggctgggggtacacaggctcatggtgcacatctctcaatgacgggacaaagacaaggtgggagccggagcttcttgtgccttcaataattgttcgtagacactgcttgaaaatgtcttcaaatggacttgtcagtagacaattctccacctggttcatgcttagcatccaggaaagggccaaacaggatgcagacatctggccggtcatggttgatgacagcaatcaggtcaagcagggggtcatacgtgatgctgtcagatgtggtgtatggtccacaggcaaccaggaccatgctttgctcaaagtctgcatcctcttcagtgggctgataaaatggaagtggcacaccctcgtagagtttggtggcaacaagtttcctaccagtggtgttgattccttccataattacaacctgtccaggaaacagagaatattccttaagctcagataaatccactggaatttgagcacccgaggaatgttcccggtctccctcgagaatcactgacttgttgttcagcttcccgttgctatcacagccaatctggcccagcagagtgacaggctcctgtgctggggctagcaaaggagtgaaagcttcaatcttgtaatgttccttgagttcgctgccaagttcttctatcttacaggtcagaacttctcgaatgtctgggagcttctgaaacatggatttgtagctcccagttagtgcctctggacatcccaagaccttcaggctgatgtttccagctcctcctctcccagaccaagatactccctgtgctaagccgaaggaggtaaccacttctcctcggttacttcgtgagttgtatttctgggagggagtagcacttggagagaaacttgacggtgagagtagctgatgggggctacgagttgacacactcctttttgttaggggggtttctggggtagagatagctcgcttctg

SEQ ID NO: 261796 - DNA, 1161 bp, Homo Sapiens
acgcctatttgggcggattcttggcgccggaggaagaggcagggtcaccctctctccacgtcagagacctgactgtggagatggcggctcagaagataaacgaggggctggaacacctcgccaaagcagagaaatacctgaaaactggttttttaaaatggaagccagattatgacagtgccgcttctgaatatggaaaagcagctgttgcttttaaaaatgccaaacagtttgagcaagcaaaagatgcctgcctgagggaagctgttgcccatgaaaataatagggcttacttccattcagtctttttcatgctgccaaagcttatgagcaagctggaatgatgttgaaggagatgcagaaactaccagaggccgttcagctaatggagaaggccagcatgatgtatctagaaaacggcaccccagacacagcagccatggctttggagcgagctggaaagcttatagaaaatgttgatccagagaaggctgtacagttatatcaacagacagctaatgtgtttgaaaatgaagaacgcttacgacaggcagttgaattactaggaaaagcctccagactactagtacgaggacgtaggtttgatgaggcggcactctctattcagaaagaaaaaaatatttataaggaaattgagaattatccaacttgttataagaaaacaattgctcaagtcttagttcatctacacagaaatgactatgtagctgcagaaagatgtgtccgggagagctatagcatccctgggttcaatggcagtgaagactgtgctgccctggaacagcttcttgaaggttatgaccagcaagaccaagatcaggtgtcagatgtctgcaactcaccgcttttcaagtacatggacaatgattatgctaagctgggcctgagtttggtggttccaggagggggaatcaagaagaaatcacctgcaacaccacaggccaagcctgatggtgtcactgccacggctgctgatgaagaggaagatgaatactcaggaggactatgctagtattttgcttgctgaaaagaaaagggaaacaaaggtaaaatcctgacatgccatttcaaggacttgggaatagattagggatatccgtacttcattatagtcatgatttttggatcctaataaagact

SEQ ID NO: 261797 - DNA, 1293 bp, Homo Sapiens
gggggaccaagatggcggcgccctgtgagggacaagcgtttgccgtaggggttgaaaagaattggggtgcagtagttcgctccccagaagggaccccccagaaaatccggcagctgatagatgaggggattgccccggaagagggaggcgtggacgcgaaggacacgtctgccacatcccagtcagttaatggatcaccccaagcggaacaaccttcattggaatctacaagcaaagaagccttctttagcagagtggaaacattttcttctttgaaatgggcaggtaagccctttgagctgtctccactcgtctgtgcaaaatatggctgggtcacagtggaatgtgatatgctcaagtgctctagctgtcaagcttttctctgtgccagtttacaaccagcttttgactttgacagatataagcaacgatgtgctgagctgaagaaagccttgtgtactgcccatgagaagttctgtttctggccagacagcccatccccagaccgatttgggatgttgcccctggatgagcctgctattcttgttagtgaattcctagatcgttttcaaagcctttgtcacttggacctccagcttccttccctaaggccggaggacttgaaaactatgtgcttgacagaagacaagatcagtcttctcctacacttgcttgaagatgaacttgatcaccgaactgatgagagaaaaactacaatcaaattaggctcagacatccaagtccacgtcactgcctgtattctctctgtgtgtggctgggcgtgtagttcctctttggaatccatgcagctctccctgataacatgttcgcaatgtatgaggaaggtggggctctggggcttccagcagattgaatcgtccatgactgacctggatgcatcctttggcctgaccagctccccaatcccaggccttgaggggcgaccagagcgcttacctctggtgcctgaatctcctcggaggatgatgacccggagccaggatgccactttctccccaggctcagagcaggctgaaaagagccctggtcccattgtctctcgaactcggagctgggactcttccagtcctgttgaccgtcctgagccagaggctgctagccccaccaccaagaactcgcccagtgacccgaagcatggggaacagggagacacccctgggcctggaaggaccatctagccctcttgcggaaacccagcgagctcgcctcggctccctcagcagttcggaaacatcctcccggaagctcctttgatcccactctcagcataaa

SEQ ID NO: 261798 - DNA, 433 bp, Homo Sapiens
  misc_feature (19)..(19): n is a, c, g, or t
  misc_feature (30)..(30): n is a, c, g, or t
  misc_feature (63)..(63): n is a, c, g, or t
  misc_feature (74)..(74): n is a, c, g, or t
acaaaaaacataccaatanaacaagtaatnagttaattatttccttccttttcccccaggccncctagtttttncccttcctgtaaaaaagaaaaaggttaagaataaccctcaaactgtcccctctgaagtgaataacatattaggatgcctgactttccctatataatttccttacccaaggttttattccttaagtttaaagcatcacagtaagtggtgtaataccttggaggaattctagaagcaggcagaaagtgcaattcacatgaactaaaaaaggatatagaaaatgtttccactctgctaaagaaggcttctttgcttgtagattccaatgaaggttgttccgcttggggtgatccattaactgactgggatgtggcagacgtgtccttcctaatataaagtggcaaaactgttggtaaacctt

SEQ ID NO: 261799 - DNA, 1085 bp, Homo Sapiens
  misc_feature (107)..(149): n is a, c, g, or t
  misc_feature (503)..(562): n is a, c, g, or t
aagttttaatctgtctcctccactaggccatgagccctaggaggagattgtctctagagggtatcccctgtgcctggcacatgcatgcaagttatgatttatgttgnnnnnnnnnnnnnnnnnnnnnnnnnnnnnnnnnnnnnnnnnnngtggatgggtcctctgaggctctagaaataggggtgagaggccagccaggtgtagcatgaagggctggacaagaagggagaggccttctgggataagatgggaaggaggctgtaccccacaccctgaaggtgtctatgagttcacatggctcaggaatggagttttggggccctagatgtagacagctgtggcgatggaggccaaggttttggcctgctgtgggggttgcattcacctccccatctccacatgacgataccccagcatttacgaggcagctctgctgacctggcccaggcaccgtggtccccaacttcaacgcatctgaagcgttgcccagggagcgcattagnnnnnnnnnnnnnnnnnnnnnnnnnnnnnnnnnnnnnnnnnnnnnnnnnnnnnnnnnnnnggggggcgctgtaggttttgcctaaagacgagtctaaatctggcacgcaggttaaggatgaccattcctaaggcaagcaggtgacactgtcggcaaattgaggtgagactttttctgacccaccccgataccggagggatggctgggctctggtttggatacagacagaatgccagggactacacctgcttctcacttggaacttgggtgaaacctctcaggaagctgtcattcttctcctataccccacctcaccctcttccacccaccactagcagagagattcgggaggggcttgggccagctgaaacccataggaagcacgtccccagagacccggctttcccagcctctcctctcctcccatcacagccccatggttaagaaatgtcctgccgagtgcttttggatttgagcattgctggatttttgcttgtgtcttgttgagacttttgagtgggcagcagttctgaataccagccttcatagtctattctctgatctcaagaatgcaaaaactctt

SEQ ID NO: 261800 - DNA, 822 bp, Homo Sapiens
cctggccgaggtgggtcggtagtagcgatggcgggtctgactgacttgcagcggctacaggcccgagtggaagagctggagcgctgggtgtacgggccgggcggggcgcgcggctcacggaaggtggctgacggcctggtcaaggtgcaggtggctttggggaacatttccagcaagagggagagggtgaagattctctacaaaaagattgaagatctgatcaagtacctggatcctgagtacatcgaccgcattgccatacctgatgcctctaagctgcaattcatcctagcagaggagcagtttatcctttcccaggttgcactcctggagcaggtgaatgccttggtgcccatgctggacagtgctcacatcaaagccgttcctgagcatgctgcccgcctgcagcgcttggcccagatccacattcagcagcaggaccagtgtgtggaaatcactgaggagtccaaggctctcctggaggaatacaacaagactacaatgcttctctcccaagcaattcgtgcagtgggatgagctactttgccagctagaggccgccacgcaagtgaagccagcagaggagtgatagctgctccccatcccaaagtgggcctgggcagtcaggctccagggccctatgccaacctgcctttgttacaaggcagaggaagctttgtatttattggcttcaaggcccacctctctgtactctgggctctaaagttggaggtcaggttacctgaggtttgcaatttgcaacacccaccctccccccaatcagtgttcttatttcagtgacaataaaccatagagatgaaa

SEQ ID NO: 261801 - DNA, 1082 bp, Homo Sapiens
  misc_feature (1000)..(1000): n is a, c, g, or t
  misc_feature (1070)..(1070): n is a, c, g, or t
aaggagcgaggcctgggtggcgaattcggcacgaggggatgccagtgggcggccagatgcggtggtggcaaaggaagcctgggagaatcacaggttgaggaatgattctgtgattgtggatactttccatggcctcttcaaatctactttggtttgcccagaatgtgctaaggtttctgtgacctttgacccattttgctatctaacgctgccactgcccttgaagaaagatcgagttatggaggttttcctggttcctgctgaccctcactgcagacctactcagtaccgtgtgactgtgccgctgatgggggctgtgtccgacctgtgcgaggctctctccaggctgtctggcattgctgcagaaaatatggtggtcgcagatgtgtataatcaccgattccacaaaattttccaaatggatgaaggtttaaaccacatcatgcctcgggatgacattttcgtgtacgaggtctgcagcacttccgtggatggctcggaatgtgtcacgcttccagtctacttcagggagaggaagtccaggccatcaagcacttcctccgcatcagcgctatatgggcagccactattgctttctgtccccaagcacaagttaacccttgagtctttgtaccaggctgtttgtgatcgtatcagccgctatgtgaaacagcctttacctgatgagtttggcagctcacccttggagccaggggcctgcaatggctccaggaacagctgtgaaggagaagatgaggaagaaatggagcatcaggaagaaggcaaagagcagctttcagaaacagaaggcagtggggaaagatgagccaggaaatgaccccagtgagaccacccaaaagaagatcaaaggccagccctgcccaaaaaggctttttaccttcagtcttgtgaactcctatggaacagctgacataaattcacttgcagctgatggaaaactacttaaactcaactctcgatctacactggccatggattnggacagtgaaactcggagactttactatgatgagcaagaatctgaggcctacgagaagcatgtgagcatnttgcagcctcag

SEQ ID NO: 261802 - DNA, 996 bp, Homo Sapiens
  misc_feature (669)..(669): n is a, c, g, or t
  misc_feature (680)..(680): n is a, c, g, or t
attccggttatctagctcagccgtaagtagtttctctatcagtcgcgcagctgtgttcgcggactcaggtggaaggaatttcttctcttcgttgacgttgctggtgttcactgtttggaattagtcaagtttcgggaatcaccgtcgctgccatcaacatgtcggtcccaagcgctctcatgaagcaaccgcccattcagtctacggctggggccgtcccagttcgcaatgagaaaggtgagatttcaatggaaaaagtgaaggtaaagcgttatgtgtccggaaaaaggccagactatgcccctatggagtcctcagatgaggaggatgaagaatttcagttcattaagaaagccaaagaacaagaagcagagcctgaggaacaggaggaggattcatccagtgacccccggctacggcgtttacagaaccgtattagtgaagatgtggaagagagattggctcgacatcgaaaaatagtggaacctgaagtggtaggagagagtgactcagaagtagaaggagatgcttggcgcatggaacgagaagacagcagtgaagaagaggaggaggaaattgatgatgaggaaatagagcggcggcgtggcatgatgcgtcagcgagcacaggagagaaaaaatgaagagatggaagtcatggaagtggaanatgagggtcgntcttgagaggagtcagaatcagagtctgagtatgaagagtacacagacagtgaagatgagatggagccttcgccttaagccagtcttcattcgaaagaaggaaccaagtgacagttcaagaacgtgaaaccgaaacattgaaacagaaggagctgggaccaggaaccaaaacccctggctgaggaaaagcgccaagtacccactccagaattgtcgaaaagggaaacccaaaaaagacctgggaaaaaaacaagcgaaccccttgggtggcttggaatgcccctcaataaccgggggaatgaaaatggatggaggg

SEQ ID NO: 261803 - DNA, 478 bp, Homo Sapiens
  misc_feature (422)..(422): n is a, c, g, or t
  misc_feature (442)..(442): n is a, c, g, or t
actcaaccgaaagcctgcagagagcagaacatggaaggagacttctcggtgtgcaggaactgtaaaagacatgtagtctctgccaacttcaccctccatgaggcttactgcctgcggttcctggtcctgtgtccggagtgtgaggagcctgtccccaaggaaaccatggaggagcactgcaagcttgagcaccagcaggttgggtgtacgatgtgtcagcagagcatgcagaagtcctcgctggagtttcataaggccaatgagtgccaggagcgccctgttgagtgtaagttctgcaaactggacatgcagctcagcaagctggagctccacgagtcctactgtggcagccggacagagctctgccaaggctgtggccagtttcatcatgcaccgcatgcttcgcccagcacagagatgtnttgtcggagttgaacagggnccagcttcggggaaaagggggaaaggattttcagct

SEQ ID NO: 261804 - DNA, 764 bp, Homo Sapiens
gcatatttcttcagcctttcttctcgatcacccgtgtattctttgaccagtaaatgaccacacctcaatgatggtaaaacagcatcatcagtaagctatcttatatgcctcatcctgtgagtttgagcttcaggaaacatgagtaaaagtatatgtaatgtatatagtcgtatatgtattctagcaagaaaaacatatttattttgacaaaggggaacactgactttctgaaggattcagaaagaaccttagtgaaaggttctcagtctctgagagtggaccctaattaacataaagaccattcatcagcgaataactactgagcaactctagtgtgccagcacaggccagacatactagtgagccaggcacatctggccttgggaaactcatcctacaggggaaggccagtttttttcccttcaattcctcaagtctgggtggtgacaaggtaggggctaggtactggactaccacaggtttttaggaactaaggtgtttctcataaacacaaaatgttgggtgaaactgggaacaactactcagaagctaatttatttgcttaaatggaaagtgtgggagccactaccctctcttttgatctgccaaggatttcctctcagagctgttgcacagacagagattgtacttggtaagataccaaacaagacagatatggatctaaatttctaatgtgttctatgggtttcaattctgaaaaaagaaaatgaataaagattttaataaatattgatatctgaaaa

SEQ ID NO: 261805 - DNA, 1184 bp, Homo Sapiens
ttgtttctgagctaaacagctcaatcctttttcgcctgtaactacctaagaccaatgtgaacctttgtatttttgctcctaattttggactcagtgaaagtgtactgtttacatgtacagatgcccccagtccctgtgtgttctgcaagacttgctcttgaggaggaagatgcacctcactaaggctcatctgcttaggcaaagccacaaacaaaaacctctcactttttacctacgtttccacctaaaaatacaacaaaaaacctattaccacgtagaactcagattggctgaaaaacactttccacctggtagatggcccatatgcctcaattatgtggtccatttaggagcaggagtcagaagagagacctcttattggctgctggtgggtaactgcatggacagaggaaaagggaaggcaggactttgctgcagagctgtgggatgaatgtagttcttccctgggcagcctgggagtgggaaggtcagaatgactcatgttgccttcaggatcaagccatccaggatttagggacaacccaagaggtctttagtcctctggcataatttagacatgttttggaagagcatgagttccatatctgagatgagatttaagactttcagtgcagatagtacaagccatttcttcagggttcctctgggggcagctccttcatgaggtcccacctccggggaggggcacagggctccagatagtaagcacttaaggcaaacagtggatggcaccaacttttaaaggtgactctattaatggcttcacctctaaattatatttttacagatatgcacctatgcaacttaacgtggctcttctaagcaggtgaggacttcctcctcaatgctctctataaaaattatttgtgttctatatagtgagttttaccagtaaatgtggcttaatattttaattcttagaatgtgtcttctctacgtgatgtgactaaattctgttttgtttgtggaatgactagcacaggccgactccctctctccctcacttaacaaaagaccaatgagctgttaatcgagctgttatctccatggtattacttgctaaatgcactgatttcataagtatgtggaatccttttccttttgaatctgtatatcatatataagactgaatctacttaataaacactgaacaacaaaccgaa

SEQ ID NO: 261806 - DNA, 880 bp, Homo Sapiens
ttgctcagccgcacatcatctctgctacccaagatgtcccggctgtgggaagatgccagaaaaggaaccaaggaactgccatactgcccactctgggtctctgccacccacctgcttcagggccaggcctgggttcaactgggtgcccaaaaagtggcaattagtgaatttagcaggtgcctcgagctgctcttccgggccacacctgaggaaaaagaacaaggggcagctttcaactgtgagcagggatgtaagtcagatgcggcactgcagcagcttcgggcagccgccctaattagtcgtggactggaatgggtagccagcggccaggataccaaagccttacaggacttcctcctcagtgtgcagatgtgcccaggtaatcgagacacttactttcacctgcttcagactctgaagaggctagatcggagggatgaggccactgcactctggtggaggctggaggcccaaactaaggggtcacatgaagatgctctgtggtctctccccctgtacctagaaagctatttgagctggatccgtccctctgatcgtgacgccttccttgaagaatttcggacatctctgccaaagtcttgtgacctgtagctgccacgttttgaagagcttgagctgggtccccagtgggctgtctctctgtggggagggctttctgcttcaccatcattaggaatgtgaccattcctatataattcctggactggtgagattggtggtaggcctgtgaaatttgccctagttactaccattctcgttttggaggaaacaatctctgccaccaccaagtcattgactttgctcgaggcaccttttttcctgtttctccttttctgttgtcgagtaaaatttcatattc

SEQ ID NO: 261807 - DNA, 1511 bp, Homo Sapiens
  misc_feature (813)..(846): n is a, c, g, or t
  misc_feature (1431)..(1431): n is a, c, g, or t
ggagagtctggaaatcgtgaaagagcttgaccgatgaaatgggcctggctgtcgtatcggtaatttggtgaatgttgcttaagatcagcctggaaaggtagttagtcagatccgaagtgacatatttgcactgccaaaggaggctctggaggttaaagtatgtgttttaatttcgttgttgaggccatataatgcagagttgacggaccgaccttatgagtcaccttggagcggagtagtggagacttaaagacagactaccctggagctggcttcaaactagttcttaatattgtgactcgaactccccatccccagaaattctcagatcttagaagccaaagactggcaaggatactagagggaactactcgagtaggcgaggtcagactacataccgaataggagtccttccaaaaatacagaaggctgaggccggggtgctagagaaccttgccgtgctggaattcacgttgacgcccccacggagctctgctgcagagccctcgagtcccgcacttccggccgccaggtggcgctggttctgttgccaactcggagagactgagctgggccacgcaagatggcgccgtccgccttgctgcgtcccctttcccggctgctggcccccgccaggctcccgagcgccccttcagtgcgatcaaagttctacgtgcgagagccgccgaatgccaaacctggactggcctgaaagttgggttcacgttgggcaccactgtcttcttgtggatctatctcatcaaacaacacaatgaagatattttagaggacctccacagacgcggcgacgannnnnnnnnnnnnnnnnnnnnnnnnnnnnnnnnntccaagaaacttttctagaaccacttccgctttgggcgccgcggggcccccggtacggttaaggggaacccatgcgcgtcttacgttgggcttttacgcccaggcgagaacctcgcgtgggcctcctttgcccccacacgcgggcgcttcggcgcattctacctcccacctccgatcccggtagcagagatcccgggcgccacggggggcgggggccaacaaacccccccagaaggccgggccctttcctgtgggaaaaacatagactgagctcccccaaccaggctcggcgccaggtattttcttcgcgcgcgggtttccccccttttagaactgcgggcgggtctctttcacctccggcctacccgggtaatttttcttatcgagcgcgcccggggcattcgcggagtattattcccccgcccgtaacggttttcccccgccgccccgggggatcacactcccccgctttcgccgatgagccacccgcgcgttgtttaccgcgtctcccctcccggagaccccctttcgcggcccccgggattattgccgcacggacccctcctcccccctataccgccgccnttgcattccgatctcctccgcacctccgccgcctttgtggccgtccaagcgccacctcgtgctaaagcccctggcaatca

SEQ ID NO: 261808 - DNA, 723 bp, Homo Sapiens
acggagctctgctgcagagccctcgagtcccgcacttccggccgccaggtgcgtctggttctgttgccaactcggagagactgagctgggccacgcaagatggcgccgtccgccttgctgcgtcccctttcccggctgctggcccccgccaggctcccgagcggcccttcagtgcgatcaaagttctacgtgcgagagccgccgaatgccaaacctgactggctgaaagttgggttcaccttgggcaccactgtcttcttgtggatctatctcatcaaacaacacaatgaagatattttagagtacaaaagaagaaatgggctggaataaacttttgaaacactaatgtagtatgctccgtatagtgattgtagctgttcctctggattcaccatctgttgagttgtaaatgtgagagaaaaagttatatgtgaatatatatcaagccagcatttgtattttgcatcattaaataaaaagaaataaaaatacttctgtattcttccaaatacagcatatttgggaccccttaccttcgtacactctcccccccactaattgttggcccgcccctccggcccctcaagaaacttttccaaaacctttccctttcgggcgcccggggccccatccagggaaagtgaacaccgcgccatagcttggtttcccaaagcagcatcccaggtccagggcacacaagagcatcggccaccctcccccaat

SEQ ID NO: 261809 - DNA, 778 bp, Homo Sapiens
  misc_feature (162)..(195): n is a, c, g, or t
cattgaaatagcaggagcatgttgatttcttggttaggttgcattataataacaagagtcagaacattaattcgaaacaacttgcagtatgcatttcttcacaccagtacattcttaagtgtacttgtttataaggaataacataaactaatctgtaccttnnnnnnnnnnnnnnnnnnnnnnnnnnnnnnnnnnaactgtatagtgtacatggtaatgatttattgctatgccccagatccttaatgtggttctcatcctccgcatgccctcagccacaagcgggtgactgactgttccctgatgatttggcccacctcctgtgtttggacctctagggaggagggttttggtcatactctccttatcctcgtgcacagaaatgctcagggtccccatgtgcctgttgttcagccctctctcttgttccctttctgagcatgtggtccttccccaggctgtgggacagctgccttcccacgaaagtgtaaagcagtattaagatcattactgcatgtgccctaaaaacccaagttttctattcccttaggacagaaaattgcatgtgaggtgggataatcgagtttcagtgacccacgtcagttacacattaaagccagaccccatgataaaattccacaaaatggaaataaaactcaaatttctttagcattgtgtaaataaatctgaatgtgtttaactttgtactggtaattttctgtatatttggaatatttgggttaaaaataaaacagactggactttgttacctgaaaaa

SEQ ID NO: 261810 - DNA, 527 bp, Homo Sapiens
aatcgtggagaatgcgccggcaggccccccacccccagcctaaggtgcaggaaggaccagcacgaacccgctggctttgctgcgcagccaggagatgagtcccaccgggcactgagcccaggtacaggacatcagagaatgaacacagaggcagaggccctcatgtccctctcagagtcccggctctgcaaagagcccgtctgtctccagcttccagaattccgcactgtgaatctgtctacgtggactgggaaaacagggttggcaccactctgccactccgtttgtgcctgggaagggctaagtatgcaaggctacaaacatctacttcactgggatcccaaatgctcaacaaaccatgacctgctttggtcagaaccaccagaaatattaagggaagactcagagagtttgggggaggaaattaatggtgaattacccaggcactttctcaaatctctttttctctggaaggaaggactgactaggggcagcctgctggcttcattttcacacgacagaaaaat

SEQ ID NO: 261811 - DNA, 599 bp, Homo Sapiens
  misc_feature (220)..(220): n is a, c, g, or t
  misc_feature (396)..(416): n is a, c, g, or t
ccagatatgacctccatgtagtacataaagtgccttcagaattggtgcatttacaacaaaaactggttatttagctaccattagcaaacgcatacaaacaggagactaaacagatctggtttccacggttttgaatcaagcagtgccaagtttcattcaaaatgtctctactacaaacagcaaagaggaaatagaataaaagatgactgtacagcgccanggaagggttaagtaatttctcggatgagaaatgggagtccaaccctgtctcaaatgtgttagaacacatgtaattacttctaaggaataatggtgtgattcctttcaagtcaacacaaaatttgtcatgctatgttacaattctctcagcctgtagctattagctaaatttgtacnnnnnnnnnnnnnnnnnnnnncgtaatatccagtttttcattctgagtatggaaaaaattatcattatgtctaatattatattggaaattctctcaaagtacttgtctgtaggtttttggacaaaaatttgccttccaattctaataaagtagagggtggaggtgtcagagtacttcaaaaataaaaatgtcattgacattaaa

SEQ ID NO: 261812 - DNA, 1000 bp, Homo Sapiens
  misc_feature (985)..(985): n is a, c, g, or t
aggtgtgagccagcgcacccagcttgaggaaggagaattgtaagagaggcaacttgttgtatatggtatacaggccatgggcttttctgtcaagactgacttggattaaaaatccaaagcccatctttgccacttttagctgtgtgacctcaggtgagctaagaacttttctgagcccttctcctctgtgtaatggggctaatatatcatcacctcacagagtgaggattgtagtgactcagtaagatgatacatgaaagtgctctgcccccagaaagcacttcatcaacaacggcttttcttccctttaaaggacaaatgggatttggacaagcaatgatgaagggatgacggtccactgtggggaatgagaggaagcaaaagtacagtggtagaaacaaacaacatgttccagagagcaagcaggccagtctgcctggagggaggatccaccacaggacacaaagggaagcaaaactcaaagccaggatgagaatcacaatggggagcaaaattaaagtattctagccactgccccacagtacctagcaggacatgggagattagtaagtattcactgaacttgccaagtctcaaatgctcagaagggtgcaaaattatacatattcatcagtctctttttaagggtcaaagtataatgtggcccaatgcaaacaaatttcttttaacacacaagactaatgtttagaagtcaagacactcagatgtttgctaaaaatgaaagcagcgatgagtaggaggctctgaaacctttccattcccactcatgccctagtgcaaggcttggaagcccacatgcggggcttcagaaccggcagggatggctacgtcgtcactggccactcctgcgtcaagttctagcagtctgagcaagccttggtggtgagtaacttagctgaaagttacttcattcacggaagtaataccaggcccaaccaggaccaccaaccagccccaaaatttnacaaagaaggtcttc

SEQ ID NO: 261813 - DNA, 505 bp, Homo Sapiens
gaatccagtagtatatccaaagtatactgtatcaagatctacagaggtttagaccacaaatgttggtatcacatttgaaaaacaattaatacaattcatccgaacacactaaaaaacaacaaatatatgcccatctccatagatgacaaattacaatattcattcctcataaaaatctctcagcaaaccaggaaaagaagagtgcctcatcaacatataaagggcacagacctaaaaccaccactaacgttatacttcatggtgaaatactgagtgcctcttgtaagaccagagacaacccaaacgtttgttcattctttccacttctgttcacctttgtactggagggcctatctagtacaacggggcaggataaagaaataaaaggcatcaagattggagagaaagtaaaacagtcttcattctaaaataatccaatcatctatgtagaaaatccaatgtaatctacaaaaaagtgtctaaaactaataagtgagcataacaa

SEQ ID NO: 261814 - DNA, 648 bp, Homo Sapiens
ccggccgggcgtgcaaatggcaggtgcggggccgggcgccatcactcatgtctgcgcttggagggcggcaccaggtgcgggggcaggtcggcgggcagctcgtggccctccagcttgaccttgatgaggtggttggccagcgcgaactcctcgtcgtccagcagcccgtccttgtccacgtcggccagcttccagatcttccctagcacggtgttggggagcttggacttcaccatctccttcttggcgttggcgcccgtggtcttgccgttgacaggggacagcgtgtagaagatctcgtcgtaggtgggcttgtcattgcccaccacccactccacgtcgtcgatgccctcgccggccccctcgccgtagccgtgcccgaacggcccgttcatggtgccgtcaaaggcgccgccattgaccacctgggaaggcatcagggactcctcctgccgcaccatcaccatcagccgcgcgatgtcgttggccagcatgtcatccaccgtgtccagcagcttgggcttcagcgcctggaacttgctgaagtcctgggtctgcaggagttcctgtacacaggaggcatctccagctctttccttgcagggctgcggcaaggattcatggacagggcaccagagcgcctggcat

SEQ ID NO: 261815 - DNA, 968 bp, Homo Sapiens
  misc_feature (497)..(497): n is a, c, g, or t
  misc_feature (500)..(501): n is a, c, g, or t
  misc_feature (512)..(520): n is a, c, g, or t
  misc_feature (522)..(527): n is a, c, g, or t
  misc_feature (529)..(529): n is a, c, g, or t
  misc_feature (535)..(535): n is a, c, g, or t
  misc_feature (540)..(540): n is a, c, g, or t
  misc_feature (553)..(553): n is a, c, g, or t
  misc_feature (906)..(918): n is a, c, g, or t
gagcaggacctcttcaaggacatccagtcactgccccgaaacgccgccctcaggaagctcaaatgacctgatcaagcgggcacggctggacaaggttcacgcctacatcatcagctccctcaatgaaatgagatgcccaatgtactttggtaaagagagcaaaaagaacagagctggtgaacaacctgggagagatctaccagaagattgagcgcgagcaccagatctcccctggggacttcccgagcctccgcaacgatgcaggcaactcctgcagacccaggacttcagcaagtaccaggcgctgaagcccaagctgctggacacggcggatgacatgctggccaaagaccatcgcgcggctgatggtgatggtgcggcaggaggagtccctgatgccttcccaggtggtcaagggcggcgcctttgacggcaccatgaacgggccgttcgggcacggctacggcgagggggccggcgagggcatcgacacgggnagnngggggtggtgnnnnnnnnncnnnnnncncctacnacganatcttctacacgnctgtccccctgtcaacggcaagatcatcgggcagccaacgccaagaaggagaatggtgaagtctcaagactcccctacacccgtggctacggtaagatctaggaagtctggccgaacttgtgataatggacggtcctggctgggacgacgaaggagtaaccccgctggccaaccgagcctcactcaaggtttagcctcggagggcccaccagcctggccgcccgacccagggcccccgcacctggatgcccgccccttccaagccgcaagacattaacttggatggccgccttggcccccccaaccagacaattttgttaccgcccggggccggggaaggccacaaataacannnnnnnnnnnnnccaataccttcccccccgtttttcccaagggttcaactcaccgacctgga

SEQ ID NO: 261816 - DNA, 498 bp, Homo Sapiens
ctctgcgtgcgccggaggctgccgtggcgggtgggccgcctgacttctcctcccggccagttctcgagcgcctcaccgggcctcgccctgcagcctcgctctcgctggcgctgcgcggcctaggggactgggctgctggcctccgggtgcggggtgggggcaggctccgacctggggcgtcctggcagcgcgagccgcgggatgggggcccgggccgcggaggaggcgccgctgctgtgtcccttggtggagagggcgctgccggccctgcgcggtttccagccaggaagcttcgggaagcctggacgtctgctcactggagatgacacgtgcgtggggtgttgggtaagttggtgcattggagctggaacagggtcaatcctccaatgtaactaagccctcctgtgcaacatcttaagtgactggagggaccagtcggtcttgtgttcacattgaggctagaagctgtctccaggggagtaaaaacggattatttag

SEQ ID NO: 261817 - DNA, 1212 bp, Homo Sapiens
  misc_feature (1121)..(1121): n is a, c, g, or t
  misc_feature (1171)..(1171): n is a, c, g, or t
ggggtccccgaggcgggaggagcccgagggggcgcgagccccgcatggattttatattggaagacatggatcttgctgccaacgagatcagcatttatgacaaactttcagagactgttgatttggtgagacagaccggccatcagtgtggcatgtcagagaaggcaattgaaaaatttatcagacagctgctggaaaagaatgaacctcagagaccccccccgcagtatcctctccttatagttgtgtataagcccattagcacctgagccagtgctttctggagctcacacctggcgctcactcatccatcacattaggctgatgtccttgcccattgccaagaagtacatgtcagaaaataagggagttcctctgcatgggggtgatgaagacagaccctttccagactttgacccctggtggacaaacgactgtgagcagaatgagtcagagcccattcctgccaactgcactggctgtgcccagaaacacctgaaggtgatgctcctggaagacgccccaaggaaatttgagaggctccatccactggtgatcaagacgggaaagcccctgttggaggaggagattcagcatttttttgtgccagtaccctgaggcgacagaaggcttctctgaagggtttttcgccaagtggtggcgctgctttcctgagcggtggttcccatttccttatccatggaggagacctctgaacagatcacaaatgttacgtgagctttttcctgttttcactcacctgccatttccaaaagatgcctctttaaacaagtgctcctttcttcacccagaacctgttgtggggagtaagatgcataagatgcctgacctatttatcattggcagcggtgaggccatgttgcagctcatccctcccttccagtgccgaagacattgtcagtctgtggccatgccaatagagccaggggatatcggctatgtcgacaccacccactggaaggtctacgttatagccagaggggtccagcctttggtcatctgcgatggaaccgctttctcagaactgtaggaaatagaactgtgcacaggaacagcttccagagccgaaaaccaggttgaaaggggaaaaataaaaacanaaacgattgaaactggttttctggggggtttggttacttagttaacctgncccttttggcatgcatgttgtggaaccagcttttgaggttg

SEQ ID NO: 261818 - DNA, 512 bp, Homo Sapiens
ctcgaactgaacagtggggccttggggtggtcacctctccctctctgggtctccaaccttttcatctataaaacgagggattggtctaaatattttccagaatccttcctaacttgaagtttctatgatcaatagacacacgcattctatatgttgtatgtacaagccatttctttctgctatgttttctcattaagttgtttcatttcctaagcataaatattgaagcctgttaacaggagaatgttatttttgattctactaaataaaacttttgtgaaggcagtatgtgattcttaaaatagcttttgagttaaaaactaaaaagatccattgaccctgcctcctggggccctacataccgatatcccctggctctattgcatggccacagactgacaatgtcttcggcactggaagggagggatgagctgcaacatggcctcaccgctgccaatgataaataggtcaggcatcttatgcatctggaggaaagaatgaggaggggagga

SEQ ID NO: 261819 - DNA, 1920 bp, Homo Sapiens
  misc_feature (1909)..(1909): n is a, c, g, or t
cggctggtaccggtccggaatcttcgggatcgccgagtggtcatcgtggacccccagacgggcaaggagatgtcagtgtacgaggcctaccgcaagggcctgattgaccaccagacgtacctggagctgtccgagcagaagtgcgagtgggaggagatcaccatctcctcctcggacggcgtggtcaagtccatgatcatcgaccgccgctccgggcgccagtacgacatcgatgatgccatcgccaagaacctcatcgaccgctcggcactggaccagtaccgcgccggcacgctctccatcaccgagttcgccgacatgctctcgggcaacgccggtggtttccgctcccgttcctcctcggtgggatcctcctcctcctaccccatcagccccgccgtctccaggacccagctggcctcctggtcagaccccactgaggagacgggccccgtggctggcatcctggacacggagacgctggagaaggtgtccatcaccgaggccatgcaccggaacctggtggataacatcacggggcagcggctgctggaggcgcaggcctgcaccgggggcatcatcgaccccagcaccggtgagcgcttccctgtcaccgacgccgtcaacaagggcctggtggacaagatcatggtggaccgcatcaacctggcccagaaggccttctgcggcttcgaggacccacgcaccaagaccaagatgtcggccgcccaggccctgaagaagggctggctctactacgaggccggccagcgcttcctggaggtgcagtacctgaccggcggcttgatcgagcccgacacgccgggccgcgtgcccctggacgaggccctgcagcgcggcacggtggacgcccgcaccgcacagaagctgcgtgacgtgggcgcctactccaagtacctcacctgccctaagaccaagctcaagatctcctataaggacgcgctggaccgcagcatgggtggaggagggcaccgggctgcggcttgctgaaagctgccgcgcaatccaaccaagggctactacagcccctacagcgtcagcggctccggctctaccgccggctcccgcaccggcatcgcgcaccggctcccgggccggctcccgccgcggcagctttgacgccaccggctccggcttctccatgaccttctcttcatcctcctactcctcctcgggctacggccgccgctacgcctcggggtcctcggcctccctggggggccctgagtctgccgtggcctgaggctgcctgcgcccaccccgctctgcatgcggaccagacccggctcccaccgaggcgcgggggccgttttcaacgcttaaaggtgtcttcctcccaagtggtgcctaaagtttaaccaaaaagaccagactaatatattaatatatatctgctgtccagacagcctgtatcttgggggacagggctggcccagccctgctggccgcctcaccccctcgggtctcctcactcccttctacctgccactcacacagccaggtgccttggagggtcccaagctgggccccagcccaccctcctgtcttcccagggtagccccgcctgccagtcctagctgcacagggcaactgggcccaaccctgtctgtagagggccctggtgtttctagcactggcctgcacggtgggccttgctggggacggggggcccagtcagcctctctcccagtctacccagagaagccccttccccatgggaagaacgaggccctcggccagacccccacagtgctgtctgatctgtgctttccagctcaccccccacactcactcctgagacccctgggcctccgggttcacttcgcagcctctgttcccctagtaagtgccttccatgtcggcctctaaccccaggccccgaggaccnagacccagttg

SEQ ID NO: 261820 - DNA, 848 bp, Homo Sapiens
cagcaagaaattcaggtattaatttctggtgcacaagttcccataagcctagaggacctaaaatcctttacaaactattcaggaggctattctgcagaccatcctgttattaaggtcttctggagagttgtggaagggttcactgatgaagaaaagcgcaaactgctgaagtttgtaacaagctgctctcgaccccctctcttggggtttaaggagttgtatcccgcattttgtattcacaacggaggctccgaccttgagcggctccccacagccagcacctgcatgaacctgctgaagctccccgagttctatgacgagacacttttgcgaagtaaacttctctatgcgattgaatgtgccgctggctttgagctgagctgaagctgatgctggggtcagacccctacagagaaccagtgcttccttcgtcagcagcgcctccccagacccacgaggatactcacactgcacgcctgaggctctcctaagctccttctttcattctgccattcctccctcccttccttttttaaatgatttttattacggtgtggtcacttatttagatggacattgcttttcaaataacttaaaataacacgttatgtgccatgtggctactttagtaatattgccaagaagagcacagtttttacactagtggcatctcagtgaaattaaccaaagatgaagcttggctttgctggtgagatcagagccctcctgagcaggcagcgccactccaggggttcagacagggctgcacaggcggcagagataccagggtctgagggctgagacgccatgggggccgctgcttgcttatgtggtctggcttggttcca

SEQ ID NO: 261821 - DNA, 597 bp, Homo Sapiens
  misc_feature (111)..(120): n is a, c, g, or t
attcggcacagggcatctgcacaatgctgtgatactcgggtactatttcgtatttagattcttgttcacaaagcatcaagtcctatttccttaaaacatttgtttcttgcnnnnnnnnnnaacctattatcatactttgaggattttgagatccttacgttttgtattcccaggtagttgaactaaaattcggtgggaaagacatccctgtcaccagcgccaaccggattgcgtacatccacttggtggcagactacaggctgaacaggcagatccgccagcactggctggctttccgccagggccttgccaatgtcgtcagcctcgagtggctccgaatgtttgatcagcaagaaattcaggtaccctacctgctgactttctgggacacgcttgtcacaggaaatgaacaggctttcttaaaatttacctcaaatgttattatttgaacttttttccttaggtattaatttctggtgcacaagttcccataagcctagaggacctaaaatcctttacaaactattcaggtatgttatcactgctagttattgtttctgaaaatgttgcaggtggtcatatttccaaagtaatttt

SEQ ID NO: 261822 - DNA, 638 bp, Homo Sapiens
gtccgctccgctctggactgcgcgccacgctctggggtccggcgccctggttcctgcttctgccgctgccgccgccggatcccagtggcccggcgtgctcggctcccacaggcctgcagccagcatcgcaccgaaccttcggggggccgcggctggagcgctcggccggcgtgggagcgccaaggccgcagatgcaatcttcttaccgcgaagaagccaggggaataggtagccacatcttgtttgcagataagaaaggaagctaacgcagtatctgcaaagccaggagtctgactcagtacttttctcactcatgcatacaaagcagctaaaaatgacacagcttatttaccatgcccctgacactgcactgagcactttatgagcttgaactctgttaatcctcacgaccacctcatgagactctccagaaagagcaacagtaatggagtacatgagcactggaagtgacaataaagaagagattgatttattaattaaacatttaaatgtgtctgatgtaatagacattatggaaaatctttatgcaagtgaagagccagcagtttatgaacccagtctaatgaccatgtgtcaagacagtaatcaaaacgatgagcgttctaagtctctgctgc

SEQ ID NO: 261823 - DNA, 577 bp, Homo Sapiens
aaagctaacagaatctgcggtgctctgctggcgactggcaggacgcggtgcagagagcggacttccgcgacgcgggtaagccgggcgaaggccggaagcggagggacgcggggacctggtggctgccggcccactgcggcgggagccctcgctccttttcccaccgtcgggacggtgcagagtggcagcttccctccgtggattccaggtcctgcctggcgagccgtccccaacgtctgcgttcctgagggaggcggccggggcagcgtgagctacaggcgatgtgcgcggcgggccgcagcccctggaggtcacggtgtgcgctggccgctgccgcggtctttgccccggtggcctttctgagctcctgggccgcgcccctgggaccaggcggaggccggggacggccccagggctggaggggagtcccgaaggccgctagcgacctgagtccaagccacgcccacggccaggcggggcgactgcgagctttgccgttgaaaggcggagcgtgtcttgtcgccttctagctgcaccttttgtggactgcagcatggaaccgtccaaagtgtttgtc

SEQ ID NO: 261824 - DNA, 598 bp, Homo Sapiens
ttaaaccagtaatcgatggatccatgcttaaaaatgacataaaacaaagattagcaagagagcgcagagaggagaaaaggagacagcaagacgccaataaagaaacacaactacttgaaaaagaaagaaagaccaagctccaatatgaaaaacagatggaggaaagacagagaaagctgaaggagcgaaaagagaaagaagaacaacggagaatagctgcagaagaaaaaagacaccagaaggatgaagcacaaaaggaaaaatttacagccattctttatcgtactttggaacggaggagacttgctgatgattatcagcaaaaaagatggtcatggggaggctctgcaatggcgaattctgagagcaaaactgccaataaacgatctgcatctactgaaaaacttgaacagggtacttctgctttaatcagacaaatgcctttgtcatctgcaggccttcaaaattccgttgccaaaaggaaaacagacaaggagagaagctcatctttaaatagaagagatagtaacctacattcgtctactgataaagaacaagccgaaaggaagccacgtgttacaggcgtcaccaattatgt

SEQ ID NO: 261825 - DNA, 1369 bp, Homo Sapiens
  misc_feature (157)..(248): n is a, c, g, or t
  misc_feature (1041)..(1067): n is a, c, g, or t
tttccaagactaaacataaagttcatttatatctcacaaacaccttatacacatagactgaaggtaattttatacaacagttttaataattttgtgcatgaaacaaagtcttaattgttttgactatgaccagtcacatgaggtcaggcgtggaatnnnnnnnnnnnnnnnnnnnnnnnnnnnnnnnnnnnnnnnnnnnnnnnnnnnnnnnnnnnnnnnnnnnnnnnnnnnnnnnnnnnnnnnnnnnntagtaaaaattgggggcttgcaggacctaaggtctcaccactcaattctgccactgcaggagaaagcaggcatagacaacatataaatgggtatgcttgtggagctgtagtttgcttgatgctgaacaatacataaattcctgggacaacagacttattatttcaggtgtcatatttgaaggtaggagcaacaatacagatgggcagacattaataaatgaaaaccacaaattaaaattttcacacttattacccagtcataattggatgttatgtgtatatatgtatacatacaagttataaagctagctcatttcaattccatattctttttggtgtgttaacagtatccaaaccaacatccagataagcagcaaaaggattatggattgattgagtactcagaagttaatcaaggatcacgaaatctggttttgacatctaagtatttctacacaatgaaaaaacttatttactgtgctctatatagaaaatatcagatgtatcttttcaggtgtcattttaaaattcaattgaattgttacaatttgaagctaaatgtgatttgctttgttttattagaaaaaatactcaagcaaggtctacaatcattggtcaattaagaatgacttacaagaacatgaggcaataaaataaaaatacaggtacaaactatgtatctgaaacacttctatttggcaattttataacaaatcaaattttaaaaagaacaaaagagattgcagattagttcgcagatacagaataaagcaattgatgaagtgcttaagcnnnnnnnnnnnnnnnnnnnnnnnnnnncactgcttttctttttaaaaataaaatcacattgctatagatcaaatggataatacccttattaaacaaccattccagaatgtcttatagtagcagtgcttttatttgcacttcacttaattttataagactcattttcatgtatatagctctttacccccattgttaacgaataaagtctctcataatttttacacttttaaattttttaaagcaaatgagaaatgatttatgtatcgtggaacctttcccattttggaaccaaaggttttaattctatatttttgtctaatatttcttta

SEQ ID NO: 261826 - DNA, 889 bp, Homo Sapiens
tccaacataaaaacaaccctaaaaataaaaaagacccaacccctaatattttatttcctgtatatccaagacctacaaatagcatttaaacgccttaatttattattccaaattaagaaattatacattttgttttgataatgttcattgtcttaaaagtgtcattcagctttccccactttaaaagtatattgctaattatggtcaattaactatgacagcccacagagcctccagtgacagtaaaatactagacatagaagagataaatgaggatttagatcccctccccccagcatcagcaaagggtcactctgctcccacacctgacgctttgaaacgctttctgtttgtagagactaaaatcacccagcaacaggtcaggtcctgataaagtgcctactgcaagaactaccgacgctcctcttccctggatgtgcaccagggactgtcccgtcttcgagtcagagcagcaccaggaagcagagggtgccaagcatggcgagtcacccccaaatatccaggaagacaagtgggcgcagcccaggggaaaggagggcgagcggatgatgggagaccggcacggctagcatcgggacaaagatgcagccgccactttggttcaaacaactttaatgacaccacagtgtctgtcctcccccaagtaactgggtatagtgggtgacagatgttgcagtagcttggcagaccctcctcctccacctcccctgaaagctctccaggcacaaagtggagatagaaataggacaatgaatgaagtccccacctcacatccacagacagtatctccaaaccatcatgaggcaggccacggtatactgaaaacaagcatgctagtcccatttggggaaatggcttaaaaagcaca

SEQ ID NO: 261827 - DNA, 841 bp, Homo Sapiens; identical to SEQ ID NO: 72893

SEQ ID NO: 261828 - DNA, 925 bp, Homo Sapiens; identical to SEQ ID NO: 15808

SEQ ID NO: 261829 - DNA, 627 bp, Homo Sapiens
cacccacccccaacccggagactagaggaaagtctgtccaaagatgactgtggaatagggaatgccatggttctctgcaggtcccccacactatggggggttaagtcagcaagtagggaaaacagtcaagacgaggagatggagaaacagagaggcaggagagaaacagggggctgacaaagatggaggggccattgtgttgccggaggacgaggggctgctagccggaggcattgatgtacagctggcttttgaggatgtagtcgatgaccggctgggacaggtaatccacaacatggccgtccccatgctgcagggccagcctgctcttggttgagctgacaacagacatgggatggttgatgtcatccttcaccaccatgatgttgtttttgtatttgcggagtattgaggagtgattcatgattcggtctgtgtcggctgcatcccggggcaccaccacaatcccaaagtcaccaacaatcacctccatatctgcctcgttccagagccctgggatgcagaaggactccagcaggtcactaccacacagcagcaggatccgtagctctgaggaaggggagcaaagtttgcaaagggagtaagtggtggcccgggaagcatttt

SEQ ID NO: 261830 - DNA, 975 bp, Homo Sapiens
ggcctgggtggcgaattcggcacgaggggaactgaaagttgcccctaactccacctgtgatgaagcccgaggggccctcaagaacctgctcttcagcgtctgtgggctcaccatttgtgccgctataatctgtacactctctgctattgtctgctgcatccaaatcttctccctggacctcgtgcatacgctggcccctgagcggtcagtctcaggcccactgggacctctgggctgcacgtccccgcccccagcccctctcctacacaccatgctggacctggaggaatttgtcccgcctgtgcccccaccgccctactatcccccagagtacacctgcagttcagagacagatgcacaaagcatcacgtataatggctccatggatagcccagtgcccttgtatcctactgactgccccccttcttacgaggccgtcatggggctgcgaagagacagccaggccactctgtttgaccctcagcttcacgatggctcctgtgtctgtgagcgggtggcctccattgtggacgtgtccatggacagtgggtccctggtgttgtctgccattggcgacctccccgggggctctagcccatcagaagactcatgcctgctggaactccagggctctgtgcgctccgtcgattatgtgctcttccgctccatccagcgcagccgcgcaggctactgccttagcctggactgcggcctccggggtcccttcgaagaaagccccctgccaaggcgacccccacgggctggcccgctcccattcctgctcagcccctgaagccccacccccctgggggggccccccaaactgccccgcaattggcaccgggttggcgggggtaagcaggcacagatggcacccccccctaccgccgaagcgacggtggagtgccggaaggggggcccgcggcggctttgtggggtcgggctgggcttatcgcgcactacgacacggatcac

SEQ ID NO: 261831 - DNA, 1354 bp, Homo Sapiens
  misc_feature (1044)..(1044): n is a, c, g, or t
attgcgcatgcgcgcttccttgcgcgagccgggctgtcgggtgtgttttgctctccatcctccgtcgtctctgcagcactccgggttctcctccagagcgctagtcccaggagctcggaatgttcgtggaacttaataacctgcttaacaccacccccgacagggcggagcaggggaaactgactctactctgtgatgccaagacagatgggagtttccttgtacaccactttctctccttctatctcaaagctaattgtaaagtctgctttgtggcactcatccagtccttcagccactacagtatcgtgggacagaagctgggtgtcagcctgaccatggcgcgggagcgtgggcagcttgtgttccttgagggactcaagtctgcagtggacgtcgtcttccaggctcaaaaggagccacaccccctgcagtttctcagggaggctaatgctgggaacttgaaaccattgtttgagtttgtacgggaggccctgaagccagtagacagtggagaggctcggtggacgtacccggtgctgttggtggacgacctcagtgtgctcctgagcctgggcatgggggcggtggctgtgctagacttcattcactactgcagagccaccgtgtgctgggaactaaagggaaacatggtggtccttgtgcacgacagtggagatgcggaggatgaggagaatgacatcctgctgaatggcctcagtcatcagagccatctgatactgcgggctgagggcctggccactggcttctgcagggatgtgcacgggcagctgaggatcctgtggaggagaccatcgcagcccgcagtccaccgggatcagagcttcacttaccagtataagatacaggacaaaagcgtgtcctttttttgccaaaggaatgtctcctgctgttctgtgacctgatttcggagcagctgaagctacataggactgtttttggaacgtggaagataggagcaacatagcaaagaatgggtctttctcctctgtagtaatatttcaggctggaccggcgactccnactgtgaccagagggttgagtgctgcagtgaatggcatgccttggctccctgggccctgttcagaaaacacaagggaccacaatcctgcctttgctgagagagaggctggatgctagacccaagtgaaaggggtcctttggagcctttgtttaaatatgccttagccccagctgcccatttttggttgacaagcctttcagagccagagtgggtatagatgtgccagccaggagatggcaccggatggcaggtgtgcaaggtgacaactaggataatcatggctggaataaagtaagtttccacactgga

SEQ ID NO: 261832 - DNA, 562 bp, Homo Sapiens
cgctgtcattcagacattcagagaatggttggccacaaacaatgaccaagtattgcttggcttaacttgaaggcctgctgtctccttctgggggtcagggacgcagctccaccctcaccactagcccaccctgcccgtgggcataaccttgacgaagagagagaatgattggcatctgcttttctcttttctttgctaataattctgttcctggctgccgagagtgaagtttcaccatgtggaggtttggctcctatcacctggtggtctgattcataccctagcctgaggctccactggaagatctcgcagcctcagtgtatgggaaaccctttccccaggcttgtcccagcactgccgctccccacccctgagccaggaccccagaggatggccatgccccgtgcctggcagaggtctggtgccagcactgggagctgctccgcccttgccttggggccgagggagccctcgtccacccctgcacagcagctgggcacagaggagcgctcttccatcttgaccaggactgcaccaagaagcaccaggtgtcttcagcctc

SEQ ID NO: 261833 - DNA, 1024 bp, Homo Sapiens
  misc_feature (97)..(163): n is a, c, g, or t
gtagcgaggcctgggtggcgaattcggcacgaggcgctgacatgttgaggactacgcgcggcccaggcctgggccccccgctgctccaggccgcgcnnnnnnnnnnnnnnnnnnnnnnnnnnnnnnnnnnnnnnnnnnnnnnnnnnnnnnnnnnnnnnnnnnnctggctgcagcccacgggccgggagacgggtgtgcaggtgtacaacagcctcaccgggaggaaggaacccctaatcgtggcgcacgccgaagccgcctcctggtatagctgtggaccaactgtatatgatcatgcgcaccttggccatgcttgctcatatgttagatttgatatcattcgaaggatcctaaccaaggtttttggatgcagcatagtcatggtgatgggtattacagatgtagatgataaaatcatcaaaagagccaatgagatgaatatttcccccgcttccctcgccagtctttatgaggaagacttcaagcaggacatggcagccctgaaggttctcccacccacggtgtacctgagggtaaccgaaaatattcctcagataatttctttcattgaaggaatcattgctcgtgggaacgcttattcaacggcaaaaggcaatgactacttcgatctgaagtctagaggagacaagtatggcaaattggtcggcgtggtccctggtccagtcggagagccagcggactctgacaagcgtcatgccagtgacttcgccctgtggaaggcggccaaaccccaggaggtgttctgggcctctccctggggacccgggaggccgggctggcacatcgagtgctctgccatcgctagtatggtatttggaagtcaactggatatccattcaggtgggatagatttagcttttccacatcatgaaaacgaaattgcacagtgcgaagtctttcatcagtgcgagcagtggggaaattattttctgcattctgggcatttgcacgccaaaggcaaagaagaaaaaatgtccaaatcattaaagaactacattactat

SEQ ID NO: 261834 - DNA, 2232 bp, Homo Sapiens
gtagcgaggcctgggtggcgaattcggcacgagggccaacgctccctgtcggtgctcagcccccgccaaccagcccagaaccgagagtccaccccccttgccagcggaccttcctcattccagcgggctggctctgtgcgggatcgtgtccacaagttcacatctgattctcctatggctgctaggctccaggatggcacaccccaggctgccctaagtcccctgacccccgcaaggctcctgggcccctccctcaccagcaccacccctgcctcctcctccagcggctcctcctctcggggccccagtgatacctcctcccggttcagcaaggagcaacgaggagtagcccagcccctggcccagcttcgaagctgcccccaggaggagggccccagggggcggggcttggctgctaggccccttgaaaacagagcaggggggcctgtggcacgttcagaggagcctggtgccccgctgcccgtggccgtcggcactgccgagccagggggcagtatgaagaccacattcaccatcgagatcaaggacggccgtggccaggcctccacaggccgggtgctgctgcccacaggcaaccagagggcagaactgacactggggctgcgggcgcccccgaccctactcagcaccagtagtgggggcaagagcaccatcacccgtgtcaacagccctgggaccctggctcggctgggcagtgtcactcatgtcaccagcttcagccatgccccccccagtagccgaggaggctgcagcatcaagatggaaccagagccagcagagcctctcgctgcagcagtggaagcggccaatggggctgagcagacccgagtgaacaaagcaccagaagggcggagccctctgagcgctgaggagctgatgactattgaggatgaaggagtcttggacaagatgctggatcagagcacggactttgaagagcggaagctcatccgggctgcacttcgtgagctccgacaaaggaagagagaccagcgggacaaggagcgggaacggcggctgcaggaggcacggggccggccaggggaggggcgcggcaacacagccactgagaccaccacgaggcacagccagcgggcagctgatggctctgctgtcagcactgttaccaagactgagcggctcgtccactccaatgatggcacacggacggcccgcaccaccacagtggagtcgagtttcgtgaggcgctcggagaatggcagtggcagcaccatgatgcaaaccaagaccttctcctcttcctcctcatccaagaagatgggcagcatcttcgaccgcgaggaccaggccagcccacgggccggcagcctggcggcgctcgagaaacggcaggccgagaagaagaaagagctgatgaaggcgcagagtctgcccaagacctcagcctcccaggcgcgcaaggccatgattgagaagctggagaaggagggcgcggcccggcagccctggcggaccccgcgcagccgtgcagcgatccaccagcttccggggtccccaacgccaacagcatcaagcagatgctgctgggactgggtgtcgagccaagactcgcggctacgagcacgtcgacatccagaacttctcctccagctggagtgatgggatggccttctgtgccctggtgcacaacttcttccctgaggccttcgactatgggcagcttagccctcagaaccgacgccagaacttcgaggtggccttctcatctgcggagacccatgcggactgcccgcagctcctggatacagaggacatggtgcggcttcgagagcctgactggaagtgcgtgtacacgtacatccagggaattctaccgctgtctggtccagaaggggctggtaaaaaccaaaaagtcctaacccctgctcggggccccacggatgctggtggactgtgtgcccctggtggaggtggacgacatgatgatcatgggcaagaagcctgaccccaagtgtgtcttcacctatgtgcagtcgctctacaaccacctgcgacgccacgaactgcgcctgcgcggcaagaatgtctagcctgcccgcccgcatggccagccagtggcaagtgccgcccccactctccgggcaccgtctcctgcctgtgcgtccgcccaccgctgccctgtctgttgcgacaccctcccccccacatacacacgcagcgttttgataaattattggttttcgaacgaaa

SEQ ID NO: 261835 - DNA, 630 bp, Homo Sapiens
tcagaagttctggagcaacatatggtaaagtaccacacatcttgtccaacaaacgctcacgattattataccgaaatactgttgccaagccaaagtctgagattttgaggttatccctttcatccaacagaagattttctggtttaatatccctgtgagttattccaataccatgcagataaaccacccctgccatgagttgatggaagaatctctgagcatctggttcaggcatgcctatgtctggctctattctgtcaaaaagctctcctccactacagtactccagaaataaatattggatattgccttctctcctgtgaccatagaattttactacattttcatgatttagcattttattgatacagatctctttcttaatattttctggacagtctacggcacgcttcatatctacaatcttcactgcgactgcttcttcagttactctattcacagcaagttgaacttctccataggcaccttctcccagggtttgcaccaagtcccagtcttccacaaagggcactgccatgactccaccgagcacctcggcggactgtcctttgcccaccactgcaggaatccaaatgcagcgcttttcccgccaaaacttgagggcgtcac

SEQ ID NO: 261836 - DNA, 844 bp, Homo Sapiens
ggaagggatggaaaccgggccctccagttcactatcagtagcttttgcactggtctgcccttcctaaattaagtatgcacttcaatttgatgagtggaaacagtctatctgggcagtaaccagggagctttgtgcctagtagattgcttctgttctgcacttctttggtttcccacctcaatgtaaaaaatagctagcaatgaagtccagaagttgtcaatggttcatccccagaagaatgcataatgtccaaagttgtatgtgtatgatgtcttcaatggtattaagttatttcaaattcttagttcacctacataaatcatttctaacaagcatcttcttaaccaactttatgcacagtgtatgtttgtaagtgcttctgcacgaatgtttatacatgactgtttccatagtacttatgtttttaaaaatattcagtcatttcctactataatcctcatgtatccatgtaactgactcaaaaatacttcagccacagaaagctaaaactgagcaaatctcattcttcttttccatcccccttgcatgtggctggcatttagtaatgattaataatatggccagctgaataacagaggtttgagacacaattctttctcaaagaagtcagctaagctgggtctacttatggacaaacatctaaatgtggggaaaaatctgatattttgacaatggtaaatttcccacttaagctagcctaagcattgttaagacattcaaatctccccccatgggcttctggggcggtccctgggtttataagcaatggttaaaattggttgggcgcacactttctcacaaataagattcctcccattgggac

SEQ ID NO: 261837 - DNA, 875 bp, Homo Sapiens
tgagaaaaaaaggaggcacccacaaggttgaggtccacagtctccacagtttccaggaggcgtttgggggtggggaaggcacctccagagcatgaggctctaaggggacatgagtaaagcatgtctgtgacccagtgaggaagggagaggccagctgcactcctgcacggggttcctagctgcagaagggtcccgcctaggccgaggggaaacacctgatagcagaagaggcctggatgcacacctggcacgccgaggctctccgcccagacacagtgctccatgtcagcccctgcacctggggtgtgtgattcacgtgcacagatgccacaatcctgcaccaatatcccacagatgggggaaggtgagaggaaggggcaagtgatgtgtaactgctcaagagatgcttagacctccatagagaggagccgggcgcaggggcatctgtgtgtcccgtcacacactgcagcagcgaagggtcggctggctggctacccttggcatcaagtggtttggtattaagctccagagggtcttattgccagttgtcatattcctctgccccttgagccagcactaaggccctggagtctgtttcattgtaggcggatgaacttcgacatgctcctaccatgaccaggctctgggcaaggctcctcacagtatccttgagaggtgggcatggaagtgcccatttctcaggtacagaaaccttcagagaggataaatagcttgccctgtagaagcaggatctgaaacccttgtccgcctgactcccccagctactctgcccactgtagcccctgcctaaactgtcctggcacacccctcaccatcctgtataccttaaatatcaaagagggcaagagagaaag

SEQ ID NO: 261838 - DNA, 1193 bp, Homo Sapiens
  misc_feature (583)..(583): n is a, c, g, or t
atgtgtgggcccagggatgcctgaaggacccaggttaggggcagggaaagagccagtgttgtttgtaggagaatgtagggagaacgtgggggccgaatgaggatgggcccagccgtgacgattaccagccctcccgggtcggactcccatgtcccctggtgttgttggaatggagaatggcctcggtgctgagggcgagggggatggcatagaccagtgggaagatggccagggaccccacctgggatggcgtaggcgaacatcacagccagcgggccaaaagtgatgaggatgatgaggtctcccagagccacgtacttgaatccaattcctcctgtgtagagaaaggagccagacaggcctccaaagtagataagagccaagtgctccagtttcagaggggacaggtagtagaggcaagcggcacagacgcagcccaacgtgtagaggaagactccgaaccggacgacatcctgcggctccaagattcggctccacaagtgtcctgtcatcactcttttttggggtcaatgcccttggaaaagtcatagtaagtgttgaccaaattaccggccccgtgcancagccaggacagccacggcacaacccacccaagagcctgggatccaggacaccgtgggatctgtaggcaagggcactgcccagggccaccggtgtgagtgaggcactgaagctccagggcctcagggccaacacgtaggaggcacacttctgcctccaggagcgctgggggagcctatcttgctcgggacagtcgttccccagcgggtccctgtccccagctttgacagtctctcccgacaggatgttaatcttctcccccaggacctgagaggccgccatggaagctccacgtggttgaagtaaactctaaaagtgagccacgcacagtgaccgcccgggaaggaggaaggacggggcggggcagcagggcccgaccttccttcggttccgccccaggacagggctggtgtggcggcaaggtccgggggcaacagcaagtgggtcttacaccccacgaggccaagcggcgccgcccctactacccgtcacctgggcgaagtctgtctccggcccccagccccgcgttagagcccacggctgagccgcggccgccttctttaggccgccagagccgccatcttcctcgtgccgaattcgccacccaggcc

SEQ ID NO: 261839 - DNA, 695 bp, Homo Sapiens
cccaacaacatgctcaagacaaggctgatggaaaatgttgccagtctcagtttccagcaacatgctcaagacaaggctgatggagaatgttgccaatttcagtttccatagggagaaatggagccattaagcctttggaacatggtgcttttatgtctgaacatgaagctcaagattttggcatctgcagctcctggttctaactttcctttgcaagcccagggaactaactgccctttgtcatcagaagagatcatttcactcctttatttcctgaggccttttcaaggtgagtagccctggacacagacctctcatggagaagagcttgcttacaaatgaagttacctgggtctttgtagatactgagcacgcccttgaagtaatgaggtaaaaatctttccagtaacagcagcacatcttccaactcttcaagaatccccacgagcaggaagttttcattcacgttcagctttgctctctcaagggcccattcaccaggctccctgcatctgggatgctgtccacaaaagtacggaatgatgtaaaataacctggggttggagcactcgggatagttttcaagaatacactcattgatatccaggtagcgctcctcctgcctcatgctgggggtgcggatcatgtgattttgttcccctctccagtctccaaagcgacggaaaaaatagttg

SEQ ID NO: 261840 - DNA, 1457 bp, Homo Sapiens
gggaaattgcaggatttggtgaataggaccccatggaagaaatgttgtttctctggggatggggaatacatcgtggcaggttctgcccggcagcatgccctgtacatctgggagaagagtattggcaacctggtgaagattctccatgggacgagaggagaactcctcttggatgtagcttggcatcctgttcgacccatcatagcatccatttccagtggagtggtatctatctgggcacagaatcaagtagaaaactggagtgcatttgcaccagacttcaaagaattggatgaaaatgtagaatacgaagaaagggaatcagagtttgatattgaagatgaagataagagtgagcctgagcagacaggggctgatgctgcagaagatgaggaagtggatgtcaccagcgtggaccctattgctgccttctgtagcagtgatgaagagctggaagattcaaaggctctattgtatttacccattgcccctgaggtagaagacccagaagaaaatccttacggccccccaccggatgcagtccaaacctcccttgatggatgaaagggctagttcagagaagaagaggcagttctcagcagatgggtcccagccacctaagaagaaaccccaaacacccaatataggaacttcagggagtaccaaatgatgaagtccatccactactgggtgtgaaagggggatggcaaatccaagaagaaacaagcagggccgccctaaaggattcaaaaggtaaagagaaagattctccatttaaaccgaaactctacaaagggggacagagggtttaccttctggaaggatcagcgaagggtaaagtgcaggcggaactcagccagcccttgacagcaggaggagcaatctcagaactgttatgaagaccttcgaagttcttcattctttctcactttgccatcatgtggcctctggacactgtggtcagtcatttgaaaattgactttaatttaaaacaaaggcctgtgcctcccacccaggaggtgggagggtgaattttatgtttaaatgaagaagtgaattatggaagaagagtatacgaccttcccttccctttcaagcataagtccaaatagactctcaggaatgaagatttgtgaagacatcagataggaattttgactcatttaaactttgatgcttagttatgttgctggagaaaagatacttatgttttgctcatctaacttcattgtaccccagcgtcattttgacatgtcatttcctatctcccatttgccttcggtcctcaatgcatgtctttgagtgacttcttatctgaaattttgctactgggatcctaggaaagcttttgttggatactctcattttaaacttctcctctccccagatacctcctatatttccatattgtgtgcaaaggaaggggcaaaaagaaagtgccttgaagaatttcaatc

SEQ ID NO: 261841 - DNA, 443 bp, Homo Sapiens
agcaaggttgcgcgtgccctgtgagaccgccaagatggtggtgggcgcgttccctatggcgaagctgctatacttgggcatccggcaggtcagcaagccgcttgccaaccgtattaaggaggccgcccgccgaagcgagttcttcaagacctatatctgcctcccgccggctcaactgtatcactgggtggagatgcggaccaagatgcgcatcatgggcttccggggcacggtcatcaagccgctgaacgaggaggcggcagccgagctgggcgcagagctgctgggcgaagccaccatcttcatcgtgggcggcggctgcctagtgctggagtactggcgccaccaggcgcagcagcgccacaaggaggaggagcagcgtgctgcctggaacgcgctgcgggacgaggtgggccacctggcgctggcgctggaagcgctgc

SEQ ID NO: 261842 - DNA, 921 bp, Homo Sapiens; identical to SEQ ID NO: 15841

SEQ ID NO: 261843 - DNA, 765 bp, Homo Sapiens
  misc_feature (662)..(662): n is a, c, g, or t
  misc_feature (671)..(672): n is a, c, g, or t
  misc_feature (675)..(680): n is a, c, g, or t
ggggggtgctgcctgcggaagccggcggctgagaggcagcgaactcatctttgccagtacaggagctcgtgccgtggcccacagcccacagcccacagccatgggctgggacctgacggtgaagatgctggcgggcaacgaattccaggtgtccctgagcagctccatgtcggtgtcagagctgaaggcgcagatcacccagaagatcggcgtgcacgccttccagcagcgtctggctgtccacccgagcggtgtggcgctgcaggacagggtcccccttgccagccagggcctgggccccggcagcacggtcctgctggtggtggacaaatgcgacgaacctctgagcatcctggtgaggaataacaagggccgcagcagcacctacgaggtgcggctgacgcagaccgtggcccacctgaagcagcaagtgagcgggctggagggtgtgcaggacgacctgttctggctgaccttcgaggggaagcccctggaggaccagctcccgctgggggagtacggcctcaagcccctgagcaccgtgttcatgaatctgcgcctgcggggaggcggcacagagcctggcgggcggagctaagggcctccaccagcatccgagcaggatcaagggcccggaaataaagggctgttggtaccccccnccccacccnncannnnnnaaactggccggccgcctcgggccctcaaagaacttttctaaaaccattccttttgggcggcgggggggccccaagtagggtaaac

SEQ ID NO: 261844 - DNA, 244 bp, Homo Sapiens
cttttaaactctttcctgctgaatagcaaagaacttttattttccactttcctatattcctaaaaagtgtgaacaatgcgtttcagttgactgtattgcatacttttttgctgaagactttttctgtaaacacaattgccttgttcagttttgttgtaaactgacttaccataagatgcactgttgataatgctttctgatgtgtgtttgataagagtgataaaataaaagcttacaaataaac

SEQ ID NO: 261845 - DNA, 530 bp, Homo Sapiens
tctttctggcccctttgtccaaaagtggaatggaaaaatgctcaatatccacccatccttgctcccttcttttaagggttcaaatgcccatgagcaagccctggaaaccggagtcacagttactgggtgcactgtacactttgtagctgaagatgtggatgctggacagattattttgcaagaagctgttcccgtgaagaggggtgatactgtcgcaactctttctgaaagagtaaaattagcagaacataaaatatttcctgcagcccttcagctggtggccagtggaactgtacagcttggagaaaatggcaagatctgttgggttaaagaggaatgaagccttttaattcagaaatggggccagtttagaaagaattatttgctgtttgcatggtggttttttatcatggacttggcccaaaagaaaaactgctaaaagacaaaaaagacctcacccttacttcatctatttttttaataaatagagactcactaaaaacaagactagttagtgcagcatatctgag

SEQ ID NO: 261846 - DNA, 540 bp, Homo Sapiens
cgggtacaatgcaaggtcacagtgtttccatagtagcaggaattcacctcttcagagctataacaacagcctagcccttcacagtctcctcgagagatgggtgagggtgcacatggcagtctgtcccgtgctgggatggagtcacaccagtcagtatctggagcatctcgggctagaagatccataggacacttgagcagcttcctctctgtaaccacattgtgttcagccgcgcctgctccttcaactccaactggcatgatgtagtgggagtcccactcagtgacatagcagctgctataggttgcctccaacaccacggagctgcctggaccttttcttatccaggtgccacagtcggagtcattctgcagctcgtgcagcagcccttggttgtcccaagctattagtacaggaggagacgttgcctcctggttgaggtttacagcaaactggaagctccacggcccacagtggagcacactggaataatctggtgcctcaggcttatgctggccactcacagcaagagataatgaa

SEQ ID NO: 261847 - DNA, 523 bp, Homo Sapiens
ctcgctcatgaaggagagggggagttcatccctctgagctccgctctcccaggcagtgccattagttaatgaccctggtggcttcttctcagctgttaattaacatgccctggtggttcccaggacaccccagctatggtcccgtgtgtttctttttgcaggacgccctggagaggatgatggggcgggcgcacatggcaaaagtgattgagtttctgaagctgcaagtccaggaggagaccaggtgccggctggctgccatctcccacggcctggagctgctggctggtgaggggaagctgtccgggcggcagaaggaggagctgctcacgcagcagcacaaagccttctggcaggaggcagagcgcttcagccgggagtttgtccagcgaggcaaagacctggtcaaggcgtctctggctcaccaggtggagggaacggcaaaactcacgctggcccaagaggaggaacagagaagcttcctggctgaagcccggccgactgctgacccggaaaagtttct

SEQ ID NO: 261848 - DNA, 596 bp, Homo Sapiens
  misc_feature (126)..(126): n is a, c, g, or t
  misc_feature (516)..(539): n is a, c, g, or t
gcggccttaaataatgggtgcatttattatgttcaagttatttccaggattggccatatgtgcaaacaaatcatgcaatgcagccaaggaatatatgttgttgttgttgttttaaacccatttttnttttagaattttcattaatactgtagttatacaccatatgcctcattttatcatagcctattgtgtatgaaagatgtttgtacaatgaattgatgtttagtttgctttagtcatttaaaaagatattgtaccaggatgtgctattaagagcacgtatccattattcttctcaacccaagaacctgtttcctggaccagtgaccaaacctcatatgtgaaatggccaaagcacatgcaggctcctggttgttcctctcaaacctgtgctgaccaaagattagtaaccagttatacccagtattttgaggttttattgtttttttaataactaaaaagaaaaaaggaacagtgtaaatttgtaatcaagagtttgtgaggaaaaacttatgnnnnnnnnnnnnnnnnnnnnnnnnaggtctgtgtatcaaatatgacacttttcttgcaataaagcttattttggggtaaaa

SEQ ID NO: 261849 - DNA, 335 bp, Homo Sapiens
taaaaaaacaataaaacctcaaaatactgggtataactggttactaatctttgggcagcacaggtttgagaggaacaaccaggagcctgcatgtgctttggccatttcacatatgaggtttggtcactggtccaggaaacaggttcttgggttgagaagaataatggatacgtgctcttaatagcacatcctgggtacaatatctttttaaatgactaaagcaaactaaacatcaattcattgtacaaacatctttcatacacaatagggctatggataaaatgagggcatatggggtgttattaacctacaggtatttaattggaaaatttctt

SEQ ID NO: 261850 - DNA, 364 bp, Homo Sapiens
agtcctccacgaactgcaccaaagaaacagctgccttctattcccaattatgctttgcccataactaagcctacatctcctgccccagcagcacagtcaacaaatggcacgcatgcgtcctatggacccttctacctggaatactctcttcttgcagaatttaccttggttgtgaagcagaagctaccaggcgtctatgtgcagccatcttatcgctctgcattaatgtggtttggagtaatattcatacggcatggactttaccaaggatggcgtatttaagtttacagtttacatccctgataactatccaggatgggtgactgtccacgcttgggtgttcgatattcctgtctttcacccg

SEQ ID NO: 261851 - DNA, 467 bp, Homo Sapiens
cctggaaagaatcaggcatggtctgtctggtggtcaccacaccagcctcggaggatgcttcacttcctttgtcatcttcaggcaggttgaagtgcacacgaagcccaatcctggagctggaccggggctcattgtggttcaccagaaccccctcgagtttgggtttggggggttgttccacagatggaggctctgagtggggtggggagggctgtggctcaatagctgccaggttggtggtggagttggctgagtgaagagacccgttgttgctgaggtcctcatttcctctcacgtgcagctgtgcaatgcttgacactgtgccgtatttgttgcttgcagtacatgtgaagcacccagaatcttctgcaaacacctcagcaatgaccaaggtgcaaatctcctctggctctgccatggatcgaggttttttctgtaaaatcctaaaatctggagaatcttcagta

SEQ ID NO: 261852 - DNA, 486 bp, Homo Sapiens
  misc_feature (214)..(214): n is a, c, g, or t
  misc_feature (353)..(353): n is a, c, g, or t
cgaaaggctccggtcgggggcgggaacaggatcggcccgcgggctggcgtcgataggctgccgcagagacagggcgggctctgctaagggacgcgcctcgccgtggggcggtgcctgcgcctgagcctctacgagagggaaggaacgctgctccgagctccgcgtcgcgtcgcgtagattcgcgtcaccgtcgacctcagaggcggggccgganagcgctacggtttgacccccgagtccctctgttcccgaaggcacggccgtctttctcccgacccgctccgcctcctctccttcttccccattacccggaggccgaagcccccagccagggcggggcggcgcagcccgangctcccggacccggaagaagcgccatctcccgcctccaccatggagcccaccgcaccgtccctgaccgaaggaaggacctcactgaaagtgaaagaaggaccgccttagaaaatttacgtgtataccttgtgt

SEQ ID NO: 261853 - DNA, 1340 bp, Homo Sapiens
  misc_feature (1008)..(1198): n is a, c, g, or t
  misc_feature (1202)..(1203): n is a, c, g, or t
  misc_feature (1212)..(1213): n is a, c, g, or t
  misc_feature (1221)..(1237): n is a, c, g, or t
tgctgtccctgctggtctaagtagaactgtagattcatatgggctggtgttcctgtgcgctgtgggtgtggtgattcagcctggcatttctaccataagtttttggtctgctgatttgctgccctgtcttctcttactttactttatcaatacctggcaaactgaccagaattaccttcctcatggcaaagggggattatggtgaattgttgttcttatagtctgtttcatgaagcacaagtggaatttaatacataaaagagaaaaatatcttagtttgctaccagcatccagcatgaagttgtaaagtggggattaggcacgtgacagtatagcacccatttgaatttaaataaaagtgaaccatatttatctggttatataaaactaaaaatgggggtgtttatataaaactaaaaactaagaatgatgtaaccttttgtctgtgttatctgaacactctacttcctttgcagccttagtcacacaactgagtcatctcaagtactctttaaggacacacagcccaggctgttctgagtcagaataggcccctacaggtatattttaaaactcttcgtaattctaatgtgtactgctggtatagctgaactactgacctggatcttagtcctagcctttttgcttttgcaatttcagtatcttcatctctaaactagggaaacactgggattctttcttagctgtgggggaaggtatttggttagatgactttgaatgaatagactgctgtgctgaaagagctttatcacactgtctcaaagtatgtaaagatacataggtggatgctcttactgcagcagtcatgaatacatttttagccatttacctaaggaaaaagacagtttttctaggtaccatgaaggaagattgaccctgttggtatgcctgtgggggtgggatgtgagtgggactgataaactgatacttttggttcgtatgtacatactggaagaatcttttcataataaatgagactacacaacnnnnnnnnnnnnnnnnnnnnnnnnnnnnnnnnnnnnnnnnnnnnnnnnnnnnnnnnnnnnnnnnnnnnnnnnnnnnnnnnnnnnnnnnnnnnnnnnnnnnnnnnnnnnnnnnnnnnnnnnnnnnnnnnnnnnnnnnnnnnnnnnnnnnnnnnnnnnnnnnnnnnnnnnnnnnnnnnnnnnnnnnnnnnnnngggnnggaggccanncccccccnnnnnnnnnnnnnnnnnccacccggggggggccgggcggccccgaaaaaaacagaaaaaggggcctcttttgttttccaaaggaaccacccgacacgaaaacccgcggtttctccccccc

SEQ ID NO: 261854 - DNA, 417 bp, Homo Sapiens
ttatgtagttgttcgttggttatacaagttcttggtccctccagaaccaccccggccccctgcccgttcttgaaatgtaggcatcatgcatgtcaaacatgagatgtgtggactgtggcacttgcctgggtcacacacggaggcatcctacccttttctggggaaagacactgcctgggctgaccccggtggcggccccagcacctcagcctgcacagtgtcccccaggttccgaagaagatgctccagcaacacagcctgggccccagctcgcgggacccgaccccccgtgggctcccgtgttttgtaggagacttgccagagccgggcacattgagctgtgcaacgccgtgggctgcgtcctttggtcctgtccccgcagccctggcaaggggcatgcggtcgggcaagggctgg

SEQ ID NO: 261855 - DNA, 491 bp, Homo Sapiens
tcatcatcagggggacaatcgatgaagtcggccagcatggcagctgtgtcatcatgctccttatcctggagagcttcggcctctgtctctgtctccatctcttcttctgcaggtgtctctggtgggggctgcaccttgtcactcccatcctcagtctcctcttccaacagggttgggggagcagagggctcttcttcaacaagctcctggggagggggccctgccgcagggctttccccttccctctccacctctccctgggaggggagcgcttcaggggccagggtgggagctgtgtcagccccacgctcctcctccgtccctggctcctccacttccaaaagcagcccgggttcgggttcgggttctggctgcacctttgggggagactcagggggaggcagagctggaggcagggttgggggtggaggtgcaccttcttctacctcccctcctgctgtgccaaactccaggtcttccacctcttccag

SEQ ID NO: 261856 - DNA, 478 bp, Homo Sapiens
gcttccattgagaaaaaccttccatcagaagaagacttctcgtctcagtgggactgctgagttgaattgtgcttttttttctgaagctttggtagtgtaactgtaagagtcctggaattggaaaagcaaatccagaagttgagttccatgacttttttgctgtttgcctttggacttgcatcatttatatttttaattcatcgaggatgagaaaattgattaacacaaaatcttttcatgtcttttctgatgagagactagctgaatccaagaagagaagcccttgaagagtgtattctattctagacaagcattcacacattggcttctttggtgccagattaaagaatgaagaaaggatcaaattgagacatccaggggggaagagttccctggcaaaactccaatctgcctgagcactgaggtggagccacagaagtccgggtcatttgcacctgggaggagcctggcccctcct

SEQ ID NO: 261857 - DNA, 613 bp, Homo Sapiens
gtttctcatggaattaatttggccttgatattcagtatttggaaatgtcttaaagaaaaccattttcattgtagaaaatccttttttaaatacttgttatatcccagggagattagtttataccttccacctcaggcagtcatcagctgctttagagaatggaatccaccctgcccctccattttttggttcctcggggctcaattcaagtctggtcaagtctccctggctggggattctgtcctgggaacagatactcaagttgtagtctcatgtgtctgcactcacccaagactctatatacttgcttgctcagagcatagttagggcagctcctaaaaatgcattcagcagaagactgaaaaacttcaattgcttcatttgtatgcaaatagaaaatggtagataattatatattatacgcctttgtgtaagttcatttaatacttgaagcagtctttgtctcaaaagagtatgcccttactgagaaaggatatgtgaacggtacatttattgttggggagagtggattgtttacatcatgtctggacttttgtctagttgggtagacagttctacaccagcagcccccttaataaagaagtctacacag

SEQ ID NO: 261858 - DNA, 796 bp, Homo Sapiens
  misc_feature (611)..(612): n is a, c, g, or t
  misc_feature (618)..(618): n is a, c, g, or t
  misc_feature (651)..(651): n is a, c, g, or t
  misc_feature (784)..(784): n is a, c, g, or t
atgggcggggcgcgcctcggagcgcgaaacatggcggggcaggacgctggctgcggccgtggcggcgacgactactcagaggacgaaggcgacagcagcgtgtccagggcggctgtggaggtgttcgggaagctgaaggacctaaactgccccttcctcgagggtctgtatatcacagagccaaagacaattcaggaactgctgtgcagcccctcagagtaccgcttggagatcctagagtggatgtgtacccgggtctggccctcactgcaggacaggttcagctcactgaaaggggtcccaacagaggtgaagatccaagaaatgacgaagctgggccacgagctgatgctgtgtgcgccagatgaccaggagctcctcaagggctgtgcctgcgcccagaagcagctacacttcatggaccagttgctcgataccatccggagcctgaccattgggtgctccagttgctcgagcctgatggagcacttcgaggacaccagggagaagaacgaggccttgctgggggagctcttctctagcccccacctgcagatgctcctgaatccagagtgcgacccgtggcccctggacatgcagcccctcctcanncagcanagtgatgactggcagtgggccagtgcctctgcncagtcccgaggaggaggagaaactggccgaagcttgcccagcagctgcaaggagagggctgccaagttgcacgcgccttagaacggagtactttgcacagccatgaccaagggggcctgtctgcgggcgccancccgacatcagt

SEQ ID NO: 261859 - DNA, 790 bp, Homo Sapiens
ggggccgtaaagcagctcggccgagcagactgctgcggttcctgggtggcggcggcatggaggcgcgcttcacgcgcgggaagtcggcgctgctggagcgcgcgctggcgcggccgcgcaccgaggtgagcctgagcgccttcgcactgctgttctccgagctggtacagcactgccagagccgcgtcttctccgtggccgagctgcagtcgcgcctggccgcgctgggccgccaggtgggcgcgcgcgtgctggatgcgctggtggcgcgcgaaaagggtgcccggcgtgagaccaaggtgctaggcgcgttgctcttcgtcaagggcgccgtgtggaaggcgctcttcggcaaggaggcggacaagctggagcaggccaacgatgacgcgcgcaccttctacatcatcgagcgcgagccgctcatcaacacctacatctccgtgcccaaggagaacagcacgctcaactgcgccagcttcacggcgggcatcgtggaggcggtgctcacacacagcggcttccctgccaaggtcacggcgcactggcacaagggcaccacgctcatgatcaagttcgaggaggcagtcatcgctcgagaccgggccctggagggccgctgaccctgccggagataaaggatacagagagccccccttccaaaaggaaataaacagaaataaaacccttgtcgggccgccctccggcccctccaaaagcttttctaaaaccatttcgctttggcggcccgggggccccgcaaggggaaaggggaaacctgcgtcctaag

SEQ ID NO: 261860 - DNA, 638 bp, Homo Sapiens
tggggacaatcacttgcttcagaagacagtattgtgtgatacaaggaatatctggagtcagacagaactgtgtccaaattccagctctgtctgaccctgacctgttcctcttcttgagtctcagcgtccttcactctaacacttgggtagtgagacctaccctgagggtcactgagaggaataaaggggcccatgtgtgtaataaagtatataccccagaacctagtggatgttccagcacgggatttcttaaccttctctttaagaagtagggaacatcgtaagacttgtcatccctatttttattggtctccctcttgggcagaaaccctaaacattctgctctgtcatccccatgagccacaactctgccaaacggggcctgcggatttgggagatcttgggagcttaggggtcatggatgagtcagagcacacactattcaaactattccgtcatagctttggaatacacaggaaagcaaccctgaggaatttccattaaacaaacaaaggtttgcatctttttttgatctttgcttgtctggtaaaagcctgcttttgttatcaagccttccagcgggaacctaggggagagagacaacagccaggagccaagcccaggttccagtaggaaag

SEQ ID NO: 261861 - DNA, 1153 bp, Homo Sapiens
  misc_feature (405)..(518): n is a, c, g, or t
  misc_feature (708)..(717): n is a, c, g, or t
  misc_feature (921)..(935): n is a, c, g, or t
  misc_feature (971)..(971): n is a, c, g, or t
  misc_feature (979)..(988): n is a, c, g, or t
  misc_feature (1009)..(1009): n is a, c, g, or t
tgatgtgcattgagtgctcaggcatccaccgacacctgggggctcacctgtcccgggtgcgctcccttgacctcgatgactggccgcctgagctgctggctgtcatgactgccatgggcaatgccctcgccaacagcgtctgggagggggccttgggtggctactccaagccagggcctgatgcctgcagagaggagaaggaacgctggatacgggccaagtatgaacagaagctcttcctggccccactgccaagctcagatgtgccactggggcagcagctgctccgggccgtggtggaagatgacctgcggctgttggtgatgctcctggcacatggctccaaagaggaggtgaatgagacctatggggacgggggcaggcggctgatgttttataaattgnnnnnnnnnnnnnnnnnnnnnnnnnnnnnnnnnnnnnnnnnnnnnnnnnnnnnnnnnnnnnnnnnnnnnnnnnnnnnnnnnnnnnnnnnnnnnnnnnnnnnnnnnnnnnnnnnngtggtgggcccgccttcgggccctgcaaaaaagcctttctaaaaccttttcgttttgggcgccgcggggccccagtaagggaaagggggaaacatgggggccatataccctggtttcccctaagggagaaaccccctgggggccattgaaacaaaagggcgcctttgggaatcctcccccacccaaattnnnnnnnnnncggccccccgcgggtgggaaaacacccgcagaggggggttcttttgcaacccaaaaattctccccaaaagggggggaggttcccgtgggagggggtccattctcacgcggggggaaactctcttcttccccacccggggggaggtgtcccacataggggcgggagccctttccgagattatctctccaaatatttttcacgcgnnnnnnnnnnnnnnntctgtggccaccatcttttatattgtgggagaagangagacacnnnnnnnnnnaaccaatttcctcctttttanagagacgaatttttctctcgcgcccggaaaatatgtggggaaaaggcccccctctcccccacaaaacacgtggccttctgttgtacttaaaaaaccgtccgtggaaattctccccccccgcgtgcgtggggcttttttccctat

SEQ ID NO: 261862 - DNA, 847 bp, Homo Sapiens
  misc_feature (552)..(552): n is a, c, g, or t
  misc_feature (573)..(573): n is a, c, g, or t
  misc_feature (650)..(650): n is a, c, g, or t
ggtgtctttcccagtgctatctgcaggctggccagcttcctctgcgctccggaaagctgcggcccagcgcggactagtgaggacctccacagctcctgacattgccaggagtcctgtcggcgttttctcccagcctccgccatgccggcggtgctgggttttgaaggcagcgccaataagattggcgtgggcgtggtgcgggatggcaaggtgctggcgaacccgcggcggacttacgtcacgcctcctggcacaggattccttccaggtgatacagccaggcatcaccgagctgttatcctagacctgctgcaggaggcactaacagagtctggattaacctcccaggatatcgactgcattgcatacaccaagggccctggcatgggtgccccactggtttctgtggctgttgtggcccgtactgtggcccagctgtggaataagccattggtgggtgtgaaccactgtataggccacattgagatgggccgcctcatcactggagccaccagcccaaccgtggttgtatggtgagtgggaggaaatacngcagggtgattgggcatactncggaacatcgtttaccgggtatctttgggggaaaccattcgatatttgccagtggggtaaatttggtctgggatcgntttttgctccgagttggctggaagaatttcttaacgaacccaaggtccagggatacaaccattgaaacagatgggcaaagcgagggccaagaaagcctgggttgagcttgcatacactcgggtaaaaagagggggatgggacggtctccattcctcaagggaaacctgggccttttttcatttggaagggaggaacc

SEQ ID NO: 261863 - DNA, 964 bp, Homo Sapiens
  misc_feature (501)..(501): n is a, c, g, or t
gggggtcgtgggcgcgtgtgtggaatgggaggaggtcgcgctgtccatgggcgtccttggcctgcgccacccagagatgataaatagccaaagacgtcaatggcacccatggacatagtaagcatagtaggagctgaaaaactagaagcaatgacaatgtcaactattttgagcaaaaagaagcagtgtcttcggaacatttgatcataaaaccagaaattaaaggatgagaaaaacatttttctgaagcttatactttcacatttcctagagagcatatttgtgtggatgggggtgggtaaacactcaacaaaagtttctttaaaaagaagaaaccatcctggtttgatgtaatcaatggttgcccactgctcccttcctgtgcctgtgacccttcccaaactgccctgttgcttgcaggctcgcctgagctgaaaggcagccctcacatcccgtcggcacctccctggggccttctttacaccctggagaacttcacangggaatctgtgtctgtaaccaccaaaggcttccctggtccagatgtagatactaaggctgactggttattttaaagcctgcggacttactctgcccaaaattatttaatccatgtaaaaataatttataattcttataaagtatccccttcataatataatgaatgttggtgctattacatttaagtgcacatgtacagtatacaagattattaataataatgttttcaaatagttattgtcaaagctatttttcttatgtttatgaaagtgcttataaaattcatgttttatgaggctggagatgtatattttgtaatttcattctgatatttgttaatattcgcttccaatgctggttttgtttgatgagactgacattgcctaatttcaagctttttgaatgtgtattctttcagggcaagtatgaaataactagtaaaaaatatacaaatatgcttaac

SEQ ID NO: 261864 - DNA, 512 bp, Homo Sapiens
tcgatagctttccggaagaaagggatctgggagcgagatgcgtgtagctagcacgatgcgtcgcgcggtgacgctctggcccgacgccgacggcctctcagtggctcccggaggacccggcgggcccagtgttggagagctgaaggtcaggccaggacagtgagacctgactccttgctcctaccagcctactatggcttaagacccaaggccagggtcccgttgatgtaacagagcagaggaccagcagatgaatggacaccttgaagcagaggagcagcaggaccagagatcacccctgacctgctacctcggccgccccggttgcttctattggtcaatccctttgggggtcggggcctggcctggcagtggtgtaagaaccacgtgcttcccatgatctctgaagctgggctgtccttcaacctcatccagacggaacgacagaaccacgcccgggagctggtccaggggctgagcctgagtgagtgggatggcatcgtcacggtctc

SEQ ID NO: 261865 - DNA, 542 bp, Homo Sapiens
cttactctccttatggacaaaaaggggatgacaacaggcctggcacacagagtgtttttcaggattatgaaagttaataaaactgctgaggtcaatattttgcacataataagtgctcaataaaaattagccttcactcctattatagcatacatattgtgtgcaaccagatggactggctggggcagtgattaaaatgacttatctactcttccccccacccgccagggagacccctgcctcttggttctcaggcacattgagcctggaagggcctcctgcagttgcctgtcaatgctgctcctcacttacctctcctccacagagctgaaggtcaggccaggacagtgagacctgactccttgctcctaccagcctactatggcttaagacccagggccagggtcccgttgatgtaacagagcagaggaccagcagatgaatggacaccttgaagcagaggagcagcaggaccaggtaagggaccatctaaaagccaagatcctcatactgtggaaagacaaaatctgaagcttttcttt

SEQ ID NO: 261866 - DNA, 464 bp, Homo Sapiens
ctaaggaactgtgtcctttcctagcaggaataaacagtgaaaatttggtaagtatttaacttgaagtgcatgtaatagtgatgagagtaagtagccaaatttccgtaatataaggtaatgtttaaaagtgagcaataattattgcatctcttttgcgacttcatgtagatgtgattaacattttttacaaatttgcctgcataaagattaaattggaacataccttactcctttgtctggtttttttattttgtatggtgctttaaatactaattttatatttcaagctttttgcagggtagaaataagtggctgttaaagaaaatatcttcaagaaggattatttcagtgtccctttttaaaactcgatgatggctttcagtttatttaagtcttctgtttttcagctccatttaaaactgacaataggcagctatcaaaaatggaaaaaatcttgtgccctt

SEQ ID NO: 261867 - DNA, 1362 bp, Homo Sapiens
agactgctgcctcaggcacccggctttccgactccttggcttcttatgtgaggaaaccacagcgcggccggcatccagagagtcgtgcaggtcgtaatctgaaggagtggctgagggagcaattttgtgatcatccgctggagcactgtgaggacacgaggctccatgatgcagcttacgtcggggacctccagaccctcaggagcctattgcaagaggagagctaccggagccgcatcaacgagaagtctgtctggtgctgtggctggctcccctgcacaccgttgcgaatcgcggccactgcaggccatgggagctgtgtggacttcctcatccggaagggggccgaggtggatctggtggacgtaaaaggacagacggccctgtatgtggctgtggtgaacgggcacctagagagtacccagatccttctcgaagctggcgcggaccccaacggaagccggcaccatcgcagcacccctgtctaccacgcctctcgcgtgggccgggcagacatcctgaaggccctcatcaggtacggggctgatgttgacgtcaaccaccacctgactcctgatgtccagcctcgattctcccggcggctcacctccttggtggtctgccccttgtacatcagcgcagcctaccacaacctccagtgcttccggctgctcctcctggctggcgcgaaccctgacttcaactgcaatggtcctgtcaacacacagggattctacaggggctcccctgggtgcgtcatggatgctgttctgcgccacggctgtgaggcagccttcgtgagcctgctgggtagaatttggagccaacctgaatctagtgaagtgggaatcgctgggccccagagtcgagagggaagaagaaaagtggaccctgaggccttgcaggtctttaaagaggccagaagtgttcccagaaccttgctgtgtctgtgccgtgtggctgtgagaagagctcttggcaaacaccggcttcatctgattccttcgctgcctctgccagaccccataaagaagtttctactccatgagtagactccaagtgctgcggttgattccagtgagggagaaagtgatctgcagggaggtggacaccgagccctgagtgctgtgctgctgctggtctcctgatggctgttgctgcagaagatgtcctcctagactgtcattgcctcctcaggtgcctggggccgctaccaggtctttggggtaaatgttcagctgaaaaggctttatactaaaggcccattatttgcttttctccccgacttttcccccacagtatattaccatttacacaaattaccgctcgtgtcccggctccaccttctcgacgctatttttt

SEQ ID NO: 261868 - DNA, 799 bp, Homo Sapiens
ggggatttgattttctctggggttttcactagttccggcctttggcgctctatgacgtcaccgaagtgacggagcggaaaagcgcgagaagcggcttggttccttgtacgcagaggcggtagtgacacaggcacaactgacagtggcagaagctcagctgacaaggactggggacggcggtgtccttgtcttgcctttgtcgcccccgcccctctcttccctggctggacttgcggagtccccgccgaagaacccgaggagccatatattgaagaccatgtctggaagcttctactttgtaattgttggtcaccatgataatccagtttttgaaatggagtttttgccagctgggaaggcagaatccaaagacgaccatcgtcatctgaaccagttcatagctcatgctgctctcgacctcgtagatgagaacatgtggctatcgaacaacatgtacttgaaaactgtggacaagttcaacgagtggtttgtgtcggcatttgtcactgcggggcatatgaggtttattatgcttcatgacataagacaagaagatggaataaagaacttctttactgatgtttatgatttatatataaaattttcaatgaatccattttatgaacccaattctcctattcgatcaagtgcatttgacagaaaagttcagtttcttgggaagaaacaccttttaagctgaatgcagaaaattccaaaataaatgatgtcaccacaatggtgtatactcaggaatgtgtacattgtaaattacttgattaaatagcctggaaaactttaa

SEQ ID NO: 261869 - DNA, 641 bp, Homo Sapiens
  misc_feature (512)..(520): n is a, c, g, or t
gttgttgttgttgtttatttgttattttaaaggtaaattgcacttttaaaaaaataattggttgacttaatatatttgctttttttctcacctgcacttagagggaaatttgaacaagttggaaaaaaacaatttttgtttcaattctaagaaacacttgcagctctagtattcacttgagtcttcctgtttttcctgtaccgggtcatggtaatttttggttgttttggttgttttcttaaaaaacaagttaaaacctgacgatttctgcaggctgtgtaagcatgtttacctgttggcttgctttgtgtgtctgttaaatgaatgtcatatgtaaatgctaaaataaatcgacagtgtctcagaactgaataactgcagtgacttgatgctctaaaacagtgtaggaattaagaatagatggtttttaatcctggaaattgtgattgtgacccatgagtggaggaactttcagttctaaagctgataaagtgtgtagccagaagagtacnnnnnnnnngtaaccactgtcttgatggcaaaataattatggtaaaaaacaagtctcgtgtttattattccttaagaactctgtgttatattaccatggaacgcctaataaagcaaaatgtggttgtttc

SEQ ID NO: 261870 - DNA, 804 bp, Homo Sapiens
  misc_feature (313)..(585): n is a, c, g, or t
aaaaaacttttttttaaaaaagaatttgattgacaatatatccagtccaatataagtatgaaggattctctctcctgagattgtagcaggcagccaaacattttcaaatgatgcccaaggttttagctgtcttgtgtgcatccacagtctgcgaagaagacatgataaggacatcagggagccaacaagactcctaatagcctcactacattcatccagtgcctattctgcatgcctaagcttagagttcttttatatacctctacggccagcaaaatgctcaggtctgctcttggtagggtaaacataaagnnnnnnnnnnnnnnnnnnnnnnnnnnnnnnnnnnnnnnnnnnnnnnnnnnnnnnnnnnnnnnnnnnnnnnnnnnnnnnnnnnnnnnnnnnnnnnnnnnnnnnnnnnnnnnnnnnnnnnnnnnnnnnnnnnnnnnnnnnnnnnnnnnnnnnnnnnnnnnnnnnnnnnnnnnnnnnnnnnnnnnnnnnnnnnnnnnnnnnnnnnnnnnnnnnnnnnnnnnnnnnnnnnnnnnnnnnnnnnnnnnnnnnnnnnnnnnnnnnnnnnnnnnnnnnnnncagggtaggttactcacctattattatcatttctgatgctgagtatgctaattataagtgataattttttcccttttattataaaacttgggcttgatcctgtgattaagccagaaattttacttttattggaaggttcctccaccatattaaagccttcacctggaaaaaaagaatttggtggtttcctcaattaaataatccctttataatggaaaa

SEQ ID NO: 261871 - DNA, 708 bp, Homo Sapiens
agaggtcctggtaccttcagttaacagtcgggtttcgtttgattttgttacggcgcccctgggccttcgattaataaggttcggtcaacggacaagtgagcggttccactgctcgtcagtcgatagggggagtcggtagtctgtccgaccgtaccattaggcgcctgggccggaggaggggttttcagggtcgtaggacgccgttgggcaccacgctcggagaaggacaggacaatggcggccttagggtccccgtcgcacacttttcgaggacttctgcgggagttgcgctacctgagcgcggccaccggccgaccctatcgcgacaccgcggcctatcggtaccttgtgaaggctttccgtgcacatcgggtcaccagtgaaaagttgtgcagagcccaacatgagcttcatttccaagctgccacctatctctgcctcctgcgtagcatccggaaacatgtggccctacatcaggaatttcatggcaagggtgagcgctcggtggaggagtctgctggcttggtgggtctcaagttgccccatcagcctggagggaagggctgggagccatgaacatggagaatatccttggatgctgcattcataggagaattgaataatttctatcaatatgtatttatcattaaattttttttaagtataaaacaaaacgaaaacgcacaacaaaaaattggcggccggcct

SEQ ID NO: 261872 - DNA, 469 bp, Homo Sapiens; identical to SEQ ID NO: 178162

SEQ ID NO: 261873 - DNA, 600 bp, Homo Sapiens
accaccaacaatgccagtgggatctctaggagtagctctgggtttctcagcagggcaaggccagcgatcatggctttgtggtgttcacaacacaggtaactcttatcaatggactgccccggggctgcagggaggtcctccgcatcagcaggccgctgcttcttcctgtcctttttccgcttcttctgggctttgtgagacacatccttcagcaacctggcttcggactgcaccacattcctgttgctgaggaagatcagtcgacggaagtatcgcttgtcatccccttgcacatcctcaatgacatagtcaccgctcaaggggctgcagtcttggtgctgaacggtccggaccccaatgtccccacccacagacagaaaggggacctgctgctgggtgggcatcccagctggggccagctccatgactctagccgacagctcagcttggatgtggtccatgctttcatactgctgacctcggtgaagggccactgtaatcaacctcctgaagccagcactggccgccagctgtttccggccctcatccatgccaaagagccactcggtctcccggccctgagggatgatgaaaatcgca

SEQ ID NO: 261874 - DNA, 643 bp, Homo Sapiens
gtaaagacaagagcagaataggagaagaaaacattttttacactaagcacaatatgctttcatattccaaatattggaaaaagggctaaggccatatccctttcttcctcatatccaacagtttgcttgtaaactgaattcaaattcagtatgcaaactaccaaagaccacccaatgaaaaatggcctgagccacctaacagtcactgaactttaaggctgcctttgacagcccctggagtaggagaaggattcaaaaaggaagctagacttgagacatctgagagtaaatcagcagcattactgagggtgagatggaggctttaaatagagggaaaggatgggtgtgggaaggaaatggtggaaatccagtgcaaaaataagctggagtcagctcaatggggctgatgaagaggatgaaaagacattgatgtagcaaatgatgctggaagatgtaaggtatgagattaggggaaaaactgcttagaaaagagatgatttggatgttcaagaactttctccagagacactacagtaattcctccttgcccacctgtaggtttacggcagtagttttgagggtaccttctaacttatccccaaatctcttctctctgttcactgtttttttccattataaaagg

SEQ ID NO: 261875 - DNA, 953 bp, Homo Sapiens
cttgtctgaaggtgtgctggacacctcctggggctcttctgggtcatttggttctggagaattatctcttatctctggcatagagcccaagggagagtggggcatctcttgagggtcttctttatctcttatttgggggatcaggttgtcactggccacttgcacagtgctagtgaggaggctgggcatctcttctgagtcttcttccgcattcattttggatgttaacttgtcattggtcactgaagtgcttcttccttcctggatgagtgcagggagaggcaggacagggtcagatgggctgggcgactcactcaggatctcatcgctttgctgggaggatgttccaggctcactgactcttggcgcacagggtgaacagcttggttgagggggttgtggtgggggcagcgccagtggggtatggagggagcttccttctgctaggccagttggggcttcaagtaggattggtgtgtctctgctctgccgttcataggaagcaccaacacgtttggaagcttctgtaaatcgtcaccagattgggatattcacgcaggttaatttgactgaacaatgtcaccagaagagacaggttaaaagtcctctccagttgggtgagaatgttgtgcaccactctggatacagggatcaaatttctacaggcttccagagattccatgtacattctcttagtgatgatggagttgtctaggaggccttcaaagaagggaaatggcttgtgtatggcataggcgatccccagcttctggtgcatgaagtgctgaaaaagagcctcttccatggctcttgtcatggtgaacatcctggactttgagtttgtcgttcctgcccctttccaggggctgggacagggatcactcctcaagattgggagagttacagggagatgctagcaggcaaaacaggaagtctgtgctttgacaaacgca

SEQ ID NO: 261876 - DNA, 923 bp, Homo Sapiens
  misc_feature (167)..(175): n is a, c, g, or t
taaacgaaagcactccgtgctggaagtaggaggagagtcaggactcccaggacagagagtgcacaaactacccagcacagccccctccgccccctctggaggctgaagagggattccagcccctgccacccacagacacgggctgactggggtgtctgccccccttnnnnnnnnncagcacagggcctcaggcctgggtgccacctggcacctagaagatgcctgtgccctggttcttgctgtccttggcactgggccgaagcccagtggtcctttctctggagaggcttgtggggcctcaggacgctacccactgctctccgggcctctcctgccgcctctgggacagtgacatactctgcctgcctggggacatcgtgcctgctccgggccccgtgctggcgcctacgcacctgcagacagagctggtgctgaggtgccagaaggagaccgactgtgacctctgtctgcgtgtggctgtccacttggccgtgcatgggcactgggaagagcctgaagatgaggaaaagtttggaggagcagctgactcaggggtggaggagcctaggaatgcctctctccaggcccaagtcgtgctctccttccaggcctaccctactgcccgctgcgtcctgctggaggtgcaagtgcctgctgcccttgtgcagtttggtcagtctgtgggctctgtggtatatgactgcttcgaggctgccctagggagtgaggtacgaatctgggcctatactcagccccaggtacgagaaggaactcaaccacacacagcagctgcctgactgcaggggggctcgaagtctggaacagcatccccgaagctgctggggcccctgccctgggctcaacgttgtccaccagaatggtgaccaacgtgccattctggtttcctgaaatgtcccctggag

SEQ ID NO: 261877 - DNA, 393 bp, Homo Sapiens
  misc_feature (296)..(342): n is a, c, g, or t
tagggtgttttaactcaaatgggtgatgaaaaggactcttggaaagtgaaaactttagatgaaattcttcaggaaaagaaacgaaggaaggaacaagaggagaaagcagagataaaacgcttaaaaaattctgatgaccgggattccaagcgggattcccttgaggagggggagctgagagatcaccgcatggagatcacaataaggaactccccgtatagaagagaagactctatggaagacagaggagaagaagatgattctttggccatcaaaccaccccagcaaatgtctcnnnnnnnnnnnnnnnnnnnnnnnnnnnnnnnnnnnnnnnnnnnnnnncgtaggcatcgtagccattcagcagaaggggggaagcatgctagagcaaaa

SEQ ID NO: 261878 - DNA, 872 bp, Homo Sapiens
  misc_feature (750)..(750): n is a, c, g, or t
ggtacggtccggaattcccgggatatcgtcgaccacgcgtcggtccttctcaaggcagtggcccaggccacaggtcggcagctggagtccgtccgggctgaggcagccgagaaaggcgacgtggggctggtggccgagaacagccgcagcacccagaggctcatgctgccaccacctccgctcactgcctccggggtcttcagcaagttccgcgacatcgccaggctcactggcagtgcttccacagccaagaagatagacatcatcaaaggcctctttgtggcctgccgccactcagaagcccggttcatcgctaggtccctgagcggacggctgcgccttgggctggcagagcagtcggtgctggctgccctctcccaggcagtgagcctcacgcccccgggccaagaattcccaccagccatggtggatgctgggaagggcaagacagcagaggccagaaagacgtggctggaggagcaaggcatgatcctgaagcagacgttctgcgaggttcccgacctggaccgaattatccccgtgctgctggagcacggcctggaacgtctcccggagcactgcaagctgagcccagggattcccctgaaaaccaatgttggcccatcccacccggggcatcagcgaggtcctgaaacgctttgaggaggcagctttcacctgcgaatacaaatatgacgggcagagggcacagatccacgccctggaaggcggggaggtgaagatcttcancaggaatcaggaagacaacactgggaagtacccggacatcatcagccgcatccccaagattaaactcccatcggtcacatccttcatcctggacaccgaagccgtggcttgggaccgggaaa

SEQ ID NO: 261879 - DNA, 549 bp, Homo Sapiens
  misc_feature (360)..(360): n is a, c, g, or t
  misc_feature (369)..(370): n is a, c, g, or t
  misc_feature (374)..(375): n is a, c, g, or t
  misc_feature (381)..(381): n is a, c, g, or t
  misc_feature (385)..(385): n is a, c, g, or t
  misc_feature (393)..(393): n is a, c, g, or t
  misc_feature (396)..(397): n is a, c, g, or t
  misc_feature (400)..(402): n is a, c, g, or t
  misc_feature (406)..(408): n is a, c, g, or t
  misc_feature (420)..(420): n is a, c, g, or t
  misc_feature (422)..(424): n is a, c, g, or t
  misc_feature (427)..(428): n is a, c, g, or t
  misc_feature (437)..(438): n is a, c, g, or t
  misc_feature (507)..(507): n is a, c, g, or t
  misc_feature (509)..(509): n is a, c, g, or t
ggcctgggtggcgaattcggcacgaggccatgactaggactctccctgcacctgcaggttcccaaaagcctttgccagtatgcccacccgggcctggccttgcatacggtccgagagattgccagagtcaaagatcagccactctccctcaccttggctgccttgcgtgagaacaccagtcgcctctacagtctttaagcagagaagggcgaccagcagcctgacagaacacaggctggcttgaagtctgtgtctcaggtcgaggatgtgattagagagctgattggaacacagaaaaccaggacaggatgttttcctccaagcgggtcataaggcttcagcttctgggtggtggtgggngtggggtgnncatnnaatgangggnatggggantgnntgnnntagnnntgggattttggntnnnagnnaaaatggtnnagggtagggagtaaagaataaagagtgggatatgagggtagagtgagtttggaatgaaaaattgtgttntntgaagggtgtttttgaagagtttgtgaataaaaatatttg

SEQ ID NO: 261880 - DNA, 1407 bp, Homo Sapiens
  misc_feature (625)..(625): n is a, c, g, or t
  misc_feature (781)..(791): n is a, c, g, or t
  misc_feature (971)..(986): n is a, c, g, or t
  misc_feature (1010)..(1024): n is a, c, g, or t
  misc_feature (1034)..(1034): n is a, c, g, or t
  misc_feature (1153)..(1164): n is a, c, g, or t
  misc_feature (1222)..(1222): n is a, c, g, or t
ggcagctgcggaaggttaatccagctgcagcactagaagaactggaaaaaattgaaaaggccagaatgatggaaagaatgagccttaagcaccaaaacagtgggaaatgggccaagtcaaaggcaattatggccaaatatgacctggaggctcgccaagctatgcaggaacagttgtctaagaacaaagaactgacacagaaactccacgcagcctctgagagtgaggaagacgagggaggcacagaagatgtggaagaactccttgtccctgatgtactgaatgaagtgcagatgaatgcagatgggccgaatccctggatgctcaggagctgcaccacgtgacaccaaagaaggctggggcccaggcaggaccctggagcaactggccagagcttggcggcccctgggagtttctcgaaagggcgggggagaaaaaaaagaaccagtgggcaaaaagcacaaaaatttttggggcgaacccaaaattttgaggggaagacggcgcgaccgccctttaacaaccgaaagaaggtttgaaggcctccacacgccgcggagaatggcgcctggagagccgcccagcccggggggtgggaggcccgcgaggcggaggcctccgatanatagccaaggttcgtgcgggggcgccgaaagctgcccacgccggacaagcgggggggccccttcctgtataccctttgggggaaatattttctggcggaaacaaaacaacgcgtttgggggcctttccaaattccttcctccccttggccggcggnnnnnnnnnnncattttttcgtccgagcgaataaacccggggtgaaatataagaacccgcccgccgccgctcgttcgtgcccgggggccgtttccccccccaagcgcggggggggaaaaaagacggttctacagcggcgcgatgaaagggcgccgcccagcaaggtggcccttcctccgcgcggactaaannnnnnnnnnnnnnnnaaaaagccacacacaccgctgttnnnnnnnnnnnnnnnaaatggcatntcctcccccccttggtgccgcagacgaatgcaaaaaggggggaggaccaacgccccggtggtgtgcggcctccccggccccgggaggacaacgtcaacaagctcctaaccgggctgcgnnnnnnnnnnnntgtttagggtgtttcttgggcgtgtgctcccgcgctagtggtgtcacccccgtcactnacttcaacgaggatggagtctgcccggatcacagctccctgtttctggtgtggcaggacgccacgccctcgtgggtgaacgagaaagccttgtggggtgtagacagaatggggtgacctcccagcgggggggttctcctcccgccgatcgacgcagccgacgctccgcgcgcgctctgggcgctg

SEQ ID NO: 261881 - DNA, 863 bp, Homo Sapiens
agtgcgcaggcgctggcaagatggcgggaggggtgcgcccgctgaggggcctccgcgccttgtgtcgcgtgctgctcttcctctcgcagttctgcattctgtcgggcggtgaaagtactgaaatcccaccttatgtgatgaagtgtccgagcaatggtttgtgtagcaggcttcctgcagactgtatagactgcacaacaaatttctcctgtacctatgggaagcctgtcacttttgactgtgcagtgaaaccatctgttacctgtgttgatcaagacttcaaatcccaaaagaacttcatcattaacatgacttgcagattttgctggcagcttcctgaaacagattacgagtgtaccaactccaccagctgcatgacggtgtcctgtcctcggcagcgctaccctgccaactgcacggtgcgggaccacgtccactgcttgggtaaccgtacttttcccaaaatgctatattgcaattggactggaggctataagtggtctacggctctggctctaagcatcaccctcggtgggtttggagcagaccgtttctacctgggccagtggcgggaaggcctcggcaagctcttcagcttcggtggcctgggaatatggacgctgatagacgtcctgctcattggagttggctatgttggaccagcagatggctctttgtacatttagctgtggtgtgtgcttcagaaaggagcagggcttagaaaaaacccttttgtccgtaggagttgatgtggggtgagtgatatatttctatgttttttaatgtacagcatcctgtactttgttttgccttggataaaggtaaaattaaatggaaaccgctggaactatgcctattcctgg

SEQ ID NO: 261882 - DNA, 1081 bp, Homo Sapiens
tgatgtctgccatggatgcagtagaggaaagtggtggtacaagtgccatgattgattagcaatgtctgcactggatacggaaaaaagaaggtgcttgcaggtttacagtgtatatgtgggctattgaagagccctctgagctcggttgctagcaggagagcatgcccatattggcttactttgtctgccacagacacagacagagggagttgggacatgcatgctatggggaccctcttgttggacacctaattggatgcctcttcatgagaggcctccttttcttcaccttttatgctgcactcctcccctagtttacacatcttgatgctgtggctcagtttgccttcctgaatttttattgggtccctgttttctctcctaacatgctgagattctgcatccccacagcctaaactgagccagtggccaaacaaccgtgctcagcctgtttctctctgccctctagagcaaggcccaccaggtccatccaggaggctctcctgacctcaagtccaacaacagtgtccacactagtcaaggttcagcccagaaaacagaaagcactctaggaatcttaggcagaaagggattttatctaaatcactggaaaggctggaggagcagaaggcagaggccaccactggactattggtttcaatattagaccactgtagccgaatcagaggccagagagcagccactgctactgctaatgccaccactacccctgccatcactgccccacatggacaaaactggagtcgagacctaggttagattcctgcaaccacaaacatccatcagggatggccagctgccagagctgcgggaagacggatcccacctccctttcttagcagaatctaaattacagccagacctctggctgcagaggagtctgagacatgtatgactgaatgggtgccaagtgccaggggcggagtccccagcagatgcatcctggccatctgttgcgtggatgagggagtgggtctatctcagaggaaggaacaggaaacaaagaaaggaagccactgaacatcccttctctgctccacaggagtgtcttagacagcct

SEQ ID NO: 261883 - DNA, 820 bp, Homo Sapiens
  misc_feature (135)..(135): n is a, c, g, or t
ttgtatagtatccccccagaattcctcccaacccctaaaaaatacttttcaggatttgttgtgagtaaccaaactctccactgaaagttactaccaaacttccaacagtttgggttggggatggcccagataacnacatacataggaaataaatctgctttcaaaacagcaccacccatatagcacttaaatcccacaattaaaacataattaaagatgactttcttttccccccacgtatcctaaaaagggcacagcttcttttccccatttaatgaaaagcctcctatagttgtcgatgagcatcagttgacttattattgacaacgaagtgcacataatcttctttttctcattgagttctattttttgagcgccaagattgttgggatgaaaatcagattaatgtgtgagatgtgctttctggttttaaccacataacattctataaaggaatgataatctacgttttagaagctctttttgaaacttaacactgtcattgataagaatattcaagcagttttcttaggcaccaaaaatttatccagccgggttacacaccatcttaaaatattacattcccttttagagagcattcaaaaagcaaatgattgtttttttattaaataatttctccaaaatactgaaaataacaaataacattcaaaaagcattcaaagaaaacaaaaacatgtcctcattttatttggaaataaactcttgttgtaggatagaaaggaattagtgtattattggcaacctatgagattctgcactatttacatattgctggtacctctatgcaaactattgcccc

SEQ ID NO: 261884 - DNA, 1525 bp, Homo Sapiens
  misc_feature (446)..(446): n is a, c, g, or t
gaggcctgggtggcgaattcggcacgaggcctgatcaggaggaggttcagctggctgatacaatgtttggccttaccaaggttacagatgacacactcaagcgtttcagtgtgcgatatctgcgacctgctcgcagtcttgtcttcccttggttctcccctgggggttcaggattacgaggcctgaagctcctagaggctaaatgccagggggatggagtgagctacgaggaaaccactattccccgacccagcgcctaccacaatctgtttggattaccactgattagtcgtcgagatgctgaggtggtactgacgagtcgtgagcttgacagcctggccttgaaccagtccacggggctgcctacccttactctaccccgaggaacgacctgcttaccccctgccttactcccttacctggaacagttccggcggattgtattnctggttgggggatgaccttcggtcctgggaagccgccaagttgtttgcacgaaaactgaaccccaaacgatgcttcttggtgcgaccaggagaccagcaaccccgtcccctggaggccctgaacggaggcttcaatctttctcgtattcttcgtaccgccctgcctgcctggcacaagtccatcgtatctttccggcagcttcgggaggaggtgctaggagaactgtcaaatgtggagcaagcagctggcctccgctggagccgctttccagaccttaatcgtatcttgaagggacatcgaaagggcgagctgacggtcttcacagggccaacaggcagtggaaagacgacattcatcagtgagtatgcccctggatttgtgttcccagggggggaacacactgtggggtagcttcgagatcagcaatgtgagactagcccgggtcatgctgacacagtttgcccaggggcggctggaagatcaactggacaaatatgatcactgggctgaccgctttgaggacctgcccctctatttcatgactttccatggacagcaaagcatcaggactgtaatagatacaatgcaacatgcagtctacgtctatgacatttgtcatgtgatcatcgacaacctgcagttcatgatgggtcacgagcagctgtccacagacaggatcgcagctcaagactacatcatcggggtctttcggaagtttgcaacagacaataactgccatgtgacactggtcattcacccccggaaagaggatgatgacaaggaactgcagacagcgtccatttttggctcagccaaagcaagccaggaagcagacaatgttctgatcctgcaggaacagaagctggtaaccgggccaagggaaacggtatctgcaggtgtccaagaaccgcttttgatggagatgtaaggtgtccttccccgcttgagttcaacaagaaactcccctcacctttcttccattccacccaaagcaacaagggccccggctccaagaaagatcaagggaatgaacactggcaacacactggccccaagaaaggccactcctttccggggc

SEQ ID NO: 261885 - DNA, 969 bp, Homo Sapiens
aaggtagcgaggcctgggtggcgaattcggcacgaggcctgatcaggaggaggttcagctggctgatacaatgtttggccttaccaaggttacagatgacacactcaagcgtttcagtgtgcgatatctgcgacctgctcgcagtcttgtcttcccttggttctcccctgggggttcaggattacgaggcctgaagctcctagaggctaaatgccagggggatggagtgagctacgaggaaaccactattccccgacccagcgcctaccacaatctgtttggattaccactgattagtcgtcgagatgctgaggtggtactgacgagtcgtgagcttgacagcctggccttgaaccagtccacggggctgcctacccttactctaccccgaggaacgacctgcttaccccctgccttactcccttacctggaacagttccggcggattgtattctggttgggggatgaccttcggtcctgggaagccgccaagttgtttgcacgaaaactgaaccccaaacgatgcttcttggtgcgaccaggagaccagcaaccccgtcccctggaggccctgaacggaggcttcaatctttctcgtattcttcgtaccgccctgcctgcctggcacaagtccatcgtatctttccggcagcttcgggaggaggtgctaggagaactgtcaaatgtggagcaagcagctggcctccgctggagccgctttccagacctcaatcgtatcttgaagggacatcgaaagggcgagctgacggtcttcacagggccaacagggcagtggaaagacgacattcatcagtgagtatgcccctggatttgtgttccccaggggggtgaacacactggggggggtagccttccgagatccagcaatgtgaagactagccccggggtcatggctgaaaccagtttttgcccaagggggccggcctggaaaaaatcaaactgggaaaa

SEQ ID NO: 261886 - DNA, 994 bp, Homo Sapiens
  misc_feature (457)..(457): n is a, c, g, or t
  misc_feature (741)..(741): n is a, c, g, or t
  misc_feature (971)..(971): n is a, c, g, or t
ctaaggagcgaggcctgggtggcgaattcggcacgaggcctgatcaggaggaggttcagcttggctgatacaatggtttggccttaccaaggttacagatgacacactcaagcgtttcagtgtgcgatatctgcgacctgctcgcagtcttgtcttcccttggttctcccctgggggttcaggattacgaggcctgaagctcctagaggctaaatgccagggggatggagtgagctacgaggaaaccactattccccgacccagcgcctaccacaatctgtttggattaccactgattagtcgtcgagatgctgaggtggtactgacgagtcgtgagcttgacagcctggccttgaaccagtccacggggctgcctacccttactctaccccgaggaacgacctgcttaccccctgccttactcccttacctggaacagttccggcggattgtattnctggttgggggatgaccttcggtcctgggaagccgccaagttgtttgcacgaaaactgaaccccaaacgatgcttcttggtgcgaccaggagaccagcaaccccgtcccctggaggccctgaacggaggcttcaatctttctcgtattcttcgtaccgccctgcctgcctggcacaagtccatcgtatctttccggcagcttcggggaggaggtgctaggagaactgtcaaatgtgggagcaagcagctggcctcccgctggagccgctttccagaccctcaantcgaatctttgaggggacatcgaaaagggccgaactgaacggcctccacagggcccaacaaggcagtgggaaagaccacattttcatcagtgaggaatgcccctgggaatttgtggtcccccagggggtgaaacccactgtgggggttaactttccagaatccgcaatgtggagaactaacccggggtcatggctgaaccagattttgcccaagggggcggcctggaaanaatcacctgggaccaaatttgac

SEQ ID NO: 261887 - DNA, 764 bp, Homo Sapiens
  misc_feature (324)..(339): n is a, c, g, or t
  misc_feature (605)..(605): n is a, c, g, or t
  misc_feature (607)..(607): n is a, c, g, or t
tcatgaactttgtagttgggagagtggttttacatgtctgtgtattcatgactttgggagtgggtaggatcattggagagagaattgcacagaaagtcctgaagtttaaaacacttttgaccagctttggctcgggagagtggggctgcttgtagaactggaagtgaataactttttcaagcaatatcagtgagtgggtcccatcgacagggttccaggacctggaacactttaacagaaggaaatgccgaagcagcttgcacagttgctttacagacttccaagaggctgattctggcttcaagatggagccttggagttggnnnnnnnnnnnnnnnncttccctcaaagaacctgcggttgcgctttgtgtgttttgtttttgttttccatttgggggccccatgggaaagagcttctgaactctttcctttatgaactcccactgtgttcctataaaggcccttttctttcttagtgttgtaagttacattttcattatgccccatcacatcttctttactgtaaaaatattaaaaagctgtttccaagtgggacagctaatgaagctctaattattgcagacatatttttgagatgtaaananaaaaatttaaagttaaatgataagtcttagaggcgagtgaggaataaaatggatgtaaacatttacatgggatgcattagaattctgctgtgtgtactgtcttttggttgaaacaaattatgaacagtgactaataataaaaagtcaatacccaaaa

SEQ ID NO: 261888 - DNA, 932 bp, Homo Sapiens
  misc_feature (816)..(889): n is a, c, g, or t
tagtagtataaaatcatttttatttagttaattaccagagagatttagcataattttgttctggattcagtaaatcaagtcagcttggatcattcaccttaacttttcctttagcagccatttccactagtttccattaagtagtgttctataaactttgatccaaagcagaatcaatgtcttttccatctcgtgacttaaagttctgtgactgtgatgcatgtgagtgttccgacttcatctgttcctcttaactacggtgtttcccttaccatggcattcataggatgaaatgaatgactgcccagaatgagaatttgtccagattattcagataaacatcataaagcagaatacattataaataagtagaatatgaataaatagaataataaaattccaaaatactcaatgggaaatgactagtaatataggctttcaagagttggtaccttttagctatatttgcagattctctgggattttaaggaactgagaaaacagcaaagttgactaaattttatatttcttgtcctctaaatattttgataatttctggattgatgcagtgatgtttttgttccttccgtatttataaatgaaacacctttttttagtgtttctaaaccctaaaatctacttggtttgaaatcaagttggttggaaacactggtttgaactttttattttgaaagcatgtttggttggatttgaaaaattttccattggaaggaaaagttttttcaattccggtggggggatccaggttttggaattccgggaaaatggaagcccaccggccaccccctaaaatannnnnnnnnnnnnnnnnnnnnnnnnnnnnnnnnnnnnnnnnnnnnnnnnnnnnnnnnnnnnnnnnnnnnnnnnnaacatctttgggggccccccgccaaaaaacccccatttttttt

SEQ ID NO: 261889 - DNA, 171 bp, Homo Sapiens
actgcttaaagttggtattaataaaaagacaaccacatagttcgtttaccttcaaactttaggtttttttaatgatatactgatcttcattaccaataggcaaattaatcaccctaccaactttactgtcctaacatggtttaaaagaaaaaatgacaccatcttttattc

SEQ ID NO: 261890 - DNA, 143 bp, Homo Sapiens
  misc_feature (79)..(91): n is a, c, g, or t
catatttgaggcagttgtgaaactggtttatgattgttggtgtactctgttgtaaattcaaagagagcttgttgaacannnnnnnnnnnnnacctattgttttcagagtgtctattttgaattaaaatttgttacaccgctgc

SEQ ID NO: 261891 - DNA, 1209 bp, Homo Sapiens
  misc_feature (205)..(218): n is a, c, g, or t
ttccctgggtccacaaattcacttcgcttttcaaaatatttgatgggaggaaataaaaaagtgtaacgttgtggggtggaggaaatgtttggcatggaagagaggagaaaagggtatgaaatgagggaaagtgttatttgccaccggaaaatattggattcagttgattttaaaaaatgaggtataacagtatgccagtaaatgnnnnnnnnnnnnnnttagaaaccaaaatgcacatttccaatggaaaaatctctaaacctcttagagttttattagacatttcatgtacagaagttaatctagaaaaatacattttaaaaatcttcaacagaccatgctccctgtaacaaaaccttccaaaccctgtgttttattatacaaagcaatctacattagtaggtaaaaagaaattctcaaatttagcaatgtcattttccatccaacatccatctaatttacagatgggtttccactattcatactggaattagaattctgtaataaattttttctaatgttttctgtacatattaaataacccaaaaggttcctcttgtagtgcatgtgccatttagcaagtctattcagtatttttccagtaccattctcattacagtgatttgcctgtaaatgtagttaatatctaaaagtgcacacagttaactttcccaaataacggactatttctggaggaaacctaatattcacagaaaagattaccaataacaatgattagaaatgtagggttagaatgtactctgagactatacaacacaattatatacacaagctaaaggacattaagtctttagcctatatttacataaaataatgtgtgtttccacagggtcataccaataactcagtatggtactagatataattaggattgttagctacaattcagtatagcaagacagccttaaaatgccttgaactgacttccgctaactaaaactccagtatatcacagtgttttaagtaatattagtgtgctgcccaaacaagcaactaagatatccagtaaggatgctgtgtaacacagtaaaagacagcaagccttcatcaaggggttattttggggttataatgaattttggcacttaagactgccactgcatgcagaaaccccgaaaaagaaatacacaggtttcaaaatggatatacttcattttgtttaaaatgcccaagagcctttgcaacata

SEQ ID NO: 261892 - DNA, 816 bp, Homo Sapiens
  misc_feature (614)..(614): n is a, c, g, or t
ggggtttttgggggtagattcgagttacaaaatggccgcccggagcgtgttcggcgcggttcccccagctgtctctggctgaaccggcgctctcgcctccctgccgaacacagcgtgaggagcccccccagggacatggtgtttgagtctctgggcttgccgagcactaagtcctctgagttccgcagcgcagcaccggaagcggccgagcgcgctcagcccggcgacccctgcgggctccagacccctgcgccgctgcgccccgggtttcgccgcaaccaagacccagcgagtgcagcggcggccgccgaggaggttcgaaaacatggccaaaagaaatgccgagaaggaactgacagataggaattgggatcaagaagatgaagctgaagaggtgggaacattctccatggccagtgaggaagtcttgaagaatagagccataaagaaagcaaagcgcagaaatgttggatttgaatctgacactggaggagcctttaaagggtttaaagggttggtggtaccttctggaggaggacgcttttctggatttggtagtggcgctgggagggaagcctttggaaggactgtcgaatggaaacaacataacccgntgccccctccctttcgccagtgcaaaaggcagccggcaaatccccaagggaagccttttggctttctccttgcctggcaaatgggcccctacccacctttgggttgattaaaagtttccaattcccccaaaacttaattgggggaacaggtcaaagcaagcccttccctcccctctggggcctttggcttttccaagataat

SEQ ID NO: 261893 - DNA, 1400 bp, Homo Sapiens
  misc_feature (1293)..(1293): n is a, c, g, or t
ggcctgggtggcgaattcggcacgagggttcctcgtgccacgtgtcttgtaaggtgcggctagaaactggggacatggcagcgcctggcccagcgctctgcctcttcgacgtggatgggaccctcaccgccccgcggcagaaaattaccaaagaaatggatgacttcctacaaaaattgaggcagaagatcaaaatcggagtggtaggcggatcggactttgagaaagtgcaggagcaactgggaaatgatgtggttgaaaaatacgattatgtgtttccagaaaatggcttggtagcatacaaagatgggaaactcttgtgtagacagaatattcaaagtcatctgggtgaggccctaatccaagatttaatcaactactgtctgagctacattgcgaaaattaaactcccgaagaagaggggtactttcattgaattccgaaatgggatgttaaacgtgtcccctattggaagaagctgcagccaagaagaacgcattgagttctacgaactcgataaaaaagaaaatataagacaaaagtttgtagcagatctacggaaagagtttgctggaaaaggcctcacgttttccataggaggccagatcagctttgatgtctttcctgatggatgggacaagagatactgtctgcgacatgtggaaaatgacggttataagaccatttatttctttggagacaaaactatgccaggtggcaatgaccatgagatcttcacagaccccagaaccatggggctactccgtgacagcgcctgaggacacgcgcaggatctgtgaactgctgttctcctaacgtgggagcgggaggggcggggtcccggctgacaagccagcatagggcattcggtggccagagccgagggtcctcccacacgtgctcacccacccgcagcctaggcaggctctgcatgctatgccaggcatgtgcagtctggacttccacctccagtgccagaaacttccagaaggaaggagaaaactcttgtcaagaatggcccagaggaatgcctcgcacaaaaggtcttccccacccacccccagcccactagtctaatacccaccctgatacgtgcaatcatgtagttttggcggaaatttccccatcattctaagatgatacaaaaagaaaaactggggcctggaccctcccctcctgggggggtctgtgggaaacataaagcgggttttttaaagggccccctgcatcaataccaaaaaatgggggggtttgggttaatggagaaaaccaaggacagggccatcctgcagntggacccacccccagggacgaagttttacaaacacccttcctgggaaccgaagctctccggcctgcattgttaccccttgaatgggggggcttgttaatttggggca

SEQ ID NO: 261894 - DNA, 1433 bp, Homo Sapiens
agacgccgcgcggggcggggattggtctgtggtcctctctcggctcctcgcggctcgcggcggccgacggttcctgggacacctgcttgcttggcccgtccggcggctcagggcttctctgctgcgctcccggttcgctggacgggaagaagggctgggccgtcccgtcccgtccccatcggaaccccaagtcgcgccgctgacccgtcgcagggcgagatgagcgcggacgcagcggccggggcgcccctgccccggctctgctgcctggagaagggtccgaacggctacggcttccacctgcacggggagaagggcaagttgggccagtacatccggctggtggagcccggctcgccggccgagaaggcggggctgctggcgggggaccggctggtggaggtgaacggcgaaaacgtggagaaggagacccaccagcaggtggtgagccgcatccgcgccgcactcaacgccgtgcgcctgctggtggtcgaccccgagacggacgagcagctgcagaagctcggcgtccaggtccgagaggagctgctgcgcgcccaggaagcgccggggcaggccgagccgccggccgccgccgaggtgcagggggctggcaacgaaaaatgagcctcggcgaaggccgacaagagccacccggagcagcgcgagcttcggcctcggctctgtaccatgaagaagggccccagtggctatggcttcaacctgcacagcgacaagtccaagccaggccagttcatccggtcagtggacccagactccccggctgaggcttcagggctccgggcccaggatcgcattgtggaggtgaacggggtctgcatggaggggaagcagcatggggacgtggtgtccgccatcagggctggcggggacgagaccaagctgctggtggtggacagggaaactgacgagttcttcaagaaatgcagagtgatcccatctcaggagcacctgaatggtcccctgcctgtgcccttcaccaatggggagatacagaaggagaacagtcgtgaagccctggcagaggcagccttggagagccccaggccagccctggtgagatccgcctccagtgacaccagcgaggagctgaattcccaagacagccccccaaaacaggactccacagcgccctcgtctacctcctcctccgaccccatcctagacttcaacatctccctggccatggcaaagagagggcccaccagaaacgcagcagcaaacgggccccgcagatggactggagcaagaaaaacgaactcttcagcaacctctgagcgccctgctggccacccagtggactgggcagggccggaggccaggcatttccaccccaccttttttcctttcttccccaatttacttcccctggaattcaatgttacaaattcaggcacccacattcccctttt

SEQ ID NO: 261895 - DNA, 923 bp, Homo Sapiens
agctccagctccagcactgatgagagtgaggatgagaaggaagagaagctaactgaccagtcccgctcaaagctctatgatgaagagagtctcctgtccctcactatgtcccaagatggattcccaaatgaagatggagaacaaatgacccctgagcttctgctactgcaggaaagacaaagagcctctgagtggcccaagggatcgtgtcctgataaaccgtattgacctcgtctgccaggctgtactctcagggaagtggccttctagccgtaggagccaggaaatggtaacaggaggaattttggggccaggcaaccacttgctagacagtccctcattgactcctggagaatatggtgactctccagtccccacaccacgaagtagtagtgcagcttccatggcagaggaggaagcatctgcagtcagcacagcggcagcccagttcaccaaacttcgccgaggcatggatgaaaaggagtttacagttcaaatcaaagatgaggaaggattgaacgttaacattccagaagcacaagttgatggcgaatggagtaatgggagatggacatccactgtttcataacgaagaaggggaacagaaagaagctagtagagctggaggtggagtgcatggaagagcctaatcacctttgatgtggacctggagacccggatcccttgtcatcaataaggtggatggtactttgctggtgggtgaggatgccccctcgtccgggactgaactgcagatgtggttacaggttcatccagagtttgctgttgatccccgatttctaggcgtatatggaggatccgcaaaaaaacagaagttggcaaagattttccacacacttataagggccaattgaactgttggcaattgaacccgtccaccacagtaatcctaaaattggcaa

SEQ ID NO: 261896 - DNA, 577 bp, Homo Sapiens
  misc_feature (495)..(495): n is a, c, g, or t
  misc_feature (499)..(499): n is a, c, g, or t
  misc_feature (514)..(514): n is a, c, g, or t
  misc_feature (539)..(539): n is a, c, g, or t
  misc_feature (546)..(546): n is a, c, g, or t
acaaccacctgggcaacaacgatggggagaacctatcggcgccattgcagttccgctctaaggaggcgtccaagagcaacgtggtggacgacatggtgcagagcaacccagtgctctatacgcccggcgaagagcctgaccactgcgtggtcatcaagtatgtgccgtacgtgggtgacagcaagcgcgcgctggatgagtatacctcggagctgatgctgggcggaaccaacacactggtgctgcacaacacgtgtgaggactcgctgctggccgcacccatcatgctggacctagcgctgctgaccgagctgtgccagcgcgtgagtttctgcactgacatggaccccgagccgcagaccttccaccccgtgctgtccctgctcagcttcctcttcaaggcgccactagtgccgcccggcagcccggtggtcaatgcgcttttccgccagcgcagctgcattcgagaacatcctcagggcctgcgtggggctnccgncacagaaccacatgnttcctgggaacacaaaatggagcgnccagggnccagctttaaagcgagttggaaccctgggtt

SEQ ID NO: 261897 - DNA, 1438 bp, Homo Sapiens
  misc_feature (524)..(524): n is a, c, g, or t
caaagcagaagcctttctgaagaagctggggctgattagccgtgatcctgcagcatatcctgacatggagtctgatatacgttcatgggaattgtttctttctaatgttacaaaagaaattgagaaagcaaagtctcagtttgaagaacaaattaaggcaattaaaaatggttctctggctcagtgaactttctaaagtgcagatttctgagctttcatttcctgcctgtaacacggttcatcccgagtttactccctgagtcttcaggccacgatggccaagggcttgtgacttctgcaagcgacgtgactggaaaccacgcagcacttcacagggatcctagtgtgttctctgctggtgatttccccaggggaggctccttctgcgctgttgcccagggccaaccccctggtcagcctgaagccactcagctgacagggccaaaacgggctggcccaggcagctctgtcagaacgaaagccctgtggctgatcggaagcagcctgttcctcccaggaccgtntgcgcagttcaagccagtctccaaaaaagccgttcaatagtattattgagcacctgtcagtggtattcccatgttacaacagcactgagcttgctggttttattaaaaaagtgcgaagcaaaaacaagaactcactctcaggattgagtattgatgaaattgtccaaagagtgacagaacacattctagatgaacagaaaaagaaaaagccaaacccaggaaaggacaagaggacttatgagcccagctctgccacccccgtgaccaggtcctcccagggctcaccctcggtggttgttgcaccatcacccaaaaccaaggggcagaaagcagaagatgtccctgtgaggattgcactgggtgaaagttcctgtgaaatatgccacgaggtgttcaaatcaaaaaacgtgcgtgtgctcaaatgtgggcacaagtatcacaaagggtgctttaagcagtggcttaaagggcagagcgcttgcccggcctgccagggtcgtgatctcctgacagaagagtcaccttctggaagaggctggcccagtcagaatcaggagctgccttcctgctcttctaggtagtcacacttcactaaagtgtcatccaccagtgtgttgaatccgaagaatgacaattttctaccactggtgtaaaaaacaaacatttgaagacccttgtgcattgtgtgtcacaaagctaaatacatggaaatcgttaatatcgctgatattaagtaatttccccactctgagtgaatactttgatgattgccaacagtggctaataaaatgacggctaccacactcatgggtcgcttgggctgtgcagggctctttgaggtgggtagtttcttttggaaagtactgtgagcgcctcaaagcagtattctagtgataagaattcttaacatattc

SEQ ID NO: 261898 - DNA, 619 bp, Homo Sapiens
gatagaaactgctaaaaagcggctggtacggtccggaatgccccgggatatcgtcgacccacgcgtccggaaaggcaaaatagccataggacttctagaattcgtggaagatgttttccatggcccctacggaaatttcctcatgtgcgatactagtgccaaaaacctaggatataatgataagtatgatttgaaaatggtggatatgagaaaaattgtgccagagacaaacctgaaagaacttattaaggatcgtcactgtgagtctgatttggactgtgtctatggcacagattgtagaactagctgtgatcagagtacaatgaagtgtacttcagaagtgatacaaccaaacttggcaaaagcttgtcagttactcaaagactacctactgcgtggtgctccaagtgaaattcgtgaagaattagaaaagcagctttattcttgtattgctctcaaagtcacagcaaatcaaatggaaatggaacattctttgatactaaataacctaaaaacattattgtggaagaaaatttcctacactaatgactcttagttcatttggacataattaccattttaagaaacctgccacttttaaagaacaattttgagcatt

SEQ ID NO: 261899 - DNA, 538 bp, Homo Sapiens
acactcggggtgtgaaccacttgtgcgtattgacgtcaaaggcatagagcacattgcaggccctttcggtgtcattccgcccgccccaaaggaggactgtgtcgtcgatgagcacggttgagtgtccatagcgcatgtagggtaccacaggagcttgcccacggatggcagacttcaccgggggcagctttgtccaacgcaaggacactgcattgaaaatgtgcacatctatctgacgcagtgtctcatagtcttcaccagagcagtaacccccgaaggagtatacccgatgcccgacagccactgcagcatggttcaccctgcggggcccgccctccaggtgcactgtccaccgtaacatcccctgggccactggttacagcaacatgcccccccggcacggcctgctgcctctgctatctgccaggccgagccggggcggggccgcgggtcctcgagctgcctgcagcctagaacccgttgcgcgccaaccgacgccttcctcgtgccgaattcgccacccaggcctcgctaccta

SEQ ID NO: 261900 - DNA, 1272 bp, Homo Sapiens
cttgggaactttgtcgtttccggcgctggctggctggctggctgtaaagcactgaagccccccggccgccaacccctgaaagcagaacctggcctccctggccacagcagccttacccaccgctctacgtgtcccgggcacttcccgcagccttcccgtccctttctcatcggccttgtagttgtacagtgctgttggtttgaaaaggtgatgtgtggggagtgcggctcatcactgagtagagaggtagaatttctatttaaccagacctgtagtagtattaccaatccagttcaattaaggtgattttttgtaattattattattttggtgggacaatctttaattttctaaagatagcactaacatcagctcattagccacctgtgcctgtccccgccttggcccggctggatgaagcggcttccccgcaggccacccacttcccagtggctgcttcctggggacccagggcaccccggcaccttcaggcacgctcctcagctggtcacctcccggctttgccgttcagatggggctcctgaggctcaggagtgaagatgccacagagccgggctcccctaggctgcgtcgggcatgcttggaagctggcctgccaggaccttccaccctggggcctgtgtcagccgccggccctccgcaccctggaagcacacggcctctgggaaggacagccctgaccttcggttttccgagcacggtgtttcccaagaattctgggctggcggcctggtggcagtgctggagatgaccccgagcccctccccgtggggcacccaggagggcctgccggaatgtgcagcctgtgggtagtcggctggtgtccctgtcgtggagctggggtgcgtgatctggtgctcgtccacgcaggtgtgtggtgtaaacatgtatgtgctgtacagagagacgcgtgtggagagagccgcacaccagcgccacccaggaaaggcggagcggttaccagtgttttgtgtttatttttaatcaagacgtttcccctgttttcctataaatttgcttcgtgtaagcaagtacataaggaccctcctttggtgaaatccgggttcgaatgaatatctcaaggcaggagatgcatctattttaagatgctttggagcagacagctttagccgttcccaatccttagcaatgccttagctgggacgcatagctaatactttagagaggatgacagatccataaagagagtaaagataagagaaaatgtctaaagcatctggaaaggtaaaa

SEQ ID NO: 261901 - DNA, 440 bp, Homo Sapiens
tgccccctgtccgtggaacctggggtccgtgaacctggtgccccgtcccacgcaggtgtgtggtgtaaacatgtaatgtgcctgtacagagagaccccgtgtggaaagagcccgcacacccagcgccaccccaggaaaggcggagcggttacccagtgttttgtgtttatttttaatcaagacgtttcccctgttttcctataaatttgccttcgtgtaagcaagtacataaggaccctcctttggtgaaatccgggttcgaatgaatatctcaaggcaggagatgcatctattttaagatgctttggagcagacagctttagccgttcccaatccttagcaatgccttagctgggacgcatagctaatactttagagaggatgacagatccataaagagagtaaagataagagaaaatgtctaaagcatctggaaagga

SEQ ID NO: 261902 - DNA, 1180 bp, Homo Sapiens
  misc_feature (1102)..(1102): n is a, c, g, or t
gggagtcacggtgaggcgactggacccacactctcttaacctgccctccctgcactcgctcccggcggctcttcgcgtcacccccgccgctaaggctccaggtgccgctaccgcagcccctccatcctctacagctcagcatcagaacactctctttttagactccgatatggggtcctccaagaaagttactctctcagtgctcagccgggagcagtcggaaggggttggagcgagggtccggagaagcattggcagacccgagttaaaaaatctggatccgtttttactgtttgatgaatttaaaggaggtagaccaggaggatttcctgatcatccacatcgaggttttgaaacagtatcctacctcctggaagggggcagcatggcccatgaagacttctgtggacacactggtaaaatgaacccaggagatttgcagtggatgactgcgggccggggcattctgcacgctgagatgccttgctcagaggagccagcccatggcctacaactgtgggttaatttgaggagctcagagaagatggtggagcctcagtaccaggaactgaaaagtgaagaaatccctaaacccagtaaggatggtgtgacagttgctgtcatttctggagaagccctgggaataaagtccaaggtttacactcgcacaccaaccttatatttggacttcaaattggacccaggagccaaacattcccaacctatccctaaagggtggacaagcttcatttacacgaatatctggagatgtgtatattgggcccgatgatgcacaacaaaaaatagaacctcatcacacagcagtgcttggagaaggtgacagtgtccaagtggagaaacaaggatcccaagagaagccacttttgtcttaattgctggggagccattaagagaaccagttatccaacatggtccattttgtgatgaacaccaatgaaggagatttctcaagctaatcttgatttcagaaacgcaaaaaaatgggtttgaaagggccaaaacctggaaatcaaagattgggaactagtggaaagcggaagagcaggaagaaagacctagaaggttgtagatgggaaatcanggatgatttgaactgataaagatttcagactcataagaacacattttataaatggttaaacacaaaactacatggacg

SEQ ID NO: 261903 - DNA, 542 bp, Homo Sapiens
aaacattcccaacctatccctaaagggtggacaaccttcatttacacgatatctggagatgtgtatattgggcccgatgatgcacaacaaaaaatagaacctcatcacacagcagtgcttggagaaggtgacagtgtccaggtggagaacaaggatcccaagagaagccactttgtcttaattgctggggagccattaagagaaccagttatccaacatggtccatttgtgatgaacaccaatgaagagatttctcaagctattcttgatttcagaaacgcaaaaaatgggtttgaaagggccaaaacctggaaatcaaagattgggaactagtggaaagcggaagagcaggtcttgatgtgtcctagaattttgccatttctgagattgagccattgaaggcattccatttctaaagcttatttagccggtgcttctaaagaattgcacactaacgtgataacatggtttttgtaacaataaatgtaggatatttcctggcacatgcaaataaacctaatcattgtttctttaaaatttta

SEQ ID NO: 261904 - DNA, 517 bp, Homo Sapiens
tccgtacaactcatcaatgtagatctggtacaggcactgctcctttgagatgccggcaaagtcgttctgcaccaggcctctgtagcgctcgtagttacacttccgttcgtccgactcctgttctggggagatggtggtgagcagagggggggtgtagtcggggatgtggtccaggtgggcacggacatcgaatcggtcaatcatgttgttggtgtccccctgccagggcatcatattaacagggctctcagcggccagggcgactgcagaatccaggtgcaccttgcaagctcggccatgtacctgcaggaactgggctgggtccttcttgatcttttcataatactcccgtctccgctccgccctcttcttgtagtcgaccatcatgcctcgaagcttccgctcatgcttccgagcctcgtgccacattgtggtgaggccaagcctggggcctcaaccggctggtcgccgcctcccaccgctgcgctcgcgcgcggccgtcactggaagcggaaat

SEQ ID NO: 261905 - DNA, 1027 bp, Homo Sapiens
  misc_feature (711)..(711): n is a, c, g, or t
aagcgcgtgcccatgtagagaacacagagcggttgattgaaatcgcatccagagaacttgagaaagcaaaagtcgctgctgccaatgtgtcagtcactcagccagaatctacaggggacccaaacaacatgactcttttggcagaagaggctcgaaagcttgctgaacgtcataaacaggaagctgatgacattgttcgagtggcaaagacagccaatgatacgtcaactgaggcatacaacctgcttctgaggacactggcaggagaaaatcaaacagcatttgagattgaagagcttaataggaagtatgaacaagcgaagaacatctcacaggatctggaaaaacaagctgcccgagtacatgaggaggccaaaagggccggtgacaaagctgtggagatctatgccagcgtggctcagctgagccctttggactctgagacactggagaatgaagcaaataacataaagatggaagctgagaatctggaacaaccgattgaccagaaattaaaagattatgaggacctcagagaagatatgagagggaaggaacttgaagtcaagaaccttctggagaaaggcaagactgaacagcagaccgcagaccaactcctagcccgagctgatgctgccaaggccctcgctgaagaagctgcaaagaagggacgggataccttacaagaagctaatgacattctcaacaacnctgaaagattttgataggcgtgtgaacgataacaagacggccgcagaggaggcactaaggaagattcctgccatcaaccagaccatcactgaagccaatgaaaagaccagagaagcccagcaggccctgggcagtgctgcggcggatgccacagaggccaagaacaaggcccatgaggcggagaggatcgcgagcgctgtccaaaagaatgccaccagcaccaaggcagaagctgaaagaacttttgcagaagttacagatctggataatgaggtgaacaatatgttgaagcaactgcaggaagcagaaaaagagc

SEQ ID NO: 261906 - DNA, 603 bp, Homo Sapiens
  misc_feature (382)..(431): n is a, c, g, or t
cagttctcccagtaatgcccatgctagccccaggctcgatgccaggagggaagtgcattccttactgagggagggcatcaggcgtgggtcttccacggaaccccaataggaatcagcaacccccaagcagatattactcaaaggtggtattacatacaacagtagtcagactcagacttcaagcagcccaaagagtggaaccacaggcttgcacaattataaaatgtttttatttcaattacataataacacgttttcctcaaattttattgaggttttggtctttttgcattcaattctatcttgtaacagtaatatgaatccacataatttcataaaatgtcaacaacattcagaaggtacattcctttgtgattttatnnnnnnnnnnnnnnnnnnnnnnnnnnnnnnnnnnnnnnnnnnnnnnnnnntatagaaaacagatattttcttcaggcagatcaaaacaagaattttccagtaagaatatactgggacataacaaatgaaaatatttataccaaaataccaaaagtgattcagctctttaaaatatcctactatagtctaattagtagcttgtacaagaacaagtaaccatcc

SEQ ID NO: 261907 - DNA, 1478 bp, Homo Sapiens
  misc_feature (1239)..(1239): n is a, c, g, or t
tggcgcccgcggcaggcggcggccatgaacttctccgaggtattcaagctctccagcttactctgcaagttctccccggacggcaagtacctggcttcctgtgtccagtaccggttagtggtccgggatgtgaacacccttcagatccttcagctgtacacgtgcctagaccagatccagcacatcgagtggtcggcagactcgctcttcatcctgtgcgccatgtacaagcgagggctggtgcaggtctggtctttagagcagcccgaatggcactgcaaaatagacgagggctcagccgggctggtggcctcgtgctggagcccggacgggcgccacattctcaacaccacggaattccatctgcggataaccgtctggtccttgtgcacaaaatccgtgtcttacatcaaatacccgaaagcttgtctgcagggaatcaccttcaccagggacggccgctacatggcgctggcagaacggcgcgactgcaaagattacgtgagcatcttcgtctgcagtgattggcagctcctgcggcattttgatacggacacccaggatctcacagggattgagtgggccccaaacggctgtgtgctggcagtgtgggacacctgcttggaggtgcgcatccttaatcacgtgacttggaaaatgatcacggagtttgggcatcctgcagccattaatgatcccaagatagtggtgtataaggaggccgagaagagcccacagctgggactgggctgcctctccttcccgccgccccggggccggggccggcccctctcccgagctcagagaagtaaatatgagatcgcctctgtcccagtctccttacagacactgaaaactgttaccgacagagcaaacccgaaaatcggcataggaatgctggcatttagtcctgacagctacttcctggcgacaaggaacgacaacattcccaatgccgtctgggtctgggacattcagaagctgaggctgttcgcggtgctcgagcagctgtccccagtgcgcgcgtttcagtgggacccgcagcagccgcggctggccatctgcacgggaggcagcaggctctacctgtggtccccaacgggctgcatgtcggtgcaggtccccggggaaggcgactttgcagtgctctctctgtgctggcatttaagcggagactcgatggccctcctcagcaaggatcacttctgcctctgcttccctggagacagaggcagtggntcggcacagcctgcagacagctgggcggccacacgtagcagcggtgcactaacgtgtgcagaaacagggctactctgtgtttccagtgtgggaaaaaacacagcttcaccaggaggttctccactgtggtggtctggattcagtgattgattctatttttctatagcaaagcatttttgtaaatatgtatggtataaaactgtagttttattatttaaaataaatacttgctgatttat

SEQ ID NO: 261908 - DNA, 1143 bp, Homo Sapiens
  misc_feature (164)..(164): n is a, c, g, or t
  misc_feature (321)..(321): n is a, c, g, or t
gagaggtaaattcatcaggatttaagttaggggcttattaggatggtaaaaggaaaatttgaaaattggagaatcctttcatttaacaggagttactaaatgccccattatatgttaggccgccgtttcttgttcccccttagtaccaaaaggccaaaaattanctaggttatttcacatttaacagtccttagaatgttgactgatagatatttttcccaagtatctttagggttgttcggttctggggggtatctaaacaaaaaatactctgacaacatttagtaaattcatttgttcctttcttgaatacaaacattntagaaaattccaacttcttttgtaggtcactgctaaattttgtatgctgagattgagacacttactagttatcaggtactgaccctggccacctcccagaattgtccatatgcctgggaagcagtgcctgccattgtgctggagtagcctccttgcagcacactttgctgtaatactctccaaaccaattttctctaatgctatgtgacctatattaaggtagggcattccaatatatcctccaattttggtgaatacaattgaatggttctcaacaatgaatagtttggcacacttttatttgggggaggtggggtggtcacaatgactagcatcagtgggtaagggccagaaaggctaaatgaatcctgcaatgggatgacaggtttttatcctaaagaactgtctcactcaaaaggccaatagtgactgtccatggagggacactcagctgttgtcacctggtacagtaacaaagacagaagcttcactttactcatgtaattttttctactagacaggaagataatttttgcattttattaaaatatatttatatgccacaaaaaattattttagtgacaactaccaggaaagtacaaaatcacttaataactggttttctacaccttgatttgtcaagaaactcataagcaaatggaaagtagtaagtactgattgcagttacttacagcaaacagttttgagaagaagaagaaaacctgtaacactgaaaattgctttatatcccattcatagatctcttcaaaaggtctactttaaaaataaatcacataaagaattgttcagacttgtttggtg

SEQ ID NO: 261909 - DNA, 1167 bp, Homo Sapiens
  misc_feature (842)..(842): n is a, c, g, or t
  misc_feature (876)..(876): n is a, c, g, or t
agtcccctcgctgtagtcgcggagctgtgtctgttcccaggagtccttcggcggctgttgtgtcagtggcctgatcgcgatggggacaaaggcgcaagtcgagaggaaactgttgtgcctcttcatattggcgatcctgttgtgctccctggcattgggcagtgttacagtgcactcttctgaacctgaagtcagaattcctgagaataatcctgtgaagttgtcctgtgcctactcgggcttttcttctccccgtgtggagtggaagtttgaccaaggagacaccaccagactcgtttgctataataacaagatcacagcttcctatgaggaccgggtgaccttcttgccaactggtatcaccttcaagtccgtgacacgggaagacactgggacatacacttgtatggtctctgaggaaggcggcaacagctatggggaggtcaaggtcaagctcatcgtgcttgtgcctccatccaagcctacagttaacatcccctcctctgccaccattgggaaccgggcagtgctgacatgctcagaacaagatggttccccaccttctgaatacacctggttcaaagatgggatagtgatgcctacgaatcccaaaagcacccgtgccttcagcaactcttcctatgtcctgaatcccacaacaggagagctggtctttgatcccctgtcagcctctgatactggagaatacagctgtgaggcacggaattgggtatggggacacccatggactttcaaatgctgtgcgcatggaagctgtgggagcggaatgtggggggtcatcgtgggcagccgtccttgttaaccctgattctcctgggaantcttgggtttttggcatctggttttgcctatagnccgaggccaatttttgaacagaacaaaggaaagggactttcgagtaaggaaggtgatttacagccagcctagtgcccgaagtgaaggagaattcaaacagacctcgtcattcctggtgtgagcctggtcggctcaccgcctatcatctgcatttgccttactcaggtgctaccggactctggcccctgatgtctgtagtttcacaggatgccttatttgtcttctacaccccacagggccccctacttcttcggatgtgtttttaataatgtcagctatgtgccccatcct

SEQ ID NO: 261910 - DNA, 134 bp, Homo Sapiens
gggtctcacaagacatggggcatctccacaaatttaagttcctgtccatttggaaatttgtttctatgtgtacagtttgtcagagaaaaacaaagtttttgtatgaatacagaatgtgatttacgcaagaaaaa

SEQ ID NO: 261911 - DNA, 635 bp, Homo Sapiens
  misc_feature (20)..(20): n is a, c, g, or t
  misc_feature (47)..(47): n is a, c, g, or t
  misc_feature (68)..(68): n is a, c, g, or t
cccctaaaagaggaaggctnattgcccctcttgctttcaaaagcccnaagtggttctaggactctttnaagtgcctcatagggaggacgaagacaacactcacgctgacccagggccactgggaagaactgcggctctcctccctgcttccctcccatctgtcctcttctcagcctcgaggccactcagagttctggctccctcccggccactgccccatttcactgcgaggcaaatcaaggccaggaaaaggcaaggttctcccctcggccaaagcctggacccctgactgctgggcccaagagctccagctacggagaggtagcttcggtacagaacacggagaacccaaaggttggtactgctgccagttccccacgtggcccagccccacccacaggctctcctgggcccaggaatgtcctgcaggagggaggagtcggtttccaatgccagccgccctaacaacccaggaactcagctcaactggttacagacctcgaattttcagcccatgttacttgaaggagaagcagttcttgggctttaccacctgccacctgggccagagttctcttatccttatcctaagagtctttaagactcaaagaagaaaaggtcttgtctgatgtata

SEQ ID NO: 261912 - DNA, 922 bp, Homo Sapiens
agagagagctgtggttgccggaagttgagcggcggcaagaaataatggcggcagctacgggggatcctggactctctaaactgcagtttgccccttttagtagtgccttggatgttgggttttggcatgagttgacccagaagaagctgaacgagtatcggctggatgaagctcccaaggacattaagggttattactacaatggtgactctgctgggctgccagctcgcttaacattggagttcagtgcttttgacatgagtgctcccaccccagcccgttgctgcccagctattggaacactgtataacaccaacacactcgagtctttcaagactgcagataagaagctccttttggaacaagcagcaaatgagatatgggaatccataaaatcaggcactgctcttgaaaaccctgtactcctcaacaagttcctcctcttgacatttgcagatctaaagaagtaccacttctactattggttttgctatcctgccctctgtcttccagagagtttacctctcattcaggggccagtgggtttggatcaaaggttttcactaaaacagattgaagcactagagtgtgcatatgataatctttgtcaaacagaaggagtcacagctcttccttacttcttaatcaagtatgatgagaacatggtgctggtttccttgcttaaacactacagtgatttcttccaaggtccaagggacgaagataacaattgggtgtatatgatccctggtaacttaaccccagtaccctgggatgggccttttgaggaaattttttggtcctagcagccccacagatgggagtagcagtttttccaatcctggtggaagttggtttgctttccgtgaccgttaccattggcagggggccgaaaaaaactttgcccccccagcattcatcc

SEQ ID NO: 261913 - DNA, 733 bp, Homo Sapiens
tagtcacaactatggggctgctttcaaaagcggggctccatttctactgtcagatcaatgtggtgctgtaaccatctttttatccctaccttcaagaacctccttatatgaagcctgtctttatccatcagaaggtgtgtgaaatcatcacttccttctggttttatgtatttgtagactatgcagcttttcattaaactgcaagtatatacaagacagatctgaaattaggcctgagtgttccgatccaccactgtactagtaaataaaaatccacctaccttttatgtggaaaattatgtgctattgagtaacttttagctcttttttaaaaaatgggtgaaatttaagtgtcttttttatgagaatgacacatgaagagatctgagagcaatctcatgtagtcttccatgaacctgcaattgtttggtatgcgtcagcattttccaatttccaggttggatctagagctgctgttgatcactcaggcatactaatggattcatttagatgggtccaagctgcagtccatgagcaataacagactaccccagatactgcagtttacgcagtgcttagtaaatgagatttgtggaactaagttattagttacctgaggcttcttaagaaagtcttcttttttgaccagttgatgtgaaagagggagcatgtgacacagccagtatggtggagtgctagggttatcctgtttacaataaatcgcctgaattcc

SEQ ID NO: 261914 - DNA, 524 bp, Homo Sapiens
ggaaacgcagagcgcgcgctccaggtaaaggctgctgcgcccaggacagggttctcacggtggaggaaaggacttctgcgggataccacgctgtgcgccaaaaagccgggcggcttcggagccagagcagcggctctgcggcgcaggcggcgggtcggggcagccttgaagccgggatccggcccgaagggtgagcaccagctcgtctccggtgggcgccgccttcaatgtcaagttccagggcagtcgcttggacccgtttggcgagcgcggagtgagcggcgcaagaggagctcccctaggtcccggaagaaagccggcccctgctccgcgcggccagcgacactcagagcgagattgtttgggcctgggaggaggcaggcagcgaacccaacttgtacagtggggtcttgtgtgcgctctcagtgacagggtctttttggagttcctgagctcagtgccccagaaggcacatacttcatatgaaatatgaaggatttcatactgcacaagaaaaagccttg

SEQ ID NO: 261915 - DNA, 872 bp, Homo Sapiens
  misc_feature (651)..(651): n is a, c, g, or t
  misc_feature (693)..(693): n is a, c, g, or t
  misc_feature (696)..(696): n is a, c, g, or t
  misc_feature (740)..(740): n is a, c, g, or t
  misc_feature (788)..(788): n is a, c, g, or t
  misc_feature (811)..(811): n is a, c, g, or t
  misc_feature (826)..(826): n is a, c, g, or t
  misc_feature (853)..(853): n is a, c, g, or t
ggtctcggttagcttcacttaagcgggaacctgcccactaaggaggccgattctttccggctcgagcaggtccggacccgcccctctggcgtctagcagtctcggaggcctgcccgtatagttcagggccggacagcgagcggcggcgacttgccagtaaggtttggctccagcagctgctgttgccaccaccactagttcaagcaccatgcagtttacctcaatatcaaattctttgacctccactgctgctattgggctctcatttacaacttcaacgactaccaccgccactttcaccaccaacactactaccacaatcaccagtggctttactgtgaaccaaaaccaactgttatcaagagggtttgaaaaccttgtaccttatacttcaactgttagtgtagtagcaactcctgtgatgacatatggtcatctggagggtcttataaatgagtggaaccttgagctggaagatcaagagaagtactttcttctccaggccactcaggtcaatgcttgggaccatacattgattgagaatggtgagatgattcgtattttacatggagaagtgaacaaagtgaaactggatcagaaaagattggaacaagaattggattttatcctgtcacagcagcaggaactagnaatttctgttgacttatttagaggagtctacgcgcgaccagngtngacttcattatctgcaggatgcgatgaggagcatgtggagaccnccaccagatctgcagaattctgaatgcccatatggactccctgcagtngattgatcggaatttcaggcatnctgcgaaggaaggtngaagtggtaacacgggtttttcgaggnttattcttcacgagggagt

SEQ ID NO: 261916 - DNA, 715 bp, Homo Sapiens
actcgactcactggtgcgcgatttaggtccggaggaggcgttgtgaggtgagctttttcagaagcgcgatcccaggacacgtcgggaagcaagcatccccagagctgcttggaaagaggaccaaagacgtctaaaaagtcatttggaaatatctctaaatatttgttaccatgtataagctgctaaagagaaattgggcccaacaaaactaattgaataattgaggcagatttgtgtgtatcatcaaattctatccagaagttgaagaatctgaatttaaagattgtgtgcatttaataagaggatgacctttcagtttaatttcactatagaagaccatctggaaaatgaattaacacccattagagatggagctttgaccctggattcctcaaaagagctgtcagtctcagaaagtcaaaaaggagaagagagggacagaaaatgttctgcagaacaatttgacttgcctcaggatcacttgtgggaacataagtcaatggaaaatgcagctccctctcaagacacagacagtccacttcagtgcagccagcagttcaaggaacttgggagccacatgggaaaacagccctccttggagagctggccaaaggagcatgctatgccttaaaggtttaaagaagatgtttaggaaattaaagttcttaggaaacatttaccagggttttccagccttgtttaagtttttcagtta

SEQ ID NO: 261917 - DNA, 801 bp, Homo Sapiens
ggaaggggaaaggatttaacatttagaataaaccccaccatttatgtaatggaaatagtttaaaaattgctaactgccatgtggattgcaaattaaatggaaacttatttagataacgtaaggctcaatatctgcgttgaccacctagatattacaggttttaatatttaaaactatttttgaattatccacaacctgtatagtgatagccatatatttaataatggaatggtggttaacagtctatttactgcacaattaattgttcactaatcaaatagaatgtggtaatttttcagactttatgatctgtttccaaaattggcacaaagtgctagggtttatatacacttatcgtaactgtatttttgtgccttggttttatcatgtcaatgcactgtactctgtaaaagttttgcagacaaaatagaaagtatgataatccgtcagaagtatgatgtaaaactggaatcctctgtattttttaaatgttctaaaaattttatcgctgttaaagtattaatcattcagtattactaatggaatagaaattcatacttttgtatggacaacaattcaaattgatattgcatttatagcactgtaagaaactttcatcttgagcaactttgtagatgatgggtgtattattttcaatcgccatatttgatcagtcattgaaaattggccccagtgctgttggttcatctctgtatgtaaaaactgacagtgagacacaacgttctgaactgtgaaggtgtcccaggaaaaagaaaaacaggaatactttaacaattaaaa

SEQ ID NO: 261918 - DNA, 703 bp, Homo Sapiens
  misc_feature (506)..(523): n is a, c, g, or t
aaaaagagtcatttaataccttaagggagagtaggaactttcagttacctaagactacagccaacccccagcccagaacaaaaacaagacaccttaatgtttgttcaaagacaaacccacagcgaacggctctcgcacccctgctctaactcctctttctgggggaggaaggagggaagggccaggtccgcggggaccctcactccctgctttctatcacacgggtcacaaggcagctctcagagcagaaggcacagacactgcagtggaagttgagaaaggaagtcactccaaggtacacactggcccaaagaccaggaaaccgtgccacggagctggaaggcaaggccgatgggacggtgcaaggaccacgcccacgatagcgcctgccgccccgaagggcctcgtgacacatcaggtcacatctccagtcaccttatttgtacacagttctctcctggaaaacctttcatttcttaagagtaaatgtgactagttagaggctnnnnnnnnnnnnnnnnnngaaacaagagaccctgcccccgcaaaacggaattagaaggaaaagtacatctcagtgaaaccttgttacaaatgccaaggtttcccaggcctgtttccagggagagtagaaatcttcctccacttccacgtaactcactgaattataatttttatagaaaattttattcaacatacaaca

SEQ ID NO: 261919 - DNA, 833 bp, Homo Sapiens; identical to SEQ ID NO: 15143
  misc_feature (785)..(785): n is a, c, g, or t

SEQ ID NO: 261920 - DNA, 1405 bp, Homo Sapiens
ggggtcgtcgatacctctggctgaaggattgcaaaattaatttagcttctaagaataagctggcttccactccctttaaaggtggaacattatttggaggagaagtatgcaaagtaattaaaaagcgtggaaataaacactagtaaaattaaggacaaaaagacatctatcttatctttcaggtactttatgccaacattttcttttctgttaaggttgttttagtttccagatagggctaattacaaaatgttaagcttctacccatcaaattacagtataaaagtaattgcctgtgtagaactacttgtcttttctaaagatttgcgtagataggaagcctggtacaaacaatttaacgctttctagatcacatattagtctctaagttgttttctgtttcctgctttacttatgtttttacaattctccaaaactaagaaaattctaattaggatataaggagtatttactgttcaatagaataatatgcatcctcctttatacctaggacagaattaaacatttgttacacattcagaacagtgatgttgttctttttgatacttttatctcagtatcttttcacgttccataacttgtccatatttttgctcatattttcttacttttctttgttatttattcatgtctgcaacatcaatcatagtagtctagatcaatgcaactcaaagcaccagtctacaaactgttacttatccacaggcaagataagcatgcacaagaatttaaatctagagatactttttaggtcaatgacaggatttgattttttagcaaaattttattaatagctaaagcaatgtattgatttacactctgatgcaagtaatttatctcttcattgactggtagcaaccaattcatggaccagtaccatggaccacactttgagaaacacttctttggataataatagatatcctgggatagtgcatgttcaccatctattttgtcagataatggggccttttaaaaaataatactttgctttcatgatatattgtattttgtggaaagttaagtttagcaatatagactctaaaagcaaattaaatttttttaagccataagaaattatactatatcccagcatctggatggctgcataaagcagtgtattatcatgttttcatttctgtgattgtaagttaagagtcttaactgcagaggtattgtggaaagtagtagccttaagcataataaaatatggtctcttgggtactccctctggccattaccacattcttagcatatatgatgtccatctttgcagctttctgagagtaattttatctggttgtctttctgaaatgtacatggtatacatggtacctactggaatgggtatgttgattttttaaaaatgatattactgctaaaa

SEQ ID NO: 261921 - DNA, 1351 bp, Homo Sapiens
  misc_feature (899)..(899): n is a, c, g, or t
  misc_feature (1022)..(1022): n is a, c, g, or t
  misc_feature (1149)..(1149): n is a, c, g, or t
cggagccctggggttgggcagcactcggttccgtgcaactttcaagtgagttgcgaactccgccctgtaggccggtgctggtggcccggcgcgctggaaccgcggcgacccgctccagcgcgggaccagcagcaagggccgagcgccaggttctccgcggcagaaagggcgggtgggagctgtaactgccccggccgcggggcgcgcccgctcccaagtcggcttcctccccgccggggccgctttgcctcgggtctccccattctccaggtcccctgaactgcacagtcggaggccgtgggcggcgggctctgcctccgccgagggacagccggatcgcccctctgcttcccgcaactgccctgatcaccccccgtcccagcccttgagtgaacgtccttctgagcggcttcctggggtcctccccacgtcccaaaggccggcaagatggtgtcctggatgatctgtcgcctggtggtgctggtgtttgggatgctgtgtccagcttatgcttcctataaggctgtgaagaccaagaacattcgtgaatatgtgcggtggatgatgtactggattgtttttgcactcttcatggcagcagagatcgttacagacatttttatctcctggttccctttctactatgagatcaagatggccttcgtgctgtggctgctctcaccctacaccaagggcgccagcctgctttaccgcaagtttgtccacccgtccctgtcccgccatgagaagagagatcgacgcgtacatcgtgcaggccaaggagcgcagctacgagaccgtgctcagcttcgggaagcggggcctcaacattgccgcctccgctgctgtgcaggctgccaccaagagtcagggggcgctggccggcactgcggaacttnctccatgcaggacctgcgctccatctctgacgcacctgcccctgcctaccatgaccccctctacctggaggaccaggtgtcccaccggaggccacccattgggtaaccgggccgggggcctgncaggacagcgacaccgaggatgagtgttggtcagatactgaggcagtcccccgggcgccagcccggccccgagagaagcccctaatccgcagccagagcctgcgtgtggtcaagaggaagccaccgngtgcgggagggcacctcgcgctccctgaaggttcgggacgaggaaaaagactgtgcccctcagacgtggacagctagggtctgctgcatctgcccccctttcttacctcgtgcccctgcaggggctccaagggctatttgggagggacctttggggctgcacattctgggcctggccttgcaccaactggcctggggccccc

SEQ ID NO: 261922 - DNA, 588 bp, Homo Sapiens
atgtgcggccacagttgctcctgcagcccccagtccagcaccttcgcgcgccgcatcgcctcggccaggttcagcgacgagatgtcccagccatcgaacacgaggtcgttgggcgccaccatgggcagcaccgcgctgaagggtacgaacacctcctggccctcggcgtccaggcccaggctcacggtgcccgcctgagtcagcgagccgtagtagttggcctccttgcggccgctgcgcgtgggccaggacaaacgcagtcgattggccagcaccgcggcggtgagtgtggagccgttgttcccgccccagccgacaagcatgaccccgagccggggcacctgccgggcggtccggaaggtgaagcgcgtggacgtggggtgcaccttgagaacgccaccctcgcggctgacgcgcgtcgtccggtactcgtattgcgcctcgatggcctcggggccgtagaccacgtccgggctctcgacgaagaactgggcggcggcctccatcgcggcgggcggcgcagagtcgactcaggcagcggcggcggacagcgcgggctctcgggcgcgcgacctccggagaaaaaaa

SEQ ID NO: 261923 - DNA, 793 bp, Homo Sapiens
  misc_feature (382)..(390): n is a, c, g, or t
  misc_feature (618)..(642): n is a, c, g, or t
  misc_feature (706)..(729): n is a, c, g, or t
ttaaacattaactaggctgtataaagaacatttattccttcaaaagaaaaaaatttacttctggttgaaattacaatttacaatatacaacactatatgctacgaccataaaaggtgagaatatacactgaatgcacagggctggctaattctcttttcttaccaaaaaacgtgtttatgttgattcaaacttctccacatttacattacaggtatacaaatgtacaattgtacaatcaaaagtatgttcgactactagggtacattatagatacagattagacatcaaaacaagaaaatactacaaatttgtatatatgcaaagtctacaccaagtatacactatatatttatagaagcaagaccaaaagcagagttggannnnnnnnnctcatgctaaataatcagattttacctttcaatgttaatagaaaaaaatccagtaggcagtaaacaatcacacccgcccagcctcaaaagacgttctgggtgctcgcatctcctcctcacgaacagccttcttcagcataatatagtctccaaaaaaggcattttttagaatttcataaacttaatgtcacaaactgaagctttagcaactctgaaacctttttcacnnnnnnnnnnnnnnnnnnnnnnnnnttttttataaacagtgttaaatgccagtttggggtcatttaactacaattcaaacttctcaggnnnnnnnnnnnnnnnnnnnnnnnnactaaaatgaggaggtggggaagagctatttgcaaaacttgccggccaggcaaatgagctaaaa

SEQ ID NO: 261924 - DNA, 982 bp, Homo Sapiens
taatggtactcgaccaccactgataaaaaatttacctaagcccattgagagcctgatgactcgttgttggtctaaagatccttcccagcgcccttcaatggaggaaattgtgaaaataatgactcacttgatgcggtactttccaggagcagatgagccattacagtatccttgtcagtattcagatgaaggacagagcaactctgccaccagtacaggctcattcatggacattgcttctacaaatacgagtaacaaaagtgacactaatatggagcaagttcctgccacaaatgatactattaagcgcttagaatcaaaattgttgaaaaatcaggcaaagcaacagagtgaatctggacgtttaagcttgggagcctcccgtgggagcagtgtggagagcttgcccccaacctctgagggcaagaggatgagtgctgacatgtctgaaatagaagctaggatcgccgcaaccacaggcaacggacagccaagacgtagatccatccaagacttgactgtaactggaacagaaccctggtcaggtgagccagtaggtcatccagtccccagtgtccagaatgattactacctccaggaccaacctcagaaaagccaactcgaagtcatccatggacccctgatgattccacagataccaatggatcagataactccatcccaatggcttatcttacactggatcaccaactacagcctctagcaccgtgcccaaactccaaagaatctatggcagtgtttgaacagcattgtaaaatggcacaagaatatatgaaagttcaaacagaaattgcattgttattacagagaaagcaagaactagttgcagaactggaccaggatgaaaaggaccagcaaaatacatctcgcctggtacaggaacataaaagctttagatgaaaaacaaaagactttctacttactaccagcatgcaaaaaacactagaggtcatcagaagtc

SEQ ID NO: 261925 - DNA, 766 bp, Homo Sapiens
gggattgtgggaagcagccatggtctaagccgggcgcctcacctgtcagccgcaccggctccagcgctcgcctctcgccctcgcttctccagcgctccttgctcgcaaggcgggggaggcggcggcccagccacgatgatacatttcatattgctcttcagtcgacaagggaaattacggctacagaaatggtacatcactctccctgataaagagaggaagaagatcacccgggaaattgttcagattattctctcccgtggtcacaggacaagcagttttgttgactggaaggagctaaaacttgtttataaaaggtatgctagtttatatttttgctgtgcaatagaaaatcaggacaatgagctcttgacgctagagattgtgcatcgttacgtggagctgctggacaaatattttggaaatgtctgtgagctggatattatctttaattttgaaaaggcttatttcatcctggacgagtttataataggtggggaaattcaggaaacatccaagaaaattgctgtcaaagccattgaagactctgatatgttacaggagacaatggaagaatacatgaacaagcctacattttaactggaaatctacttgaagactccagcactacatgttatgaaagctggaaataagcaaacgctcccatccgggttttttgatggagccctcagcaccatgccaaaaataatttaaagggaatctttgttaacctaccaaagttaaagttgtttaacctattttataa

SEQ ID NO: 261926 - DNA, 1887 bp, Homo Sapiens
  misc_feature (1779)..(1789): n is a, c, g, or t
gggttcctggtgctaatgaaccgagtgctggcactgattgtggctggcctctcctgtgttctctgcaagcagccccggcatggggcacccatgtaccggtactcctttgccagcctgtccaatgtgcttagcagctggtgccaatacgaagctcttaagttcgtcagcttccccacccaggtgctggccaaggcctctaaggtgatccctgtcatgctgatgggaaagcttgtgtctcggcgcagctacgaacactgggagtacctgacagccaccctcatctccattggggtcagcatgtttctgctatccagcggaccagagccccgcagctccccagccaccacactctcaggcctcatcttactggcaggttatattgcttttgacagcttcacctcaaactggcaggatgccctgtttgcctataagatgtcatcggtgcagatgatgtttggggtcaatttcttctcctgcctcttcacagtgggctcactgctagaacagggggccctactggagggaacccgcttcatggggcgacacagtgagtttgctgcccatgccctgctactctccatctgctccgcatgtggccagctcttcatcttttacaccattgggcagtttggggctgccgtcttcaccatcatcatgaccctccgccaggcctttgccatccttctttcctgccttctctatggccacactgtcactgtggtgggagggctgggggtggctgtggtctttgctgccctcctgctcagagtctacgcgcggggccgtctaaagcaacggggaaagaaggctgtgcctgttgagtctcctgtgcagaaggtttgagggtggaaagggcctgaggggtgaagtgaaataggaccctcccaccatccccttctgctgtaacctctgagggagctggctgaaagggcaaaatgcaggtgttttctcagtatcacagaccagctctgcagcaggggattggggagcccaggaggcagccttcccttttgccttaagtcacccatcttccagtaagcagtttattctgagccccgggggtagacagtcctcagtgaggggttttggggagtttggggtcaagagagcataggtaggttccacagttactcttcccacaaagttcccttaagtcttgccctagctgtgctctgccaccttccagactcactcccctctgcaaatacctgcatttcttaccctggggagaaaagcacaagtggtgtaggctccaatgctgctttcccaggaagggtgaagatggtgctgtgctgaggaaaggggatgcagagccctgcccagcaacaccaacctcctatgctcctggatcccctaggctctgttccatgaagcctgttgcaggttttggtactttagaaatgtaactttttgctcttataattttattttattaaattaaattactgcaaaacagaggggggataagcgggggcaaaggactagagggagaccgggcggggctcggccagccgtgagggcgggccgagaggccggcgggatactcattcttcgtgtgggcggcccgcccctagggccgccccggagaaaaactttttttaaaaaaacccttttcctttgggggcggcgcggggggcccccgtgtgagggaaaaggggacacccggggggcccacacacgtgggtccttcccaaaagaagaaacccgcgggggcgcaggaaaacaaagggggggtggtggagttctcgccccccccctttatgtgaaaaacgccccccnnnnnnnnnnnataatacagaaaagggatttttgatacaaacaacattttccccagagcgggtgggcgcgtcctcccgtggagggtcactcttattacctggggcgatc

SEQ ID NO: 261927 - DNA, 1915 bp, Homo Sapiens
  misc_feature (883)..(893): n is a, c, g, or t
  misc_feature (1242)..(1242): n is a, c, g, or t
  misc_feature (1315)..(1315): n is a, c, g, or t
  misc_feature (1329)..(1329): n is a, c, g, or t
  misc_feature (1453)..(1453): n is a, c, g, or t
  misc_feature (1479)..(1479): n is a, c, g, or t
  misc_feature (1482)..(1482): n is a, c, g, or t
  misc_feature (1539)..(1539): n is a, c, g, or t
  misc_feature (1542)..(1542): n is a, c, g, or t
  misc_feature (1544)..(1545): n is a, c, g, or t
  misc_feature (1608)..(1608): n is a, c, g, or t
  misc_feature (1662)..(1662): n is a, c, g, or t
  misc_feature (1670)..(1670): n is a, c, g, or t
  misc_feature (1809)..(1809): n is a, c, g, or t
  misc_feature (1839)..(1839): n is a, c, g, or t
  misc_feature (1858)..(1858): n is a, c, g, or t
  misc_feature (1863)..(1863): n is a, c, g, or t
  misc_feature (1873)..(1873): n is a, c, g, or t
cattttggctccttcgcagcagaatatgtcaactcgttggcttctcacaaaatcaacgtttctgagattaagatggaagatattttgtgtgttctgacaagagatgattgttttaaagggaaacgacggggagcccagaaatcccatgctgttggcccccaggaaatccgagagcgagccacagtcttgcagacggtatttgaagattacgtgcactccagtgagaggagggtctcctgggcaaagaaagctctgcagtccttcatccaagcctacgccacctaccccagggagctgaagcacatcttccacgtccgatccctccaccttgggcatgtggcgaagagcttcggactaagagatgcccccaggaatcttagtgccttgactagaaagaagaggaaagcacacgtgaaaaggcctgaccttcataagaagacccagagtaaacacagcctcgctgaaatcctacgttcggaatactcaagcggcatggaggccgacctcgccaaggtcaaaaagcaaaacgcacctggagagcctggtggccggcccctgcagcacagtctgcagccgacaccctgctttggccgtgggaaaacattacaatggagaaaaaccccccaaaggtgtacagcgggacagcaagacttcccagaaagtctaaaatctctctgggtcttcgagtggaacctggaagccccgggtggcagtggattgatgtccagttcctgtcagaggagggcttgggaaaaatacctggcgcctctggcctgaatacccacgtccccaaggaatcaggaaggggcccccagtgcccttcctcccttccatgtggaagggccccttggtaggcctgaactaggaaaactccggctgggtnnnnnnnnnnncaccttggtaagaatgacctcaggccccacggcttctcccgacgcgggaaaaacgggcggtcccgggggacgcccttggcgaatgcggaagacgcccgctcccagagtggggcctcgcggcgtgtttaccgctctgttccacacgccatgcggcgggctttgtatacaggagggcctcgcgaggagatctcttcaagccttccgagacgaacacgctctccgcgcggagacacgggggtggaagatggagcacaagaaaaaaacgccgccgccccccgccgctatggtaatcggttaccagggcaaccgccgctcggttggcgcaacgaggtacgagtcgtcccgtcantgatacgctggggcggcttatgtggccacccccgctgtttgcagataggtttcgtcgaggcgctcttcttctntgtgacgagacgangtcgtgttttccctcgcatcgacgtggcctctacgtatgggggcgtggccgtgacgtggtgagcggcgtggcatcattgaccggcagccccttggatgaggttattcacgactactcggtgcgnggcagcactggtatcacgacgcgatngtngttgttgctcgacgacacgacctgtctcgaaccggccgtggaggtggtgtcatgtanaanannaaacgaagctcggcggcaggacaatgtctggcggcagatgtgtctggtggtcgtggctcctgnggagcagcgtgggagccgacgaaagacgctgatcatctgcccgttgtcgctacnacgcttcntggcgaggccgtcgtttagtcggctgttgcaacgctagtatgaccaaggagtgtcatgacgggagacaaacggaggctgctgcactccgcgcggcgccgtcctataaaaaggagatggggcgccgcccgtcccggcccnagaaagcgtggtcttgatttggtggggggncgccgctggggggcggttncaggngacaccgccntccggcggtcgggcgacgcatcgttgggcggactacgacgcg

SEQ ID NO: 261928 - DNA, 443 bp, Homo Sapiens
gcaggggacgggagtgagagcgggagtgagagcaggaacgacgcagagcggccgtcgccgtgcccgggtctcagggcgcctggctgaagtgagcatgtcttcagtggcctgggccgtcctcaaggtgctgctgcttctccccactcagacttggagccccgtaggagcaggaaatccacctgactgtgatgccccactggcctctgccttgcctaggtcatccttcagcagctcctcagagctgtccagcagccacggcccagggttttcaaggcttaatcgaagagatggagctggtggctggaccccacttgtgtcaaataaataccaatggctgcaaattgaccttggagagagaatggaggtcactgctgtcgccacccaaggaggatatgggagctctgactgggtgaccagctacctcctgatgttcagtgatggtg

SEQ ID NO: 261929 - DNA, 1586 bp, Homo Sapiens
  misc_feature (660)..(672): n is a, c, g, or t
ttcctatgctgtcccccgtatcatacgccttgaagtctagcaccatagttacgttatggcaacttagtatgaattcaaagattgccactctatgggtccacacgacatggataaatattggaaatttggaaagattactgcatcgtcgctaaattgtggcttatgaaaatctacaacttgactgtaagacacaattaatcgttgatacaatggtttcaaaatagattagaatacaggaaacgtttcatgaaactactgagatatactaaccagtgctatggctaatattaaaaactgaacagtctattgaaatcgtactcatactatttctacacacagtgaacaatacaaccacaataatcaacctcaagctagcaacaaagttgcaaggtccataagaagcttcttcagtgagcaaaacactatggtacaattaaaacatttaggaaggggaaaaaagccttttaacagtataaaagttgtttactggcgtttcctactgtaaagtacttctacaaattaaaatgaagaagcaatttatatacgtgacagtgatctgagactacagtgcagacatttcatctaacatttggctgacaaattttagtgtaacagattatgacttaatattttttacaattatgatctagagcagaactnnnnnnnnnnnnncacatactctcttacactcagagtcaatacactcttctcagtaatatctgggtttagatgcatctgtaggaagtaggtaaagctgtcagttatcttctcttaaaccaacagaaaaaacgtatattggcagatgtatgaagttttaccattatgaattccaatgtgaaattctcataagtatgcaagtaaattattaacatgtaagcacactcccatatatatgcacatggtccattaattaaattgggggaactaaaaacatactgtcaagttaaaataaattttaagaaaaaaactgcattcataaatctcaaaggtgtagaaaaatgaaattgtaaaataaataatgaatatagctgtcaattaaacttccatagaaatatgcctacagatgtggatgcagtgattgtccacatttgtgatggctgggtgggaagacattccctagtgaaagcatctagtctctctgacttctctacatagagaagactttctggatataaaatagtacttaatctgttacagcctttgttaacagtcgccatctttataacatgtagggttaacttactgtgtcttaatctatttaacacattctgaaatatcaatgtttaagtcaaagcttttatacatgggtccacttatttcaagttctctgtccaagcaatagcttcctatctttgaaacatcttaagtagctattaatacaatctaggtcaactagtttaagatatattttctactctattgctcatctttttaactttcctccactcaagtctttattgtgtaaacgtgcattgataaccagatgttatatgactgaatgctaaaaatttcccgacgcgtgggtcgacgatatcccgggaattccggccggtaccgcctgctttttaacaacgtgtgatatccta

SEQ ID NO: 261930 - DNA, 893 bp, Homo Sapiens
gggagacctgagcatggcgcccaccaggtgcctgcgctggggcctgagccgagccggagtctggctgctcccaccgcccgcacggtgcccacgccgggcgctgcacaagcagaaagacggcactgagttcaagagcatctacagcctggacaagctctaccccgaatctcagggctcggacaccgcctggagggtcccgaatggtgcaaagcaagccgacagtgacatccctctagatcgcttgacaatatcttattgtcggagtagtggtcctggggggcagaatgtgaacaaagtgaattccaaggcagaagtcaggttccatttggcaactgccgagtggatcgcggagcccgtgcggcagaagatagccatcacgcataaaaacaagatcaacaggttaggagagttgatcctcacctctgagagcagccgctatcagttccggaatctggcagattgcctgcagaaaattcgagacatgatcactgaggccagccagacaccgaaggagccaacaaaagaagatgttaaacttcatagaatcaggatagaaaacatgaatcgggaaaggctgagacaaaagagaattcattctgctgtaaagacaagcaggagggtcgacatggactgaaatcaccctctgcagctgggagggctcttctgggcgtccgggcagctgcagctgagaggactttcacaccataaggagatttctgtttttctttttggctgttaatgcttgtctataacattggagccatcacaagaatgttcatttggaatgaaggctgcaggcactggttgcagacgtctttataggcagtcaccatgttgtcaaaccttaataatgcacctcatgtattagtcacaataaaaatcagaactcaaaa

SEQ ID NO: 261931 - DNA, 1506 bp, Homo Sapiens
  misc_feature (629)..(668): n is a, c, g, or t
  misc_feature (946)..(958): n is a, c, g, or t
tggaggacagaaaaatggttcgtattgttcttacaaagacaaagagagatgcagcaaattgttggacttctctactagaatctgaatatgcagcggatccttgggtgcaagaccaaatgcagagaaagcttacattagagagattccaaaaagaaaatcctggttttgacttcagtggagcagaaatctcaggaaactacactaaaggtggaccagatttctcaaaccttgagaaataactgctttttttcctgcattctgtggatcctagcagatattgccaacttaatcagataaacagattatgtaatggaagaaaaatgcggatgcctacagttaacagattgcaaaatgtatcttaaaatggttctaaaaattgcattcaaacataatttacataggaaatgtactgtgggaactattctatggatatatggtaaagttgttttggacttgtttttgctcagcatgaagttttatatgctgcattttactaattccatatttaaccatatttttaatacaaaagaacattagagtatagatcatgtgaaatgaagggtgcctttggggaaaattaactttttcttttgataagtatgatattcaataaaattttctaaataggnnnnnnnnnnnnnnnnnnnnnnnnnnnnnnnnnnnnnnnntgacacccgcatcacaccaccaaaaaaatttctaaaccatccgtttggaaacccggaccaaaaaaagcaatctaccttgagacatacctgctcccttagaaaacccttgtacaaactttttggtcctggacccctccccaaataaaaaacggcccgggtgggaatccattcggttttcgaccgaaactccctagccccaccccttggggccctctactcgccccccaatacaaaatagggatctccaagcgacaacatcggattttcccttttaccannnnnnnnnnnnnggggccgtcaccagccgcaaattactctgccgcgacactttccattcacaggcccctctccagtccggggattcggggaatatcccatattatattactccgcgccctttgaagtgagaacacacttcctacttccgcacacagcggtgggagcataatgcctccctctaaggcccgcttttctgccccccaacacataacccctcgccccccacggcaacaaaggacccgtgcgagccacacttgtaattcctcgccgctgttgtttctctccgaccaacctcttaaaactcggagataatgagaaatatcatcccgtcccgcgccggtatttagaatgttcagcgccaccacaacaaataatttgcctccatatatatcgcctcttcactgtaaaacgcaacgccccggggtgtatctactccattctacgcggctatctgcggtggctgaggagaaaataaatcgtgcttttccttacacacatcacacttctcttaggtgaagtagcagcagccaggttccctaacccgtacatatcctccctc

SEQ ID NO: 261932 - DNA, 759 bp, Homo Sapiens
tagaaaaatgtaattcccatgtctgccatcttaagtgtaaaggtggctaaattatatagaaaaataagacaatatcatttcccaattacattcctttcctaccgcactctatgatgctagctgagatttttccaaaagaaaatggcttaaataaaaccctaagagaaagaaaaactttaaatccctccaaagctcaaaagtaatagaaacagatgagtttggagtcaggatttctctgtaaggattgcctaggctgtgtactgcacatctccaggtgccactgttcacagagattataactacaatgtgaagtgaatggtgccactgacagttatgcaaaccgtccagagcatagccacctgatcctgctgggattcctcttgccagtccatcagcagttccccttgaaagtttcaccaaacatcccttaaatctgccctctcctgcccgtccccagtggaggtcctcatcatttttcacctgcatttttgcaggagctttcttatatccaccttcctccttttctctcagcccatcatctagctacacagtctccagggtaagctttcagaaaggcaatctcttgtctgtaaaacctaagcaggaccaaggccaagtttcttagcctgaaaaatgtgcttttctgactgaactgttcaggcactgactctacatataattatgcttttctaccccctcacactcaacactttgactccagcaatcccaaatccccagatccctaagtgtgctgtgcta

SEQ ID NO: 261933 - DNA, 536 bp, Homo Sapiens
  misc_feature (323)..(323): n is a, c, g, or t
tctgaggtacatgatataagggtgatgaacataatggaaaaaatccaatggcccgatgatttgctggggatgtaagagttggccagcagttaagaactaaaccaattaaaaataaaaatagaaactttgtttttcaaggacaggcacctgtcaaaagacattggatactgtaatggctacagtcaggtaaggccactttatttcccccaaagtaggctgcaggccaagggatgccaggctgcagctacagcatgcacgtacacatttgctgatggcttctcaaaacctgagccgagaatagggtctgatagcccagcccaatntttaaaagcagacacacacgaatgtagtatcgttgtgcctgaaatgaccattctgggttgtttagaatccagaatcatcaaaagccatgtggtatgaggaagtaataaatatcctcttgaatcttcttaccctattttgcacaaatggatggctgcatgaacagctcttgtaaattgctctgagtccacaccaatagaaacctgcactcattc

SEQ ID NO: 261934 - DNA, 1134 bp, Homo Sapiens
  misc_feature (1017)..(1040): n is a, c, g, or t
tgtattaataataacaagctcattgagtgtgtgatagctccacctacgtccaccagcttaggaatatatatatctactttgacccaaagccacagaagcagtgacacgacgctaagaagcagaaagagtatatggttagtagaaactatctggcatcttgctcacctgaactacacctaaagtgctgttatttcccgtacatgcacttttccattatgttcttcacaaaggctcacctcttttccataagccaccatgcccagtccacaaaaccaaattatttttaatgttcaacagaaaagaaaggtagcaacaagttccttatttttgttaattccttgtttcttgtaataaagagtatcacttcctctcaccaaaaagctatagagcttctgatgaaattcaactgttcaaaaggtttacctcttttccaggggtaggtgtgattaaacagctggcatttcttcttaacaaagtaatgaaaaggcaattactaaaaaatcagcattgtattaccagaaaggcaagtcatttcataaaataagaactggagagttttaaatccatattcattaagaagctaaaaaattcatactaatttttaaccacttagagttttgactcacaataatcaaaccactttccagtttataaataattcaagatcaaaataataaattttaaaattaagcaaaatttgaaaaacttacatataaatatcaaaaaccatgcaacatgacgtctgctacttggaaaaaaggcatggagacacagtaataccggaataaggatttcaacatatgacataatggcataaggcactacctcaacttcagtctacacttgagtcatcataacccaaatatgggacaggagaagaaaacacacaaacacaacttttcacatccttttggctggtctggcagttaactgcttttctctttcaaactccttctctcgttgctgctccctttccaactcttctttttgcctcttctgctgcagtttaagtgctcnnnnnnnnnnnnnnnnnnnnnnnncatgaagcatcagcatctcttttcttatattcaccaacttggcatgatagtgtttagcctcagcaaacaaagcattaatatccaacatagaatg

SEQ ID NO: 261935 - DNA, 798 bp, Homo Sapiens
  misc_feature (706)..(706): n is a, c, g, or t
  misc_feature (728)..(728): n is a, c, g, or t
  misc_feature (760)..(760): n is a, c, g, or t
ggcactgccatggtcaagacgagaataccttagtctcagcaggagctgtggatgggataatcaaagtatgggatttacgtaagaattatactgcttatcgacaagaacccatagcatccaagtctttcctgtacccaggtagcagcactcgaaaacttggatattcaagtctgattttggattccactggctctactttatttgctaattgcacagacgataacatctacatgtttaatatgactgggttgaagacttctccagtggctattttcaatggacaccagaactctaccttttatgtaaaatccagccttagtccagatgaccagtttttagtcagtggctcaagtgatgaagctgcctacatatggaaggtctccacaccctggcaacctcctactgtgctcctgggtcattctcaagaggtcacgtctgtgtgctggtgtccatctgacttcacaaagattgctacctgttctgatgacaatacactaaaaatctggcgcttgaatagaggcttagaggagaaaccaggaggtgataaactttccacggtgggttgggcctctcagaagaaaaaagagtcaagacctggcctagtaacagtaactgagtagccagagtactcctgccaaagcccccacgggtaaatgtgcaatccatccaattcttccccgtcatccgcagcttgtgccccaagctntgcttggacgacctccctcctntccttcaaatactcctacgtttctctattaanacctctcctgccaatgcccggtctcccatcaatcagaa

SEQ ID NO: 261936 - DNA, 977 bp, Homo Sapiens
  misc_feature (808)..(808): n is a, c, g, or t
  misc_feature (810)..(810): n is a, c, g, or t
  misc_feature (816)..(816): n is a, c, g, or t
  misc_feature (854)..(854): n is a, c, g, or t
tttttctctaatgttcataaggtgactgttgtcattctgacttcaaagatgaaaaaacaaggtccaggcattttcccaagcacccagcgcacatgacagagccaagccaggccgcaagcccggtgcgtctgactcaggcccttgcactacccccacacccactgcctccctgtcctccctcctcaggggtacaaactccagatgatcgaggtgcccgtcctctccgacgactcagtgcctatcggcatgctgggaggagactactacaggaagctcctgcgctactacagcaagaaccgcccaaccgaggctgtcaggtgctacgagctgctggccctgcacctgtctgtcatccccactgacctgctggtgcagcaggccggccagctggccaggcgcctctgggaggcctcccgtatccccctgctctaggccaaggtggcgcaagtctgcctttgcatcctgtcctccagccacccttgcttgccactgttccccatgacgagagcctcctgtctgcagtggccatcctgaggatagggcagagtgcccagggtggccccagggcttctaaaaccccacctagaccaccctccatgtcaggtaactgagcaaggccccagatccttctctctggaggaagagggaagcccaggggtcctgtttgtaaaacaacggtggcaacagctcctcttccagagctgtctctgcctttatcctgggagatggggaggaagccccatctctgctgttccccgcgtggaggaagcccacccagcaagctctctcctaccccaagtaaaaggtnancctttncctgggtttgaattccgagagctgccacttcctctctncacttcctggcaagtttcttatattccccacatttaaagcgatggcacctcccgtcccagggtggtgtgaggattacccagtgtggtaggtgctcaataaatgttggtcattgttaaaaaaaa

SEQ ID NO: 261937 - DNA, 478 bp, Homo Sapiens
atggaattgtggattggaggaagcaaagctgtaccaccattcaacacccagagcactgtgtgacctcggctgaccagcattctgctgaaaaacggagtttatcttcaataaataagaagaaaggaaagccacaaacagaaaaggagaaaattaagaaaactgacaacagattgaatagtagaataaatggtattagactctccactcctcagcatgcccatggtggtactgtgaaagatgtgaatttggacattggctctggacatgacacatgtggagaaacatcttcggagagttacagttctccatctagtccccgacatgatggaagagaaagttttgaaagtgaggaagagaaagacagagacacagacagcaattctgaggattctgggaatccatcaacaactaggtttacaggttacggttctgtcaaccagactgtcactgtcaagccacctgttcaaattgcttcact

SEQ ID NO: 261938 - DNA, 1014 bp, Homo Sapiens
  misc_feature (271)..(279): n is a, c, g, or t
tcttcctctcctacctgacctcccctgcttaacagattttccatgatatgctttgtggtcctcagctgtttactttcaggatgccttctatatcctcagcttctcttaacttttattttgcacatccttccagcactgattgcttgtgaactcatctcgtgcctgcaagacatcaaaagtttctccaaagacatcccttcctctctgccctcatcctatatcaaggtcttagctccttgaagactgcattaatgtgtcttttgccttcatnnnnnnnnnaccctcccgcttcctctagtccttgtgtttaccaaaatacttttgctaaaacctgtatgtctagcttctgctgatactcttagcaatactcccttatttccttctggcgccatttgccaatcaccagctaatggctttgctctttgcatggtacctgtttctgtcctactagcttctagtctgaaaaggaagcctttactagcagcttcaacccagtcctccttaccttgcacctattaacgttggttcaacatgaaggggaagtaagataagtgggaagaggatacacaggaaaggtggaactggattcaggtgtctgtgttctgccattgacacttgggactgcgttccagcttccacctgtggaaaccagaaagcatttgccaaaaattctaaacagagggtctatttctgaagctgaggaatcacatggagtgaatagcatgggggaaggggattactaatgaggctgaaagaaaagtaccaggaagagactgacttcatgcataatccataaagccaggttttcttgaaaggtgacctgctttcttgtattcctgcaagtacacggcagggtgggcagttccaggcttatagtcattattccctaacaaacggtcaagacttaggctgcccaagactctactacccttgtagtcaaaaatccaaccaccttgacctttacctcattatctgaccctttagcatgggagtcctaaaatggtcctgaatgga

SEQ ID NO: 261939 - DNA, 556 bp, Homo Sapiens
  misc_feature (24)..(24): n is a, c, g, or t
  misc_feature (474)..(474): n is a, c, g, or t
aaactcctgcatcccacaaaagtnctggccctggctctgtgaacactttcctcccaaactgctggcccaaccacggttagtccttcccacagagacttggtcggctcccaatgatcccggacaagctcccggttccatactgaatggagaaagattgacctggctggctgtatgtgctggactgggaaggctggaacctgctgtgcgtcttgcaggctgggctagtgcagtacacagaggggacccagaggttggaggagccagtgtcgaagatgacagtgaagttctgtggtggggagccaatggagatagtgccgaagtattccatatccaagtagttgatgaggggttccttggcactctggtccattgagcaggactcggtgaactggatcatgtccaaattatgggatttccagaactcagagagctggctccgtgcccgcagcttcttcttgagggacggatgcctcntgaggggcaccctgtgaaggactccttgggcctctcccagctccaggagcaccagcagcaaaagaaggagcgttttcattgt

SEQ ID NO: 261940 - DNA, 903 bp, Homo Sapiens
  misc_feature (62)..(70): n is a, c, g, or t
  misc_feature (578)..(578): n is a, c, g, or t
tagcccagttcaaacagaacaaaggaaaaatatagaaagcaacatctgttgatcatttaggnnnnnnnnnaaaccaccatgtcactttgagtccttcatgggtttttgaacagcatttatcaagaagaaaatgtgggctttttcccctctcccgtgttttgtttgtcctgtagatagagggaggaaagccgtgcagtggcaggcgggaccccctctggtggcgggaccccctcttgcggtggtcttgcggggccagccgggacctgtcactttattatttaaggagtgtgtgtgtagagtcgctggcttattaacagtattgtgtgtgggttgggtttttagtttgttccttctttttgaagtcccttcatttcaatccttgactctctctccccttcccttgcccagctctgttgaatgctgctgtgctcgtgtgagggccgctctgcacacagggcccttgggttgtgtgaactgaaattctccctgtgatttgtgagactcgcaggagtccccatctgtagcacaggcaatgccagtgccatgcttgcagcctcagaaaccaggcctcttcaatnccagcagcaggcagaaccgtgtctgtggtcgggtgctgtccacagctctgtctgccttgttcttgggcttgagctggatagaggtggggtctcttcaccttccctgaattcagaacagaccctgtgcctggccccagtgtgcccaggcaattccccaggccctcattgggagcccttggtgttctgagcagcagggcccaggcagcacatgagcagtgcccaggggctccctgcgtgaggacggcaaggtgcgatgtatgtctaacttattgatggcaggcagccccctgtgccccctaagcctggccctggttattgctgagct

SEQ ID NO: 261941 - DNA, 758 bp, Homo Sapiens
gagggaagggggcggagctagccggagccgcgagtccattttggggctgtgcttggcgcgtaccgtgcggtccctgtagttggaggacgggcggtcgcgcggcctttcccactagccggagtagcctctagttcgttagtcaaaacgtgaaaaaaaagacctgctttgccctgggaaatagtaaccctgccaaatacatcagcttgtaggagacagaggatgtgatggagctgcttgaagaagatctcacatgccctatttgttgtagtctgtttgatgatccacgggttttgccttgctcccacaacttctgcaaaaaatgcttagaaggtatcttagaagggagtgtgcggaattccttgtggagaccagctccattcaagtgtcctacatgccgtaaggaaacttcagctactggaattaatagcctgcaggttaattactccctgaagggtattgtggaaaagtataacaagatcaagatctctcccaaaatgccagtatgcaaaggacactttggggcagcctctcaacattttctggcctggactgatatgcagctgatttgtggggatctgtgctactcgtggggagcacaccaaacatgtcttctgttctattgaagatgcctatgctcaggaaagggatgcctttgagtccctcttccagagctttgagacctggcgtcggggagatgctctttctcgcttggataccttggaaactagtaagaggaaatccctacagttactgactaa

SEQ ID NO: 261942 - DNA, 1067 bp, Homo Sapiens
gtagcgaggcctgggtggcgaattcggcacgagggggatctgtgctactcgtgggggagcacaccaaacatgtcttctgttctattgaagatgcctatgctcaggaaagggatgcctttgagtccctcttccagagctttgagacctggcgtcggggagatgctctttctcgcttggataccttggaaactagtaagaggaaatccctacagttactgactaaagattcagataaagtgaaggaattttttgagaagttacaacacacactggatcaaaagaagaatgaaattctgtctgactttgagaccatgaaacttgctgttatgcaagcatatgacccagagatcaacaaactcaacaccatcttgcaggagcaacggatggcctttaacattgctgaggctttcaaagatgtgtcagaacccattgtatttctgcaacagatgcaggagtttagagagaaaatcaaagtaatcaaggaaactcctttacctccctctaatttgcctgcaagccctttaatgaagaactttgataccagtcagtgggaagacataaaactagtcgatgtggataaactttctttgcctcaagacactggcacattcattagcaagattccctggagcttttataagttatttttgctaatccttctgcttggccttgtcattgtctttggtcctaccatgttcctagaatggtcattatttgatgacctggcaacttggaaaggctgtctttcaaacttcagttcctatctgactaaaacagccgatttcatagaacaatcagttttttactgggaacaggtgacagatgggtttttcattttcaatgaaagattcaagaattttactttggtggtactgaacaatgtggcagaatttgtgtgcaaatataaactattataaaatctgtttcaagtatgcagttttcttttgttagaaattgttagagaatagagagtggtaattcagatttggtcaacgattctagtcacatattttcctccaaaagtattccttccaaaaataatctatacatgttcaaattaggtagca

SEQ ID NO: 261943 - DNA, 851 bp, Homo Sapiens
  misc_feature (524)..(576): n is a, c, g, or t
tttcttggctccctgaccgggaagcaacgtgactgacagacagctgaggcagccccttaggcaacttaagcctgccttgtggagtgcccctgtgggggactccagccagcctgagtgacatgatccaaagagccctcctgggtaggaaattgccccggtggaatccctcaccagagaagcaggtagcaggccctcgcagaggattaacacagtggctgaacaccaggaaggaactggcacttggagtccagacatctaaaatttggtactgcgaaggtcatgagacgcctgagaaggcctgaactacagctgtctgggcacctagtgaaggttataaggcaaaccagtgcaaggctcttttgagcaaaacctagataacagacatctaggttgcaaagcaacagtcatgtgtaatccccgagttatgaactgtcacaatttgattaattgttctccctctgtatctctgttttcatgccactgtaagcctacatcaagttaacccaccccttttgggaaagtgnnnnnnnnnnnnnnnnnnnnnnnnnnnnnnnnnnnnnnnnnnnnnnnnnnnnngtcacctgagtctgagtgcactcaataaagatatcctcccggtataccccccggaagcagcacagtaactctacctccagggttcttatgccgggtggggaaaaagaaggaaggaatgggcccaggggccatagctggttccctggacccagctttttgtggaaaaagggggaaaaactggccgggtctccttaataaggggcccagttaattttccaatagccccgcgtaacccggcattaaaggaaatcccgttgccataacccggggaaatt

SEQ ID NO: 261944 - DNA, 408 bp, Homo Sapiens
tggcctactgaagtagcgcgggagctgagaagttgcttggttgagttggtcccggcaagtccttgagcagtttgttcctctgtcttcccgcttcctggtgccccgactgcgtccccacgaacgccccgtccttaccgccggctgctgtggagtgcctcgctgtctcccaggtccccgagttcctggtttcagagaagatgaccgaagaagtggatttcctgggacaggactctgatgggggtagtgaggaagtggtcctaactcctgcagagctcattgaaagattggagcaggcctggatgaatgaaaagtttgcccctgagctgctggagagcaagcctgagattgtagaatgtgtcatggaacagctggagcacatggaagaaaatctcaggagagccaaaaggg

SEQ ID NO: 261945 - DNA, 506 bp, Homo Sapiens
  misc_feature (269)..(269): n is a, c, g, or t
cgaatagtgccatcatcacagtatattagtcaaatagaagcttcatcagaaatgtatcccacatagagttttaagacttggattctcttctgcccttgttaatctccaactaattactacagattgacacgtttttaattagctgtcctttgtaagaagtcaggaaatctgatgctgtgtccaaaattatgcactgtttgttgaagtagaaccagaaatcctgaccccctgttaaatgacactcagtttccccctctgagcaacagacntgcttgtcttgctaggagaggaggatggggggctgagcactcaggctgtccattgaaaccccttgtccatgaatagggtcatactcctaagactgatggggtgttgatcctctaggacatcacttgtttattcagtgccccaaacacagatttctcttctagcactttagagttgatccttgaagtctctcctggttcattcaaatacaagctgtgtgagtctggtggttttctgtg

SEQ ID NO: 261946 - DNA, 996 bp, Homo Sapiens
  misc_feature (875)..(883): n is a, c, g, or t
ttttttctgggaatcagtccgcattttattttatagtacattcatataagttcctgcatttccaaggtaaccaggtcacattcaggttagcactgctggtaacaaaatcatacaactaccctggcttcaaaaacaagatagggtaatgcacattaatacctctttccctttaatactgcagaagacaatacatcacaaaataaaatctcaaaaatcacatgccttttacaatccagtgtgaaggcatattatttatgttaaaattagaccatgtggaacatgagaataaagagtttgaaagctctctaaaatttctcccaatgccatctttcgcttctaactgccagttggcacattcagcttcaatgccttgggaagggaggggcagaggaaagcagggggtcactgaactccaaaactcatggttttccaggctacttctatagacatcacttaacctaaaattctaaagagttaatatgcacgagggatggtaatataggaagcacctgaaaaaaattcctccagtcactgatgggaaatttaagctgtgaatttttgtgaattttcaattccacagaaagcaaaatctgtatcacatccagtaatatgttaagttctgaagatacgttttcattttgctgaataaaaaccctatgacccatgttctggtcttgaactaggtcagaaaaacactgtaatctccatatgcaatatttcctataggcaacctaaaagtgcagctgccccaacccttgaaaagtttgagaagtcaaactgagctataataaagacacaaacaaattaggtaggagaaaattcaaataggtgagaaagcaagaagttagatttgtttgggtctttttcctagattnnnnnnnnntattataaaatgctttggaccctagtccaacatagctggaatgataagttatttaaaatcggacgcgtgggtcgacgatatcccgggaattccggccggtaaccagcctgttt

SEQ ID NO: 261947 - DNA, 631 bp, Homo Sapiens
  misc_feature (317)..(317): n is a, c, g, or t
ttattgcctacttatatgaaggagatcctaaggttcaatgttcaagagaatgggtttttatcttcattgccttatttaggctcttggttatgtatgatcctgtctggtcaagctgctgacaatttaagggcaaaatggaatttttcaactttatgtgttcgcagaatttttagccttataggaatgattggacctgcagtattcctggtagctgctggcttcattggctgtgattattctttggccgttgctttcctaactatatcaacaacactgggaggcttttgctcttctggatttagcatcaaccatctggnatattgctccttcgtatgctggtatcctcctgggcatcacaaatacatttgccactattccaggaatggttgggcccgtcattgctaaaagtctgacccctgataacactgttggagaatggcaaaccgtgttctatattgctgctgctattaatgtttttggtgccattttctttacactattcgccaaaggtgaagtacaaaactgggctctcaatgatcaccatggacacagacactgaaggaaccaataaataatcctgcctctattaatgtatttttatttatcatgtaacctcaaagtgccttctgta

SEQ ID NO: 261948 - DNA, 880 bp, Homo Sapiens
ttaacggataatttcagcattgcccgcatagaaacctccgcaaaaccggccaaaacaaacgcggacaggcggcccctggcgtcagcgcacgacagtcacgtggggaggggcagtggccaggtcggccttggacgggtacaccaccttcaggctcccttccagatccaccacccggacctgctccaccaccagaagggagggcccgtcctttccagcactgggattcgttgtgggatctggaagttgtccagagactgcatcggcttcagtatctgagagtgatccttcctctttattttctaaagtgtactttttcatttctgccattttcagaatgagggcatccatgacatccttgcaaatctgcagactggtggcacttgttacttccaaaaacaaatcagaagtcgttttcttaacctttgtcttctcactgttggttattggtgggaaggaaatcacatcaccgtctgcatccacaagacacgggtaattttcatttccatccagcaagtgaaggtatctgtgcaggcccgacacactctgccgcttcttctgcttcctctgctcctcggcctccagctgcagctgccgcaccagctccttggccttggcttctttccgccccaaggggacaatcttgaggtcctgtgggggccgggcgcagtacagcaggggccctttgacggcacggagctcgtgggtggcaagggtggcagccgtcctcttctcacagagatcttcgtggagcttggtctgcgaggtgaggaagcgcttgagtgcattccctggctgcaggtccatgcctcgcaccacggcccccacaatgtagggccgcacatcccggacctcggcctcgtgccgaattcgccacccaggc

SEQ ID NO: 261949 - DNA, 574 bp, Homo Sapiens
  misc_feature (313)..(420): n is a, c, g, or t
caaattattcagtatgcaaaacattctgttaagacatattttctgataaccttagaatacgtggtacttaaaaactatgactaaaatatttgtggaagaattcattatcttaggtgatacattttaacaattaaaatagttccgagaacacggtcttccacctgactttgacgattaaaacaatgttgtcaaaagaatgttctctctgaagattctgggtctcatccaccaccataggtctcatctaccatcaactgaaataagctaatcagttataaacaagggaatatacttaaaataataattaaaagannnnnnnnnnnnnnnnnnnnnnnnnnnnnnnnnnnnnnnnnnnnnnnnnnnnnnnnnnnnnnnnnnnnnnnnnnnnnnnnnnnnnnnnnnnnnnnnnnnnnnnnnnnnggaatataccacttttactgcactgacaagctctgtatgctagtgattctcaaattttctttaaggctaggaccaagagtcctgccaatcccctgaacaacagctcacatattatcaaatgaacttgaaacattcctgtcatagtgagcagcat

SEQ ID NO: 261950 - DNA, 1389 bp, Homo Sapiens
  misc_feature (373)..(373): n is a, c, g, or t
  misc_feature (581)..(581): n is a, c, g, or t
  misc_feature (633)..(633): n is a, c, g, or t
gcctgggtggcgaattcggcacgaggatgatgtcatcaggcacccaggttcctactgtcttgccatgtggccacagttagcaacaaaggaggctgtaaatttagtttctacttgggcagccaaaactctgaggaaggagattctgctagtaaaaaggagtgggggaagaatggccattgggagacaacaagcagactcaaccaggcctctttgttggcttcctttcctcctgctgcacatgagccttcgccgtgcatttggagccatgacagctgatagctccagacctgcatcctcctagcttgggggctctgaatgaaaggtttcttcccttccagttcgaatttggaaactcccaaagttctcaatggtnttgttgtgagttccatgtcctcttggatcagtcactgtggccatgcatgtttggccacatgattaatccagtctgggtcatgaccttttcttcatccaaaacaaggtggtgggaagacaaaaacaatagctactacaaacaataggagtttataattatgtgctgatgtattcgaagatgtgttgacagtcgtgagtgtgtatcctangaaaggcgagctggactctgtctccatggtggctctcaccccagggacctangaacagcctgtcaccacacaattacttttataaccctggagatgaaaatctccttgtcctcaaaatacttccagaagaacaaccagatgggaagggaccttggttggggactctttccagttcacttgggggcagagggaatttaatgggctcaccgtagctgaaaaggattgggctaaatggggcgttcaggctgcatccccaggaactccaaacagggattctgtctcctttggctctcagctctgctttcatttgagttggctttattcttgggcttcacagtgtggccccacagcaccagttattgataaaaagagctcccctttgctgacagaactgctggatttggttctcattggtccagacgacgaaggtatccagcctcaagtcatcattgtggccaggaagatggaatacaccaaatggacaggcctggcatgtacccacagagactgagagttggtgctggtggttgtggtggcagatgatattacctgaagaagggacgaatgggtgctgggcaggacaaagcatcagctgtccagttcaggcctctcctctttccctggtgtcttcattttcctccgtctccctgctgtcccttaccctctgcccaatctctcattactcctggtcttgggagttgccttctgaggatactccactgggggtacctgagcctggattagagggcagggggaggatattgcctagccaaagtgggtgttcaataaaaaaccatttggagatggt

SEQ ID NO: 261951 - DNA, 1166 bp, Homo Sapiens
tggagcggggtttggaggaccacgagtccgtggtggaagtgcaggctgcctggcccgtgggcggagatagccgcttcgtcttccggaaaaacttcgccaagtacgaactgttcaagagctccccacactccctgttcccagaaaaaatggtctccagctgtctcgatgcacacactggtatatcccatgaagacctcatccagaacttcctgaatgctggcagctttcctgagatccagggctttctgcagctgcggggttcaggacggaagctttggaaacgctttttctgcttcttgcgccgatctggcctctattactccaccaagggcacctctaaggatccgaggcacctgcagtacgtggcagatgtgaacgagtccaacgtgtacgtggtgacgcagggccgcaagctctacgggatgcccactgacttcggtttctgtgtcaagcccaacaagcttcgaaatggccacaaggggcttcggatcttctgcagtgaagatgagcagagccgcacctgctggctggctgccttccgcctcttcaagtacggggtgcagctgtacaagaattaccagcaggcacagtctcgccatctgcatccatcttgtttgggctccccacccttgagaagtgcctcagataataccctggtggccatggacttctctggccatgctggggcgtgtcattgagaacccccgggaggctctgagtggggccctggaagaagcccaaggcctggaaggaaaaagacaaaccaccgccctcagcctgcccatgccagcctccgggcacgagccctcagtgcagccatccaccgcaccccaactctggttcccacgggcgcatttcccgtgaggagagccagcggcttatttggacagcagggcttggtagacggcctgtttctggtccgggagagtcagcggaacccccggggcttgtcctctcttgtgccccctgcagaaagtgaaccattatctcatccctgccaaccgaggaaggaggccgcctgtaccttcaccatggatgatgggccagacccccttccactgacctggctgcagctcgtgggagttcccaccagcttgaaaccggggaatcctgcccgtggtttggttgcgcccattggctggcccgcgggtggggcctttctgaat

SEQ ID NO: 261952 - DNA, 584 bp, Homo Sapiens
atctgcctgatggaatactgatttaaagaaaaattgaaaaatggctgttctgctggttctgtctccagaatgcattgctctaaatctcaaaacctaggaacctccagacagggccacagtcacagcagatgatcagtaaatgaaagctactcagtaggctgctcgctacatttctaggtctgctgtgttcactatgagctgaggcttttctttaccagggtccacaagggagagcagactgaattgcacagggttcccagaattctagtctgctatgtgcagcagatgatggatgaaccacacgtatataccagttggcttgtatgaacaggcctcttttagctaacagggaaatgctttaacatcaatacactgataagtggttaatgataaactagttaatggtctccctagtcactaaaacactaagacatcaaatacattaacgaatttccagagcttgcatttcctttgcctgggagcatcacagacacttacttagactgtgagaccagtatgagcagcaacaactttctctggcaagcctgacgagattgggcccccgtgccgaattctgggctcga

SEQ ID NO: 261953 - DNA, 1162 bp, Homo Sapiens
  misc_feature (42)..(42): n is a, c, g, or t
tttaatttgaactgctaattgaacatgaagagtgaaaattanacacctagttcgtccggtttaaatggtcactaagactgtataggcaatttcaaaatgggcactgtaactaaaagaaagcaaacctatttagagctgaacgagactcttgcactgggttttgcttgctctaagggacaaagtaagctgatgctcatagcacattggactacagcaagagaaagggggagaagcagatggagcatctccttcactgtccatgagcccagtgagtaaaaggagtgaggaaaacctcttttgttccacagatttacaaatacaaaaaaaataaataatattctaagacagtacaaatgcaaatactgttcccttgtgtcaattacatacagcatgcctacaaagagagaatggtaattcttcttcattcacagacaggacacatggcagtgcactattcaaaatgctttgataatcttaatttttgtttctggtgctgagatattatgaaaggaactgcatttgcaacttattaaatacttccaggaacaaatagttcactttgcttgggacttgtagttttgagtaattaatcatccatggagcaggagccagtcaggagatacccgttggtaccactggtcccattggtggttgtcgcagtgtggggattctttcccggaggttctgagtcctcctcatctgagctagactcaatatcacttcgatcatccttggacaccttgcctcttgaaacagctttgcaagctattttcacaatcaagtaagaccagaagcagttcaacccttgtactagcaatagcagtaggttaaaaacccaccaggaagggtaaggtccaacgatctcccagctttcaaataatgtggtatttaacacccagagaggaaatatacccagtcgtgtggtgataaaaaccacggcaaacataacaaacaggagatcacacattttctgaaacttggcataatttgccattttggcagcctccagaagagcatcagctgaatcatgaagacaaaggaccagcgttcctactcgggccatattgttgacatatgaaaaggtaatcaagaaaatagatacaaggtggtgcaggaacataatgccaaagtcctttcttttgatatcagtgaactgagaaaa

SEQ ID NO: 261954 - DNA, 627 bp, Homo Sapiens
gggtgtctttccattcaaataatacctaacactgtacattttttaatatcatagaaaaacttggttcttccatgaaatcctttaaattcttgataaatttttcaatgtagacattattatgaatgaaaaacagccaacaaatgggcatctgtttttttaacactgaagatttacagacactttttaaaagttatcataatcttttttgtcttttttcccctcagcttcaaatccatcaactccatcactatctcttcttcgtttcctgttgttgtggatgttaaaacgttggctcatttgcggtaatggatccatgcctagaactttgtgtatctggcggaatgcaaggagtctcaatgcaaactgtgcactggatgtgatgtcttcacgctgctggtcagtcattgttgccaaggtatcaaagggatccttttcacaaggatccagaagtccaggactacctttaagaataatccctgaagaaatgcattcaaaaactcttctcagtgcatccccagggctctgagggctagaagcactgctgattgctttctctactagtaactccatagcccagcttggaaaatcagaccaagttggaactcgctgacagaggtctcgaagaat

SEQ ID NO: 261955 - DNA, 473 bp, Homo Sapiens
tgagccactgcgcctagccgtcacatttctaaacaagcatgaaaggggttcatttttgtcttcttcttgcctgccgtcagcatggtggaaatggctctgcctagtgctcatgcttctggtgcccaatgccttgcactgtgcccattcaacactatgaagagaaacaagtagcccacacctcaaaataatgtggctgtcaactggcctaaataaaccctacacaaaccagtacttgccttttgctggaaacattgattatgtgctcctcacgtagtagaaagcggtatcctgattagtctaacagttgtgttagactttagggccagtattgtcagcatttatttatttatgtacctttgttatgatgggatatttttcatttgaaacttgttcataaaaatgtcaatgacattgatgactgatttgtacatatttttcatatagttttggttttaaaaaatattttcaggcaa

SEQ ID NO: 261956 - DNA, 887 bp, Homo Sapiens
ataccatgctatctatctagaagaactaacagctgttgaattgacagaaaaaattgctcagcttttcagcatttccccttgccagatcagccagatttacaagcaggggccaacaggaattcatgtgctcatcagtgatgagatgatacagaactttcaggaagaagcatgttttattctggacacaatgaaagcagaaaccaatgatagctatcatatcatactgaagtaggagtgcggcgtttcgtgcccagtggctgctccttccttcacctctgaaaacggccctcttgaagggggatatgaatggagatttgaaggtctgcaagaacctgactcgtctgactgtgtgtggaggagtcccaggccatggaggcagaacccctggccctctgtgttggcccaagctcttgtggtacacacagattactgcccaatatgcagttctgcagctgttttagttaaatttctggaccttgttgttgttaaatatcagtagaaactctacataatttagagtgtatgtagggcataatgatgatgggaattgtgtgatgtttaacaggaagatcttaaattttgtgatatggagccctgtaatttttttcttatataaaaatgggtatctatattcataagactaggtcttcaatctctttgtactggcctcaaatgtactggtatctctgctttttgccacagtttgtccctgaaaactttatcagtgaggagaaatacagaattttccttttggttcccctgtaataccacaactaatagtattttcagctaacatttattgaccaggcagtgtgataaattttttgaatgaccatcttgtttaaccccctaatcacactatctaaagtaggtgctatagtgacccc

SEQ ID NO: 261957 - DNA, 726 bp, Homo Sapiens
  misc_feature (56)..(56): n is a, c, g, or t
  misc_feature (82)..(91): n is a, c, g, or t
  misc_feature (424)..(424): n is a, c, g, or t
gcatcaaaagactcaagaggaatgtggacacatttcatatcccatttgtagagtanagcttcaagtgaccagtcagcacttnnnnnnnnnngttgttcttttaaagtcatgccttttctgttttgcttcagatgtattctattcttaaattatgtatcgcatgggtagggtagagtaaggcttaagttacatataaaaagtaagggtcatccatacttgcctcctaacttgataagtagaccacaattggaccttgggattcttgtgcatcaaaaaatatattgtagccaaaatgtcttcaaaatcttctggttcaaagaacacatcagatgcaaggataatatcttgtggtggtagagccagaagatcccaagatatatgaccccatgttagtcctaccacctgcagatgtggcagggttaantcatttggcagctttgccgacagacttccagacagtgaggcagttctgagctgtctgacagtattacttctgcaccacatttggcagccaaaattcctggaaggctcactccagctccaatctaataagttatgaaagatggcatttcacaattatacttggaactgcaaataattgggaatcttagtactttttcattatattcttgcatttttaaataagcatagagtcagtctttctggatttgtataaaatgtaccgtaactgaacattactataaacatgacaaaagtacattcctt

SEQ ID NO: 261958 - DNA, 1069 bp, Homo Sapiens
aaatggggggggaatcacaatgcccttggtcacggacccaggcttcttcctaggaaaaccgcttatgtcccatgttaccctttacctgctgtggggccgccccgccaaacggaatgttttggaaaagctttttgagtggccgacggcggccagacagccagtaattacgttcgaatctgcatttggttccttgtaatacgtattttaatttttgtttcatatgagtttaagtgttgtctaggtgacatcaaaatctaaggcaaacagacttgaccatcttcagacccactgcattctcaagctgaagtggtctgctcatagtttgtgtgccaggttgctcatcagtattgatactgtcccagaacaggttgtaggtataattcagagactgtcctttgcaaaggaaatgaccagcatttcaactgtatgtcttcctggaagggtagattctgctatatcttctttgtctgcatcaaaagactcaagaggaatgtggacacatttcatatcccatttgtagagtaaagcttcaagtgaccagtcagcactcctaacttgataagtagaccacaattggaccttgggattcttgtgcatcaaaaaatatattgtagccaaaatgtcttcaaaatcttctggttcaaagaacacatcagatgcaaggataatatcttgtggtggtagagccagaagatcccaagatatatgaccccatgttagtcctaccacctgcagatgtggcaggttattcatttggcagctttgccgacagacttccagacagtgaggcagttctgagctgtctgacagtattacttctgcaccacatttggcagccaaaattcctggaaggctcactccagctccaatctctgggacgtccttgcctgggagagatcttctgtcaaacgaacggtactgtgccaggaacacagcacagggccaaacatacattccatactggagatgcagcacctgcagagagaccactgtcctgatagctccggctcccccagaacacggctcctccgagaatcgaaagcgctgggcccggaccccctgtcctcgg

SEQ ID NO: 261959 - DNA, 1448 bp, Homo Sapiens
gatggtggaccccgtggtggagctggccgccaagcggagtggcctggcagtggaagatgtgcgggccaatgtgcatgaggagctgagtgtctggattgatccctttgaggtgccctaccagattggtgagaagggagctgtgaaagtgctgtacctggatgacagtgagggttgcggtgccccagagctggacaaggagatcaagagcagcttcaaccttgacgcccaggtgttcgtgcccattggcagccaggacagctccctgtccaactccccatcgccatcctttggccagtcacccagccctaccttcattccccgctccgctcagcccatcaccttcaccaccgcctccttcgctgccaccaaatttggctccactaagatgaagaaggggggcggggcagcaagtggtgggggtgtagccagcagtggggcgggtggccagcagccaccacagcagcctcgcatggcccgctcacccaccaacagcctgctgaagcacaagagcctctctctgtctatgcattcactgaacttcatcacggccaacccggcccctcagtcccagctctcacccaatgccaagggagttcgtgtacaacggtggtggctcacccagcctcttctttgatgcggccgatggccaggctagcggcaccccaggcccgttaggaggcagtggggctggcacctgcaacagcagcagctttgacatggcccaggtatttggaggtggtgccaacagcctcttcctggagaagacaccctttgtggaaggcctcagctacaacctgaacaccatgcagtatcccagccagcagttccagcccgtggtgctggccaatgaccatctacctgcccgtggggccaggagcacccaagaccacagtaacaagagaaaaggacacggccacacacacccacacgaggacacacgaacaccctgtaccaaacaagattttcgatcttactcactcttaccttctagacaaaaagatccagcccccggcacggaccatgggcagggccctgcaaaagcaccacgtgtgttttcatcacccccttaccgctcgccccaccggctgtgattattggtgggttggctaacatatccttactattatatcgactacatcgtcgtgccctcttataccactctttcatgagctgacctcctgtgcaagactgcgcacgatgtgactggtgtcctgtcaccctacctcctaaccttcaatattacgaatgcgcgtcccccactggcacaaacctgacctggggccgactccggaagaacagtgaccgcacccttgatcaccgattccccaagctcaaaccaggccctggcactcacgcacacgtaccaacaactcgcgcgaaggcgttagtgcgacccccaccacacagacaactacatccaacactactcacgccactatcccctaata

SEQ ID NO: 261960 - DNA, 938 bp, Homo Sapiens
atcgtcgacccacgcgtcgccacgcgtccggtgactctgggctctgaaggtctttgatgtcacagaatttgtggacctacatccaggggggccttcaaagctgatgctagcagctgggggtcccctagagcccttctgggccctctatgctgttcacaaccagtcccatgtgcgtgagttactggctcagtacaagattggggagctgaatcctgaagacaaggtagcccccaccgtggagacctctgacccttatgctgatgatcctgtacgtcacccagccctgaaggtcaacagccagcggccctttaatgcagagcctccccctgagctgctgacagaaaactacatcacacccaaccctatcttcttcacccggaaccatctgcctgtacctaacctggatccagacacctatcgcttacacgtagtaggagcacctgggggtcagtcactgtctctttccctggatgacttgcacaactttcccaggtacgagatcacagtcactctgcagtgtgccggcaaaccgacgctctgaggatgactcaggtcaaagaagtaaaaggtctggagtggagaacaggagccatcagcactgcacgctgggctgggcacggtctgtgatgtgttaagcccaggctggcaccaatccgtgaaactgaggccacgtctgttgagggactggactcagaacctatgagatgactatggagcaacatcctctggtcgggcatggacctggaagcgaggccgtgcacttgagatgagggcagctctggccggacaggctcccgtggggggggcctgaaatgggggcccccagtgaagggggcaacggagtcagcaggaagcgccacggcagggggaacaagcccccactgggcggaagcgatgcacccaacgggaacggcacaaaccggaaagaacagggaccg

SEQ ID NO: 261961 - DNA, 1632 bp, Homo Sapiens
  misc_feature (1614)..(1614): n is a, c, g, or t
ggagctgcagctggcgaagttgggcgactggcggatgcaggccttgcggcacgtcgtgtgcgccctgtccggcggcgtggacagcgccgtggccgcgctgctgctgaggcggagaggttaccaggtgacaggggtgtttatgaagaactgggactcactggatgaacatggggtctgtactgccgacaaagactgtgaagatgcttacagagtttgccagatcttagacatccctttccatcaagtgtcctacgtaaaggagtattggaatgatgtgttcagtgactttttgaatgagtatgaaaaaggaaggactcccaatcctgacatagtttgcaacaagcacatcaaatttagttgcttttttcattatgctgtggataatcttggggcagatgccattgccacaggtcactatgcaagaacttccctggaagatgaagaagtctttgagcagaagcacgttaagaagcccgaagggcttttcagaaatcggtttgaagttagaaatgcggtaaaactcctccaggcagctgacagctttaaagaccagaccttctttctcagccaggtttcccaggatgcccctgaggagaaacatcttccctctggggggattaacgaaagagtttgtaaagaaaatcgctgctgagaatagacttcatcatgtgcttcagaagaaagagagcatgggcatgtgtttcatcgggaagaggaattttgaacatttccttcttcagtatctgcagcctcgacctggtcactttatttccatagaagacaataaggttctgggaacacataaaggttggttcctgtataccttgggccagagagcaaacataggtgggcctgagagagccctgggtacgtggtgggagaaggacagcgtcaagggtgacgtgtttgtgggccccccggacagaccacccagccctgtacagggacctgctgaggaccagccgcgtgcactggattgcggaggagcctcccgcagcactggtccgggacaagatgatggagtgccacttccgattccgccaccagatggcactagtgccctgtgtgctgaccctcaatcaagatggcaccgtgtgggtgacagctgtgcaggctgtgcgtgcccttgccacaggacagtttgctgtgttctacaagggggacgagtgcctgggcagcgggaagatcctgcggctggggccgtctgcctacacactccagaagggccagcgcagagctgggatggccactgagagccccagtgacagcccagaagatggtccaggcctgagtcccttgctctgacagaaatggatctgctagaaggaaccctggagagcaggacccagggctgggcggctggtgagcagtcccaggggcccaagggccagcttgctgctgcccaaagcagaggaagccgggctggctgagggtccgaaaagcctgcaggggcccggcgagccccaggaagagcctcagctccaggctggggctctggctgctggagcatctgctggctggtggggtggcccgagttccccttcaccgcccccagggagggtttcccacctcagagtacaccgaggggacctgcagaggggtctgtcgggacancgtggaataaacattatt

SEQ ID NO: 261962 - DNA, 950 bp, Homo Sapiens
gaaagccattttcaatacagagtgtaaaattagatagcctctattaattaattagattttggaaagaaatgcagctttttagttagcattgaggcaaaacagggaacctgcttctttccaattgcacttgggtctttgcaaaagtccactcggcgctgagaaactttcctgttcaccagtgtgaggagttctgtgaactctaaggaggagccatattttcccaacatctcacacaaatcttgaatgtaccatgagccgttcacagtttcccggtgagaataatatccttctgcaacagagtaacacatgaggaagtcagctccagcaggcagcgtgtaaacggaggctgcatccacctcagttatgttggtgtccaacttctctgtctgattatctactacatccaaaggaatgactggcacatcgtgctggtttccccgacatgcctgaatgataaatatcttgggttttccaaccaggctgtgacacttgtctcctttgaacaagccagttaatgtctgaatttcgattttagcatcatatgcataaatgtgattgccttcgccatggctcaggaagacacacacaaagcaatcggcatctgcgtggctaacagttgacacctcatgaattttgagcagtagttcttctgctttaagatcattaaagcatttcacttcaaatcctagatctgaaaacctgcgggtaagattgtctctatctgcgcaggtgccccgcctttctggcagtgttaagtgccaaaagaacctctcatgattgaagattaaagcaattcctctcctcctgtggtccattttgtacttttcttttatagaaggcatctgtttctgtcatgttttcttccccacctgccgggtgccccctgcggagccccgaggccgagctcattgcagccaaacgcgcagccagacaccttgccctcctcttcc

SEQ ID NO: 261963 - DNA, 1287 bp, Homo Sapiens
  misc_feature (386)..(422): n is a, c, g, or t
ttttttgctttttattatgaaaacaaaacaaatgccccaggagaagggtccatgattaccagaaacatcaaagagtactttctaccatttttattctgttgtgttgaggccagcattgcaataaacaagctaaactacttacattggactcattttcagtaactgacatttacaggaatatactagaaacggcactaaaaagtttaagaaaagttacggtaaacttgcatgcacatcatacagaaaagtaacattttaaatataaaaaagaaaaacttcctggaagcattatgccagtattaaggaacagtgctactctggatgtgacaaattctgtatgtgggtgttactctttcccaaaagactgtcagaggcgtgagtgctgnnnnnnnnnnnnnnnnnnnnnnnnnnnnnnnnnnnnntgtgtcttacagtttgtaagcaagatgacactgcccaacacaaagaggggtctggagttcagttcacgcccgaagcctgccccctcggcctccaggggtcattcagagtgttctcaaatccaattccgacacacgacttgtcactactcctctccccttgaaaaaagcatgttagaagctgccctacaggtctcagcagtgggacaatctaattgaatcaccgcagccttctaatacagaagaaacggacgtgactgtcaccctcagcccgccagcaagggcgctgaggaagtcattaatccttcgaaactctgaaaagaaaccagtgttgaagtctggacagaaagccttaaaaaagtgacagcaccaatgcagctgctcagtgtacccgccgtgggctgtcagggtcagtggcttctttctagatgaaaggagcagaggcgagccgacgccaccgtcacagagaaccagccgagaaggaaaggccccacgatgcttcctgtgcgctgcccccacagccggccgctcccccgacggctcacacaggcagcacctcactgccctgtggctggaggggcattgcaaggagcgccccccagccccaggcacccccggcttagggtgtacgtatcacccagccctgtgctggcagcacgttaccaaccagcctgcgtgaagacctgtcaactgtcgtgtgtgaattccttaaattcggtttaaatagtccattaaagatctgtttagaaaatacctttgaaaaacgagggtaactttaaaaaatggaaactttcaaatccatttatatttttattataaacaaaacttaattaaaagtttaacaaactggctgaaaactcaccaagtg

SEQ ID NO: 261964 - DNA, 579 bp, Homo Sapiens
  misc_feature (435)..(498): n is a, c, g, or t
taaatgtgagacagccaaggaagcctaagagaatcaactaagtttgtcttactggaagtaatatgagaattcaatacagtggctatataaaaatcaagacagcagcacacagacctcaactacttttcccatgtaccaccaataactaattagaaaatggaaggaagatcccatttacaatagcaatacaaatgtatggagtatttaggaacaaaaatgcaaagatcttttatctaacaaaaaatatataaaatctatatgatgaaaaccctaaaactcttctgaaagacattaaaaagaaatgagtacatgaggcagcacattcctagaatgttgtacagatgtcaattctcaaattagtctacaaatttaatgtaatcctattcaaatcctcagatagtttttggtggtggctgtttttgagacagggcctcnnnnnnnnnnnnnnnnnnnnnnnnnnnnnnnnnnnnnnnnnnnnnnnnnnnnnnnnnnnnnnnngctcaagcaatcctcccacttcagcctctgaagtctctcatatggtgtccgagaaatggggacaaatctcacaaagggact

SEQ ID NO: 261965 - DNA, 1169 bp, Homo Sapiens
gcccgcccgcccctcccgcccctgcttctgtttcaggatgcagaacgacgtgaagctgccccagggtcagcggcgcaactacgcccatgcgctggatggcctgtaccgcgtagctcgtgaagagggtctcaggagactgttctcgggtgcaaccatggcatccagccgaggggccttagtcactgtgggccagctgtcctgctacgaccaggccaagcagctggtccttagcaccgggtacctctctgacaacatcttcactcactttgtcgccagctttattgcaggtggatgtgccacgttcctgtgccagcccctggatgtgctgaagactcgcctgatgaactccaagggggagtatcagggcgttttccactgcgccgtggagacagcgaagctcgggcctctggccttttacaagggcctcgtcccagctggcatccgcctcatcccccacaccgtgctcacttttgtgtttctggaacagctacgcaaaaactttggcatcaaagtgccatcctgaccagccgtgggaatggctgggctgccaggccagacacgctaggttcttccaaagagtcccaagcccagcacctgctcctggggccacgacctccctggccgtggccacccatcctccgcagcaggcccctgctgtccccccacctgctggctgagctcctcctggcctcgtcccctctcagctgtagctgcaccacccccgctctggctaccaggctctcccggctgggcactgcgtggccttgcccctctcccgctggcagctcctcaggggaacaggggctaccagaggctgatttctcccctctcctgggccaggggaggggtattatccctgcctcctgcccccgatgcccaaagcagcatcttccagcactttccatcgaggacttgggtggcagagtgtgggtgcaccctgcctgctgctcacccaagtgccagctctgaacttcctgtctgctgagagcaaccagaccttccatgtcctcgggcagctgcaactccccgcgagaccccgcaactggggtgggatgaacaagcaacgcagaccacaagcgagtgccttggggaggggatgggcccaaaaagggtctggagccaatgtggggtgaaggggtccagggccaccccgagggccccgcgtactt

SEQ ID NO: 261966 - DNA, 893 bp, Homo Sapiens
ttgtggtcgggccgggattgggctctcctgggccatggcagccgaggcgcgcgtgtcgcgctggtacttcggggggctggcctcctgcggggccgcctgctgcacgcacccgctggacctgctcaaggtgcatctgcagacgcagcaggaggtgaagctgcgcatgacgggcatggcgctgcgggtggtgcgtaccgacggcatcctggcactctacagcggcctgagcgcctcgctgtgcagacagatgacctactccctgactcggttcgccatctacgagactgtgcgggaccgcgtggccaagggcagccaggggccctctccccttccacgagaaggtgttgctgggctccgtcagcggtttagctggaggcttcgtggggacgcccgcagacttggtcaacgtcaggatgcagaacgacgtgaagctgccccagggtcagcggcgcaactacgcccatgcgctggatggcctgtaccgcgtagctcgtgaagagggtctcaggagactgttctcgggtgcaaccatggcatccagccgaggggccttagtcactgtgggccagctgtcctgctacgaccaggccaagcagctggtccttagcaccgggtacctctctgacaacatcttcactcactttgtcgccagctttattgcaggtggatgtggccacgttcctgtgccagcccctggatgtgctgaagactcgcctgatgaactccaagggggagtatcagggcgtttttccactgcgccgtggagacagcgaaactcgggcctctggccttttacaagggcctcgtcccagctggaatccgcctcatcccccaaacggggttactttttgtgggttccgggaccagctaacccaaaaactttgggcattcaa

SEQ ID NO: 261967 - DNA, 649 bp, Homo Sapiens
cagtgccctgagcgtctccatggccttgcctgagcccctcgcagctccagaagttccaacaggatggattcctgggtgctggaaggattcttgtctgcggaagagtgtgtggccatgcaacaaaggattggcgagatagtggctgaaatggatgttcctctccactgccgcacagaattctccacccaggaagaggagcagcttcgagcccagggcagcacagactatttcttgagcagtggtgacaagattcgattcttctttgagaaaggcgtttttgatgagaaaggaaatttcctggtccctccggagaaatccatcaacaaaattggccacgctctgcacgcccacgaccccgtctttcaagagcatcacacactcctttcaaggtgcagaccttggccagaagtctgggcctccagatgcccgtggtggtgcagagcatgtacatctttaagcaacctcactttggcggtgaagtctcccctcatcaggacgcctccttcctgtacacggagcccctgggccgggtgctgggcgtgtggatcgcagtggaggatgccacgctggagaacggctgtctctggttcatccctggctcccacaccagtggtgtgtcaagaaggatggtccgggcccctgttggctc

SEQ ID NO: 261968 - DNA, 814 bp, Homo Sapiens
  misc_feature (793)..(793): n is a, c, g, or t
atttcacctctagctcagatgagagagagaatgggacttcttggtactgattgtttttcccatgcctcaattggtttcttttagggagctacaaatttacgggttcactggtgattgatcttttcatccagcacaatggacagaagtctaaggaacgtccttgtggtttcctttgggttcctgcttctctttacagcctatggaggtctgcagagcctgcagagcacactgtacagcgaggagggcctgggtgtcacagcgctcagcaccctctatggaggcatgctcctgtcctccatgttcctcccaccgctcctcatcgagaggctgggctgcaaggggaccatcatcctctccatgtgtggctacgtggccttctccgtgggcaacttcttcgccagctggtacactttgatccccacctccatactgctgggactcggggccgccccgctgtggtctgcacagtgcacatacctcacgatcacgggaaacacacatgcagagaaagcgggaaagcgtggcaaagacatggtgaaccagtattttggcatcttcttcctcatattccagtcatccggtgtgtggggcaacttgatctcatcgctggtatttggccagactcccagccaagagacccttccagaagagcagctcacgtcctgtggggccagtgactgcctgatggccaccacaaccaccaacagcacccagaggccctcccagcagctggtctacaacctcctggggcatctacactggtacgagcttccatcggcccaggggcagggtncctagcaaaagcagagccaag

SEQ ID NO: 261969 - DNA, 1018 bp, Homo Sapiens
ggcaagggctggtaccgctccggaagtccgggatatcgtcgacccacgcgtcgggcggcgctggcggcggccctgggaccgcggaagccggcatgcgtggagaagctggagttcgaggacgaagcagtagaagactcagaaagtggtgttgacatgcgattcatgaggtcacacaagtgttatgacatcgttccaaccagttcaaagcttgtgtctttgatactacattacaagttaaaaaggccttctttgctttggtagccaacggtgtcggagcagcgccacgtgtgggagagtaaaaaacaaagtttggtaggaatgctaacaattacagatttcataaatatactacatagatactataaatcacctatggtacagatttatgaagttagaggaacataaaattgaaacatggagggagctttatttacaagaaacatttaagcctttagtgaatatatctccagatgcaagcctcttcgatgctgtatacgtccttgatcaaagaataaaatccacagattgcccgttatgtgaccctatcagtgggaatgcactttatatacttacccacaaaagaatcctcaagttcctccagctttttatgtctgatatgccaaagcctgccttcatgaagcagaacctggatgagcttggaataggaacgtaccacaacattgccttcatacatccagacaattcccatcatcaaagcttgaacattttgggggaagacgaatatcaggtcggcggtgggatgggtcaggaaagtgttgaaatttatccaaattgggtattaactgtgcggtgaaaaataatatgctaaattaggggaacgggccttgacgctccagggtttaaaggtgtgcgtgaaagcgggacaggtggcggggagattaaagtgggttgtggggaaaaaaagaatggggtttgcgagaaaggatctcaggggtaaagaagaggtattgaaaatgatcgtaagtggatggaagcgaaagtagattaggttctattc

SEQ ID NO: 261970 - DNA, 913 bp, Homo Sapiens
gggtacggtccggaattccgggatatcgtcgacccacgcgtcggcggcgtccagggaggttgagggctctgaggaggcgttgagaggtttccgtacagcccgaccgtgcggctttggggatcccatcgctctgtgtttcctgctccaggtttcgcgtctcgcatcttcccagaccctcgggcgcgatgtggaggagctgcctccggctgcgggacgggggacgccgtctcctgaatcggccggcgggtggccccagcgcttctatgagtccggggccaaccatcccgtctccagcccgggcttacgccccgccgacagaaaggaagaggttttatcagaatgtcagcatcacacagggtgaaggtggctttgagataaacctggaccacaggaagctgaaaactccccaagccaagctctttaccgtccccagcgaggccctggcaattgcagtggctactgagtgggattcccagcaggataccatcaagtactacaccatgcacctgaccacattgtgcaacacatcattggacaacccaacccagagaaacaaggatcagctgatccgggcagccgtgaagtttctggacaccgacaccatctgctacagggtggaggagcccgagacattagtggaacttcaaaggaatgagtgggatccaatcatcgaatcgggctgagaaaagatacgggtggagatcagcttctccaccagcataatgggaccagcatcctgccaaaactcgggagtgctcgtcagccaccggcatcttaccaccctggtttcccaagcgttgagtttgtacttgccagtcagtcatgtgctaccttgggctgatgactggcctggaatggaacaggcgtgtgtgtagccggggagggccaccagtgggcctgtgggccaattacg

SEQ ID NO: 261971 - DNA, 512 bp, Homo Sapiens
  misc_feature (133)..(133): n is a, c, g, or t
  misc_feature (166)..(166): n is a, c, g, or t
agctcagcccgttaggatgagggtgctgagaggaaacaggaaacaagactgcgaatggtgctcaggcagggagcagggagtggcgtttggcttgcacgttcccatgtggccagatgctggggccacttgtccnttctgtctgctggtgaactgcagtgttcccccnatccttccttcaccacgggggctcctgtgagtctggggggcacctctttctggcctgtgcacctctcttctggcttataaaggtgcctggcctgtgccagcccctccttgttgcgcctcaccgtggggaccaggtgagccggctctcccacgtggttgtcccgggaaagctgccccacagcctcagcatcttcagcacttaccgatccagagccgtcccggccttctccggtgtcctgtaccaactcttctatttaagagaacctcagatgatgtacctgagcctcagggttttgtttcagagggatataaattatttaaaaattaaatgaaaacgttgcacactg

SEQ ID NO: 261972 - DNA, 1294 bp, Homo Sapiens
gctgggtggcgaattcggcacgaggccccgctgactccctgcccagtccaaactccaaggctgggcaaggcactgatccactgctggacagacccggggcagcctctgggtgaacagcagcgtgtccgccggcagcgaaccgagaccagcgagccgaccatgcggctgcacagacttcgtgcgcggctgagcgcggtggcctgtgggcttctgctgcttcttgtccggggccagggccaggactcagccagtcccatccggaccacacacacggggcaggtgctggggagtcttgtccatgtgaagggcgccaatgccggggtccaaaccttcctgggaattccatttgccaagccacctctaggtccgctgcgatttgcaccccctgagccccctgaatcttggagtggtgtgagggatggaaccacccatccggccatgtgtctacaggacctcaccgcagtggagtcagagtttcttagccagttcaacatgaccttcccttccgactccatgtctgaggactgcctgtacctcagcatctacacgccggcccatagccatgaaggctctaacctgccggtgatggtgtggatccacggtggtgcgcttgtttttggcatggcttccttgtatgatggttccatgctggctgccttggagaacgtgggtggtggtcatcatccagtaaccggcctgggtgtgtcctggggcttcttcagcactggagacaagcacgcaaccgggcactggggctacctggaccaagtggctgcactacgctgggtccagcagaatatcgcccactttggaggcaaccctgaccgggtcaccatttttggcgagtctgcggggggcacgagtgtgtccttcgcttgttgtgtcccccatatcccaaggactcttccacggacccatcatggagagtggcgtggccctccttgcccggcctcattgccagctcagctgattgtcatctccacggtggtggccaacctgtctgcctgtgaccaagttgactctgaggccctggtgggttgcctgcggggcaagagtaaagaggagattcttgcaattaacaagcctttcaagatgatccccggagtggtggatggggtcttcctgcccaggcacccccaggagctgctggcctctgccgactttcagcctgtccctagcattgttggtgtcaacaacaatgaattcggctggcttcatccccaaagtcattgaggatcttattgataacccagaagggaaattgggacaagagagggcctcccagggttgttct

SEQ ID NO: 261973 - DNA, 898 bp, Homo Sapiens
  misc_feature (865)..(865): n is a, c, g, or t
  misc_feature (873)..(873): n is a, c, g, or t
gagtctctccttcagagcatggagatggcacacagtggctctctgagggacgaactgtgcctagactttccatgtgattccccagagaagagcttaaccctcaacccccctcttgacacaatggcagatgggttatctctggaagagcaggtcacgggggaaggggctgacagggagctactggtaggagatagcatagccaacagcacagatttgttcgatgagatagtgacagccaccaccacagaatctggtgacctggagcttgtgcattccacccctggggctaacgtcctgggagctgctgcccatagtcatgggtcaggaggagggcagtgtggtggtggagcgagccgttcagaccgacgtggtgccctacagcccagccatctcagagctcattcagagtgtgcttgcagaagcttccagggacccctgtcccttcgagcttggcgtcccctgatgagtctgaaccagactcgatggagagcttcccagagtccctctctgccttagtggttgatttaactccaagatccaaactcagccatccttttgtctcccgtggagaccccctacgccaatgtggatgcagaagttcatgcaaaccgcctcatgagagagctggattttgcagcctgcgtggaagagaggttggatggtgtcatcccactggctcgcgggggcgtcgtgaggcagtactggagcagcagcttcctggtggatctcctggctgtggctgcccccgtggtccccacggttctgtgggcattcagtactcagagaggggggaacggatcctgtgtataacatcggggccttggctcagggggctggttgcgtggttgccctgcattcgctccgncgcaacgncctccgtatcaaaaccttaaataga

SEQ ID NO: 261974 - DNA, 911 bp, Homo Sapiens
  misc_feature (28)..(28): n is a, c, g, or t
  misc_feature (48)..(48): n is a, c, g, or t
  misc_feature (74)..(74): n is a, c, g, or t
  misc_feature (79)..(79): n is a, c, g, or t
  misc_feature (88)..(88): n is a, c, g, or t
  misc_feature (95)..(95): n is a, c, g, or t
  misc_feature (108)..(108): n is a, c, g, or t
  misc_feature (114)..(114): n is a, c, g, or t
  misc_feature (153)..(153): n is a, c, g, or t
  misc_feature (161)..(161): n is a, c, g, or t
taacatcccacattttcatttaaaaagnccccggaaatataaaactancccaatttacaactaaaggtgggtanctgtncaaaccctnaagaatngtaactcttcccnaagagnaattaacagcgtctaaagggggggaaacaaagcatctgngcagtaanaagtcaagctggtaaaatcccaatacagaatatctaataaaccataagttattttactgagaatagattctgctgccctacagcattggtgccaaaactctaagcatagagtgattctactttgaaattatccatagtagaaattaagagtgtcactaattaagcaagtcactacctctaataagcacctgtttgcactgccctcagcagcaggatgagttaatccatgctgttcacttttcagtacagccaagtcaactgcacagacttgaagcagccaagctgggtgagagctgcagagcagagggcagtgaaagaaggcacagtactagtgtcgtgcggcagtagatgctttccatgaatacaccagagaaaaagagctacagaaatacagtctaggaaaagctacatcccaacaaaaatccaaattaaagaaaacccactagggagtaaaacagaagtataaagtatcactttagtggttttttaaattcagttcatacatgaggttaaaacatttttaatagccatttctgtctgtggaggaatgtaaagggaaatggcctgttgtcggacaagccactggactggggttaaaatgagtctcctcctctagccttactctcttcctggcatcattagtgttcaaaaggatgtctgctattccaggaaaacagaccagaagcatctgttcaggatggctatcatcaggattgatacaagcaagaaatgccaagaaatcctgcactg

SEQ ID NO: 261975 - DNA, 1018 bp, Homo Sapiens
  misc_feature (283)..(283): n is a, c, g, or t
  misc_feature (665)..(847): n is a, c, g, or t
  misc_feature (938)..(938): n is a, c, g, or t
aactcagaggggatgaaggcacgaggagtcagaggcctgaggagtcagagcctctagagaagaaaggaaaatatgagggaccaaaagcaaaacctttaaatacttcatctaaaaaatggggctctttttttattgattcagttttgggactggaaaatacagaagactccttggtttatacatggtcttgtaagagaatcagtacttacagcactattgcaattccaagtattgaagcaatccgcagaattaccctctggacctacaaatttacaagattccncttcaagcaattcaaaaacagctggctactatccaaatcctccactggtcttatcaagtgatgagacactgatatccaaataagttgtctttactgaaaaatgaagtgaagacccatatatgcagttaaaaaaaagttaattttcaaaaaatactgtaaaagactttaaggaacaagttttattgaccaataagttgatatttgtccataggtctcctttctataaatcatcttgatgtttaacaactcttattatattaaaatctcagtatcctaaaacttagaaccttattgatattttctatacagtagttttgtgattagaattcacctggggacacacactcacacgcacagtcactcttacacatatgcctagtcnnnnnnnnnnnnnnnnnnnnnnnnnnnnnnnnnnnnnnnnnnnnnnnnnnnnnnnnnnnnnnnnnnnnnnnnnnnnnnnnnnnnnnnnnnnnnnnnnnnnnnnnnnnnnnnnnnnnnnnnnnnnnnnnnnnnnnnnnnnnnnnnnnnnnnnnnnnnnnnnnnnnnnnnnnnnnnnnnnnnnnngctagaacatatcctccagagacttggcttaattggtctgggtaaatatggctgagcgttgttatcttttgttatcttttatatgccctangaaagtacaaccagaattgaaaaccaactgatctataccagttctttcaattaatagtcaagaacattgagtccagtgag

SEQ ID NO: 261976 - DNA, 448 bp, Homo Sapiens
  misc_feature (364)..(364): n is a, c, g, or t
  misc_feature (405)..(405): n is a, c, g, or t
  misc_feature (434)..(434): n is a, c, g, or t
ttggagaacacaggaatagcataaaacctcatagcctgcaaaaatcacttaatctcactggactcaatgttcttgactattaattgaaagaactggtatagatcagttggttttcaattctggttgtactttcctagggcatataaaagataacaaaagataacaacgctcagccatatttacccagaccaattaagccaagtctctggaggatatgttctagccagtgggtctcaaactgtactgtaaatcagaatcacctgacgggcttgttaaaccagattggtaggccttactctcagagcttctgattcagcaggttttgcgtggggcctgcaaatatgcattatcaagttctcagggnaatgctatgctattaggtctatgggatcacactttgagganccactgggactagggcatatgtgtaaggngtgactgtgcgtgt

SEQ ID NO: 261977 - DNA, 1090 bp, Homo Sapiens
  misc_feature (763)..(778): n is a, c, g, or t
  misc_feature (890)..(987): n is a, c, g, or t
  misc_feature (1031)..(1031): n is a, c, g, or t
aaaaaactgttccttccccctttcccctccataatgtaagaagctttggtggcaggttacagagttctgggatttcttctcacaggcccaatcctgaatatgcccctggaccttctggacccttgagtccaaggcagatcctctctcccagggaatccgacacaggaggaaccccttctctggttgagctgggccaggcctaagagtagcaggaactctaagaccacagagttttttataaatgtataaatgtatcaagccaaatgtgcagatgctaactggacattctggggaactgggcaccaggagtgccttcatacactgtaccccagctctcttctaaaagagaagtgggtgggcacactcgaactgtttggtggccccaaccacaggaagctgcaattctctggcttagggtgatacttttgccctccttgtgcccctctcagctttccatccccagctaggaagaaagaatggcactcttgggcttggcccagaattagagttattagagcaagagagagcttaggaagcatgagggcaactatagtgaggccttattgccaggagggagggttttggttgctggcgcttgtgtataaaggggcaagagcagctcctttggactattcctgggaggactctgatgcagggcgtctgttgctcccctgggtcacctcctccctgctcgctgacatctggggctttgaccctttcttttttaatctacttttgctaagatgcatttaataaaaaaaannnnnnnnnnnnnnnngtgtgagggacaaaatgcaaacctatttcccttgcctcataggcttctgggatgtcatcacctccagtttgttggttttgtttccaactgttaataaagcattgaaacagtnnnnnnnnnnnnnnnnnnnnnnnnnnnnnnnnnnnnnnnnnnnnnnnnnnnnnnnnnnnnnnnnnnnnnnnnnnnnnnnnnnnnnnnnnnnnnnnnnnttcttaaacacccttttttaaggaacacagcaaaaaaacggttngggccctcgccccgcgcgggatattaaaaaaaatttctatccctcttgcgggggccgcg

SEQ ID NO: 261978 - DNA, 1488 bp, Homo Sapiens
  misc_feature (1426)..(1443): n is a, c, g, or t
tagagatgtatataggtatttaaaggtcactgggagcgtttctgattcccggccacactttgcatttcaacactcagcccggaaagatgctcgttcggttgttggacctctttcactccctgcgtgtaagaaggtgaatcacgtgggaaaaagtggcttttcagtaaacgggtacagctcattctttctgagaaggccccaggtcctgctccctcctcggatttgattgtcttccgtgctttgcctcactcgtagtaaatgaccatccatagaatatgtgaatctttggtgagcttcagtgggcagagtgaggtcccgcattagcatttaggtgccctgagctgtgtctgccaatagattagaaagcagccatgagttgacagtctttagggcccctgccagtgtgcaattagtcattgacaagaacaatgccatttgagagtgaggtggtccctgctgctgcgaggccattgtactgttttttccttgaggtcaaagcagtgcttcccatagagtttgctgcctcttctgtggacaggaagaaaacttcatgaccgaatcagagccttggtggccactgactctcgtgcttattgcagatgctggggttggcctcacaagcaacgccttatgctgatgtgcagaggtgccagctgccatttgccaaactctgcatttcatttcatctaaggcttaacccctcttccttcctggtgtaccggtgtctcctcggaaggaagtcatagtttagatgaaaccattttttgtacaatgtaaagatcatctgagcaagatgagcattttgtaaaaatgaaaatgtgactcacataaaatcaggaacttgacacagtgttgcattaataactttagggtgcagacatgctgtgtgaatctcacaatgcgtcgtagatgtcgcgtgttggaagggagcaggaggaaggactgatactggcaaatcagtagagtgaggtgatccttagcaacgtgccaggacacttcctgtgtgcctgcagttgtcagggaccatttgggatcccgaatctcattctctaaaactgctttcttgaaacatgttacttccttagtataatcaatgtatactcccttactggcctgaaacgttgtatagctacttattcagatactgaagaccaacggactgaaaaaaaagaacaaacattaacctattttatgcctgcaagaaccaggacacacaattcgccaatcatcccaccatataaccttcgattgtgcttctcaactccaccccataatttctcccagagaccatctatcaccttttccccaaagaagaaacaaaaccagttgcaccttaaaccatggatattttttcctcaggggctttaaatagtttcctatgcaacgtgtcttgtagcacaaataaaattctacaaaagttgcagtnnnnnnnnnnnnnnnnnnctcgagactagttctctccctcgtgccgaattcgccacccaggcc

SEQ ID NO: 261979 - DNA, 997 bp, Homo Sapiens
ggtctaggtagcgaggcctgggtggcgaattcggcacgaggggatttgattgtcttccgtgctttgcctcactcgtagtaaatgaccatccatagaatatgtgaatctttggtgagcttcagtgggcagagtgaagtcccgcattagcatttaggtgccctgagctgtttctgccaatagattagaaagcagccatgagttgacagtctttagggcccctgccagtgtgcaattagtcattgacaagaacaatgccatttgagagtgaggtggtccctgctgctacgaggccattgtactgttttttccttgaggtcaaagcagtgcttcccatagagtttgctgcctcttctgtggacaggaagaaaacttcatgaccgaatcagagccttggtggccactgactctcgtgcttattgcagatgctgtggttggcctcacaagcaacgccttatgctgatgtgcagaggtgccagctgccatttgccaaactctgcatttcatttcatctaaggcttaacccctcttccttcctggtgtacctgtgtctcctcggaaggaagtcatagtttagatgaaaccattttttgtacaatgtaaagatcatctgagcaagatgagcattttgtaaaaatgaaaatgtgactcacataaaatcaggaacttgacacagtgttgcattaataactttagggtgcagacatgctgtgtgaatctcacaatgcgtcgtaaatgtcgcgtgttggaagggagcaggaggaaggactgatactggcaaatcagtagagtgaggggatccttagcaacgtggccaagacacttccctgtgtggcctggcagttgtcacggaaccattttggggatccccgaatctccattctctaaaaaactggttttcttggaaaactgggtaacttccccttaaggaaaaaaccaatggaataactcccccttaactgggcgccggaaaaaggtggggaataggcctacctttatt

SEQ ID NO: 261980 - DNA, 445 bp, Homo Sapiens
  misc_feature (411)..(411): n is a, c, g, or t
aagaaatatccaaatgaaatttactgcaacttttgtagaattttatttgtgctacaagacacgttgcataggaaactatttaaagcccctgaggaaaaaatatccatggtttaaggtgcaactggttttgtttcttctttggggaaaaggtgatagatggtctctgggagaaattatggggtggagttgagaagcacaatcgaaggttatatggtgggatgattggcgaattgtgtgtcctgggttcttgcagcataaaataggctaatgtttgttctttttttcagtcccttggtcttcagtatctgaataagtaggctatacaacgttttcaggcccagtaagggaagtataccattgattatacctaagggaaagtaaccatgtttccaaggaaagccagttttaggnggaatgaggattccgggatccccaaatgggtccc

SEQ ID NO: 261981 - DNA, 1723 bp, Homo Sapiens
  misc_feature (925)..(979): n is a, c, g, or t
tctttatagcacttattaacatgtcccacagtacatttattacatcttctactttctagaatgcaaattccttgagaacaaagactttacgcttgattctctcctgtatccccagtacctagcatagagcttgacacatagtaggtgatgaacaaacacctgctgaatgcaagactgttgtactgagcaaccatccaacgggggctgtaagcggcatgtaggctttgtttcttgggtaacctcccctccttaatccttctggcataggcagactcacagcaggtacccagtagaaggtaaggtggctgatcatttttccataggaggtctccatggcacacagggtagaaagtgcattctgtgaattagaggcagcagagcatggcagctaatggaaactggctctgggaggtcaaattctggcttaacaccaccagctgggcagccttgggaaaattatgacaattctcagggcattaatttttccttgtgcagaaagagaaggataatgacagctcctatttcccagggctggggaataaataagagaatgcccccataaagcaattagcaagcacagtgcctggcatggaggtgacgagcaacgagaagcagtcaaattaatcaacagccacatttgtgcctttgtctcttccaagtttacaacgtgctcttatatacatgctttagctgatctgggcctttgaacaacctgtcggtttttatcaccattttataggtaagaaaattgggtcagaggaaaaagtgctagctcacagaacacaactgaattttgctagaacttctggtgccctttctttcagaacacaagtgattattactgctgatatgaatcaaggtgatttggagctgggcatgcagtctcagctaccagagaggctgaggcagaaggatcgcttgagcnnnnnnnnnnnnnnnnnnnnnnnnnnnnnnnnnnnnnnnnnnnnnnnnnnnnnnnagacagagcaaggccctgtcttggggggaaaaaaaattaggccgggccccactggagccccagactctaaagtgtgtgcctagtgtaaggctgtggatggcaaatgaattccaaaatgaaatcagccagccagctacaggcttacaacctagtggtggcagggagtgtacgggctccctcatctgcagctccttctctggatgaggcttgagagcaagtctggacaggcaaaccatctctcagtccacccaggacttaaaacacttcattgttttcccaaaagggaaaaatagcaaagccctttctgtacagtttctcctgcttagagttgggtggcagctctatacagcaaatgctgactttgctgtttgagatctttgatacagtgtgacctctgagctctgaaccaggctgcccctgacaaaaaaagtgtttcctcccacaggtaaacaaggaagaaggcactgcaaggagctctgggcctggctcagtggaggctctgccacctttccaggatcaaaggccaagggaggtgacatggcaaggaaaagatctacaggggtcagacaaggaattttagaaccacaaggtcaaaaaaccatgggctctcaggagtcacagattattaaaactgcagcatttgagaccaaaacactcatgacttagagcaccttaagcctcatggtgttggcagagattacattggaagggaagagtcaacccacgcgtccgcccacgcgtccg

SEQ ID NO: 261982 - DNA, 411 bp, Homo Sapiens
aaaaccctctaaaagttgtcagtagcagatccaaaaacttataataagagagagaataaagtctttcttccctttccttttcccactgtggtattagatattggtgttttaaaatgaaaccaaaaacaaaacacgcaagtaagagttactaaaagtgcaaacatggtgggcaccacttatgttacacgggatgtggcagggccatgggcaacgctgaaggttaggtgtctggtgatccatcctgcctccctggactctccacctgcccttgggttttctgctccttagacgaggcgtccttctttgctaacacccaggcagcccttcagctcaggcagtgaaatgaccttgtctttgttcaggtcacagtagtcggtgaaacgccgggcacatttcttgggcttggctttc

SEQ ID NO: 261983 - DNA, 778 bp, Homo Sapiens
  misc_feature (62)..(62): n is a, c, g, or t
  misc_feature (130)..(130): n is a, c, g, or t
  misc_feature (136)..(136): n is a, c, g, or t
  misc_feature (171)..(171): n is a, c, g, or t
  misc_feature (206)..(206): n is a, c, g, or t
ttgtcaagggtggaggggcccctccctgaaaaggcccagacccctagccttgttgccccgtnccccccgagggaccaggatcaggtccccgcctgtatagggccctataaggcagggaaagtaggtgccncccccnatgggtgaagggattccctgttgttttgggaaacncccaccctataggctggcctgcatgggagggaatnccccaaaatccccagatgaccgtggtgtgaggtcaatggggatgagaaacactggtattttcctttacaatttcattttacaaagagcacattaaactaaaattttatgaattatgacttaatctaatagttcaacagcagactcaagaaaagcacagatgtgattctaacagaagactactcatataaacaggtttaatgcaacatggaatgcaaaagattagaaccattaaaatatttaattcttcaactttaaaaaattaaataaaatcaaaataggataatgaccagaatagtgccattataatcacatcaaaaagcttccattaacattttatgaatttggcaatctagtacaatacattaagtattgtgtttcactcaattttgtgatactccatttttgaaaaaacttagaggcttcagatacccatgaaaagaaaaaaatcagggtagaaacacataggctgaggtttgctaattcactgtttacagaggaccttagatgtcccactataattgctcttaggtatttttaacaaatgaatagtcataattcacagaaaagaccc

SEQ ID NO: 261984 - DNA, 699 bp, Homo Sapiens
catttttaacaagaaccccaaggtgattctgctgaaagccataagactaataatggaaaaagcactggggtagaagtaagaagacttgtttagtaaaggtagctcctatccttagcagtttcacctcagataaacatttaagtttctcaatcttttaagtggcattatgtcttattctatatactggagagagaaatatataggtatataaaacatatagccatatttaattcctgacacccccaaatcttgtaaaaatatggctatatggagggtatagcaaggtcacagtgcttactagttgcagagttagaattgaacccaggtgaaatttcagatgagctcacaaagtagtaacttgcggttcaaatacagcctggtatgttttgtttaatttcattattttagacttcaagccaacatttatcaattagaacatttcacagaaaaggaatctgaattcctggctgcttttaacaattttagaagatccagcaacactgagattataatcttaggtggcaacaattaccttctctaaacacagcaaaactcacaccacttgctattgtctcacactcactcaatttcaacaacgtatgctatcatcgggccccaactcctacttcaggtctacattctttgctccctccttttgaaccaaatgggatttacaagaaaaccaagtgggatttctat

SEQ ID NO: 261985 - DNA, 480 bp, Homo Sapiens
ttctgcgtgggaagagtgtatcacagccattgggaactttcttcacccatcaaagcctcagggctgaagcatcctgaacaagaactcaggagagtgaaagaaacagttacctgtcggctgcagctggtaccagctccccaccccgtacagagaccgaagcgtcctctctctccccatcacccagcaccagactctgccccgcgacctcagcctgcacctgcttcctggctccatccagccttccagcctcactagatcatcatgggccactggccaacacacagggcagtgccgagcccaggccgtggtcacacatggctgggttagtagctgaaaacattgtttttcactggcctcacagtaatggcacctgcccccattttctgtgattgaatttttggatcctgctaccaggttatgatagattctatggtatgtctcaagatattgagataaaggtaataaaacagctataaagtc

SEQ ID NO: 261986 - DNA, 469 bp, Homo Sapiens
agacaagaaaacaaccagggaaggcacacagccctgtggggaggcgttggggcgtgaggttgagagagacagagtggcctggctggctgccctgtgagctgggtgagttggcactgattctggaagatggacgtgaatgggcgtggtcacttgtcgctagatcctgggaaacgctgctgctgtttgacatcgcacagtcagaagggatcgtctcagccagcctgcagcatctgtcactttgaccatgagacgctgcctcgatttccaatccaggtgcaaagcttcagataggagtttgggaagcacagcaatccccatctcttatttttttcaactttcattccaagaaaataggaccttgagtccaattcccagagctgagacttgaggtccaactctgccttcaccttgcacccggccctggaggtcttgggcccctttattccagctcccgcacaggctgatgccc

SEQ ID NO: 261987 - DNA, 787 bp, Homo Sapiens
atttcaaacatattaaggagaaaaccttgaacattattggaaaatataaactagttattccttgcttttaacagatgagttcttgacaagttttgtgtaaagcaaattctgtaaaccattatcttgcttgcactggaggaacatatctcaaggaaacctaagagaaagtgttctttaaagcatgtgattctcctgtttttgctggatgtctgtatctacataataaacaggcacacttctacatcactgggtattttactcagactgtcatgtttcatctctgtaaattaaacccaagttacttaaaaatcacctgtggtaaaagaagcaagcagatcacccccacctactatccctcccgcctcccccctgtcaaaagaaagttctcagtttatgatgcaaaacttacaattgttcatttatccacattctcaatagaggattttccactatatttaagtatggcaggataattacccacctgttcctcttttcagcttagaaacataacggttcattccttttattgctagagaatgtcattcctgaagattttataaacaaaggcaaatatgaaggaaaatttgtaattatgaaataagtcctttgtagtaaagaatatttcccaaatcataacagttctatttggaatggtacccacaactctacaagcatcttatccctctacaggaatgactaccttattaattaaaataaaaatttaacaaggatcaaaataaaattctttagcaatagactcctgcaaaaataaaaactaaaactagac

SEQ ID NO: 261988 - DNA, 1634 bp, Homo Sapiens
  misc_feature (1574)..(1574): n is a, c, g, or t
ggccacatcccccttccttctcgggccccagttctctctctacctagtggacgagcgccttcccctggtgccgatgctgaagtggaaccatggcctcccctccccgctcctgctggcccgactgctgcctccgccccggcccagctgcgtgcagcccctgctcctcggaggccagggtgggcagctgcagctgctgcacctggcaggagaaggggcgtcggtgccccgcctggcaggccccccccagtctcttccttccaggatcgactccctccctgcatttcctctgctggagcctaagatccagtggcggctgcaggagcgcctgaaagcaccgaccataggtctggctgccgtcgtcccgcccttgccctcagcgcccacaccaggcctggtgctcttccagctctcggcggcgggagatgtcttctaccagcagctccgcccccaggtggactccagcctccgcagagatgctgggcctcctggcgacacccaacctgactgccatgcccccacagcttcctggacctcccaggacactgccggctgcagccagtggctgaaggccctgctaaaagtgcccctggctcctcctgtgtggacagcacccaccttcacccaccgccagatgctgggcagcacagagctgcggagggaggaagaggaagggcagcggctgggtgtgctccgcaaggccatggcccgagggcagctcctgctgcagagagacctgggctccctccctgcggcagagccaccccctgcacccgagtcaggcctagaggacaagctcagtgagcgcctgggggaagcctgggcaggccgaggggctgcctggtgggagaggcagcagggcaggacctcggagcctgggagacagaccaggcggcccaagcgccggacccagctgtccagcagcttttcgctcagtggccatgtggatccctcagaggacaccagctcccctcatagccctgagtggccacctgctgatgctctgcccctgccccccacgaccctgccctcccaggagttgactccggatgcatgcgcccagggcgtcccatcagagcagcggcagatgctccgtgactacatggccaagctaccaccccagagggacaccccaagctgggccaacacaactccccactcccaggcctccagcgtccgggccactcgctcccagcagcacacacccgtcctctctagctctcagcccctccgtaagaagcctcgaatgggcttctgaggacacaaggtgggctgccctcaagccccagagagcccctcatccttcctctgggaccagatgtgccttccacagttgaaacttgagaagcagagctcgccaccttctggaggccactgtgatgatgagccaagcaatttggagccaagttgaagggacagggcaacaaaatacagtagtagtttcttttgtattttgtatattcgcctgaagatcatcccgcaaggcaggctggaggtgccggtgggcctgtgttgctgggattttagtctgtgctgggaggcagggctccgctgcgcctcagctgtgggggcctcangcaggtccctcagttctcacgccttcctgtccagtggaatgggggccaggagtgctggct

SEQ ID NO: 261989 - DNA, 238 bp, Homo Sapiens
attcggcacagtaagaaacaatagctctggagagatcatctttggaaaattaatattttccccccaaaaaaatacctaagaacatattgatttgaggtagctaggtaggtaaagcatgaaactcctaacctcgtgataatggaatacagcctcttttggagagttccattttaagtggcaccctcaaccattgatttgccttagtttacatattttagacacattcatgtgttcattc

SEQ ID NO: 261990 - DNA, 1350 bp, Homo Sapiens
  misc_feature (770)..(770): n is a, c, g, or t
  misc_feature (817)..(817): n is a, c, g, or t
  misc_feature (1297)..(1297): n is a, c, g, or t
  misc_feature (1308)..(1308): n is a, c, g, or t
  misc_feature (1319)..(1319): n is a, c, g, or t
  misc_feature (1330)..(1330): n is a, c, g, or t
gatggtgtgagccacgggctgccgggggcctggggctcggcgtcggtccccgggggatgtggagagctggcagcatgtcggccgagctgggagtcgggtgcgcattgcgggcggtgaacgagcgcgtgcagcaggctgtggcgcggcggccgcgggatctcccagccatccagccccggctagtggcggtcagcaaaaccaaacctgcagacatggtgatcgaggcctatggacatgggcagcgcacttttggcgagaactacgttcaggaactgctagaaaaagcatcaaatcccaaaattctgtctttgtgtcctgagatcaaatggcacttcattggccacctacagaaacaaaatgtcaacaaattgatggctgtccccaatctcttcatgctggaaacagtggattctgtgaagttggcagacaaagtgaacagttcctggcagagaaaaggttctcctgaaaggttaaaggttatggtccagattaacaccagcggagaagagagtaaacatggccttccaccttcagagaccatagccatcgtggagcacataaacgccaagtgtcctaacctggagtttgtggggctgatgaccataggaagctttgggcatgatcttagtcaaggaccaaatccagacttccagctgttattgtccctccgggaggagctgtgtaaaaagctgaacatccctgctgacccagttgagctgagcatgggcatgtccgcggatttccagcatgcggttgaagtaggatctacnaatgtccgaataggaagcacgattttttggagagcgggattactcanagaaacccaccccggacaagtgcgcagcacacgtgaaggccccccgctggagctggcacaggagcactgagccagggaatactgagagcactaactatgcactaacctacattttcatttcgatattcccgggggcccagcgcagtcctgctctcctgtgacctgtggagagcactaatgatcacgtgtgttgatggaaaccatctgtgcttagtctctgacataggaagcttgcttcaggcaatggctttgggattggagtttgagaaattcaaacatttctgcagaacagattaccaaatcaatagctaggaatcatgttcaatattgaattctgcccaggagcatgaactgatccatgaatgccttttccaggttaaaatttggtcactgatgcctataatcgtggaagtcagagggattcccctttttcatcttcattttaatagggaaaattccttatggttaaacatctccctnacaaactcctnactacgtcgtnttaaattggcnggctctgggaataaggtgga

SEQ ID NO: 261991 - DNA, 503 bp, Homo Sapiens
  misc_feature (395)..(396): n is a, c, g, or t
  misc_feature (398)..(398): n is a, c, g, or t
  misc_feature (402)..(402): n is a, c, g, or t
  misc_feature (427)..(427): n is a, c, g, or t
  misc_feature (492)..(492): n is a, c, g, or t
gctagttaaaaaaatttatgggctacaattctttataatttttctgaaagaccaccaaataataataaacatgaggttgggtaggtttccaagtatatataacccagaaaatggtgaattcattctgttcttggcatgatgttttctctttttattaagaactcagactttcccatcaatttgttgacattttgtttctgtaggtggccaatgaagtgccatttgatctcaggacacaaagacagaattttgggatttgatgctttttctagcagttcctgaacgtagttctccgccaaaagtgcgctgcccatgtccataggcctcgatcaccatgtctgcaggtttggttttggctggaccgccactagccggggctggatggctgggagatnncncggncgccgcgccacagcctgctgcacgngctcgttcaccgccgcaatgcgcacccgactcccagctcggccgacatgctgccagctctctccncgtgccgaatc

SEQ ID NO: 261992 - DNA, 2658 bp, Homo Sapiens
  misc_feature (423)..(423): n is a, c, g, or t
  misc_feature (2265)..(2265): n is a, c, g, or t
  misc_feature (2274)..(2274): n is a, c, g, or t
  misc_feature (2588)..(2588): n is a, c, g, or t
ggcctgggtggcgaattcggcacgaggcttggagagaaattggcagagaacaacatcaacctcatctttgcagtgacaaaaaaccattatatgctgtacaagaattttacagccctgatacctggaacaacggtggagattttagatggagactccaaaaatattattcaactgattattaatgcatacaatagtatccggtctaaagtggagttgtcagtctgggatcagcctgaggatcttaatctcttctttactgctacctgccaagatggggtatcctatcctggtcagaggaagtgtgagggtctgaagattggggacacggcatcttttgaagtatcattggaggcccgaagctgtcccagcagacacacggagcatgtgtttgccctgcggccggtgggattccgggacagcctnggaggtgggggtcacctacaactgcacgtgcggctgcagcgtggggctggaacccaacagcgccaggtgcaacgggagcgggacctatgtctgcggcctgtgtgagtgcagccccggctacctgggcaccaggtgcgagtgccagggatggggagaaccagagcgtgtaccaaaacctgtgcccggaggcagaaggcaagccactgtgcagcgggcgtggggactgcagctgcaaccagtgctcctgcttcgagagcgagtttggcaaagatctatgggcctttccgggaatgcgaaaacttctcctgtgccaggaacaagggagtcctctgctcaggccatggcgagtgtcactgcggggaatgcaagtgccatgcaggttacatcggggacaactgtaactgctcgacagacatcagcacatgccggggcagagatggccagatctgcagcgagcgtgggcactgtctctgtgggcagtgccaatgcacggagccgggggcctttggggagatgtgtgagaagtgccccacctgcccggatgcatgcagcaccaagagagattgcgtcgagtgcctgctgctccactctgggaaacctgacaaccagacctgccacagcctatgcagggatgaggtgatcacatgggtggacaccatcgtgaaagatgaccaggaggctgtgctatgtttctacaaaaccgccaaggactgcgtcatgatgttcacctatgtggagctccccagtgggaagtccaacctgaccgtcctcagggagccagagtgtggaaacacccccaacgccatgaccatcctcctgggctgtggtcggtagcatcctccttgttgggcttgcactcctggctatctggaagctgcttgtcaccatccacgaccggagggagtttgcaaagtttcagagcgagcgatccagggcccgctatgaaatggcttcaaatccattatacagaaagcctatctccacgcacactgtggacttcaccttcaacaagttcaacaaatcctacaatggcactgtggactgatgtttccttctccgaggggctggagcggggatctgatgaaaaggtcagactgaaacgccttgcacggctgctcggcttgatcacagctccctaggtaggcaccacagagaagaccttctagtgagcctgggccaggagcccacagtgcctgtacaggaaggtgcctggccatgtcacctggactgctaggccagagccatgccaggctgcgtccctccgagcttgggataaagcaaggggaccttggcgctctcagctttccctgccacatccagcttgttgtcccaatgaaatactgagatgctgggctgtctctcccttccaggaatgctggcaccccagcctggccagacaagaagactgtcaggaagggtcggagtctgtaaaaccagcatacagtttggcttttttcacattgatcatttttatatgaaataaaaagatcctgcatttatggtgtagttctgagtcctgagacttttctgcgtgatggctatgccttgcacacaggtgttggtgatggggctgttgagatgcctgttgaaggtacatcgtttgcaaatgtcagtttcctctcctgtccgtgtttgtttagtacttttataatgaaaagaaacaagattgtttgggattggaagtaaagattaaaaccaaaagaatttgtgtttgtctgatactctctgtgtgtttctttctttctgagcggacttaaaatgggtgcccccagtgggaattggaagcggccgtgtacttccctcagggatgggacacaggctggtctgataactccagactgncagcttgtncaagtaaggcatgaggtgctccggggcagtgagggctgtgcaagggggaacactgagcagatacctttggccccttccagcttttactgacagagagttccaggctagacaccataaaaaccaccccttgttctgaggggctgaggctggaaatagattgtacagacaagcaagggttgagtggtggttcccacacgaagtcatctcttaatcatcattagcaatagcagttcccttccaaggcctcccctcactcccgaaacacttacgtcccatgcaggcccaatgcaaaaaaacacatttgagcttttttnccgcagggccatgaagtccccttaagttcccatatctaagatggttgactgaccctctccccttatgtac

SEQ ID NO: 261993 - DNA, 436 bp, Homo Sapiens
  misc_feature (12)..(12): n is a, c, g, or t
ggcccaaatccnagcctggtggccccccaatgaaaatacctgagatgccggggctgtcctcctcccctcccccagaatgctgggcccccccagccctggcccagacaagaagactgtcaggaagggtctggagtctgtaaaacccagcatacagtttggcttttttcacattgatcatttttatatgaaataaaaagatcctgcatttatggtgtagttctgagtcctgagacttttctgccgtgaatggctatgccttgcacacaggtgttggtgatggggctgttgagatgcctgttgaaggtacatcgtttgcaaatgtcagtttcctctcctgtccgtgtttgtttagtacttttataatgaaaagaaacaagattgtttgggattggaagtaaagattaaaaccaaaagaatttgtgtttgtctgataaat

SEQ ID NO: 261994 - DNA, 685 bp, Homo Sapiens
gagcggcgggcgcggccgggccgccatggaccacaagccgctgctgcaggagcggccgcccgcctacaacctggaggccggccagggcgactacgcgtgcggcccgcacggctacggcgccatccccgccgcgcccccgccgccgccctacccctacctcgtcacagggatacccacccaccatcccagggtctacaacatccacagccggaccgtcacccgctatcctgccaactctatcgtggtcgtaggaggctgtcctgtctgcagggttggggtgctggaggactgcttcaccttcctgggcatcttcctggccatcatcctcttcccctttgggttcatttgctgttttgccttgaggaagcgacgatgccccaactgtggagccaccttcgcttaaagggaacaccaggcccggctttcctacacccagctctctttttctaatgtaaatgttgtgtacaatagttttatttgattaagcttcaggactgttttgtaaagcgaggtgggaccgatgtggcacacgccagctgcggtttcccggagcgtggagaggcagtgctgctgctcccgcccgaggctcatgacaactcaataaagcactgcttttattttttgcagtcttcaatttgagaaaggtgagaaataatgttttcaataaatgagattcataccatta

SEQ ID NO: 261995 - DNA, 862 bp, Homo Sapiens
aaattccaaagtgcaatcctcaaatttaaactcgtcataagtcaagagtcccgatacatgaagcacccgcaagcccagtgcccacccaccctttccctaagcacatacaaagtatgagcgtgcttcaatcttggaatacaatcaatgcttcttcatctgtggagttcatttcagtgctgtacaagactcaataatcacctgacctgagcctccaattaactgaggagaaaccgggctggaggagagggctggttgctattcagacttgataatgagattgatctgtcccatggagagtgaaagttcagttccacttctgcctccttctttccatgctgtcctcatgctctttatcctcacttcctcagtcccttcaacactcaaaatctgattttatttctctctcacacgtatcaggggcagtttctgaagttgctgaggttgaattttcttcacaaacctctataaaacatcagcagagaacatataaatacattttgattagcatacattgcaaaatttctcccacaatgtcaggggatgaaagcaggtggtccccactgagagtacttcctggattagatccttggaatgtcagtttcctgcctgatcatctcattttcattcctcaaatcagaacatgaattccatcttgagttaacttctcctccagagtatcaaagcatcattcctgctgcttctcctctagcgctgattcaacaggatgtgcttcatctttcgcactgtgaggatattctttggggtcaaaagccccttcctggttatctggtcgtctggcaatgtactcattattgtccccgcacgcgtgggtcgacgatatcccgtacttccggccgtacca

SEQ ID NO: 261996 - DNA, 626 bp, Homo Sapiens
ttaaaaattaaaaaaagaataaggaatccctatctgtggtggttgaactctataggatgaagtgtgagattactactcaggatagaaatggtttgtatctgtcatttttgttcaagtcctctttatatttggttccattgaggaaaaccaccctctctaatcaggagatcacgttctttctgttatcctagtcattttgtagagtgtgttctggcccatgggctgtgtcaatcatacttaataaaatgataggcctgaatggagcattcaagtttctctagtgcaatcctctaattttacagattttaaaaaaccaaggcccagagaaggtaacacctatttcaagaacacgcagccagcctgtgcaaaggctcatatccttactgacattaaaaaggaggcaaaagagtaattcgattcagatttgggagaacaaaggattgtgtttatacagatggctgtgagtggaggaggaaggtagacactggagaaggaaaagctgtccagtgcccagttgtgcagatgttttcactcagccccagctgcctgcttgatttccaagcaagctgaccagggcctccaggagcctactgggtttccgcagcacaaggccttatgctggtgac

SEQ ID NO: 261997 - DNA, 827 bp, Homo Sapiens
  misc_feature (675)..(675): n is a, c, g, or t
  misc_feature (677)..(678): n is a, c, g, or t
  misc_feature (685)..(685): n is a, c, g, or t
  misc_feature (688)..(688): n is a, c, g, or t
  misc_feature (691)..(693): n is a, c, g, or t
  misc_feature (695)..(697): n is a, c, g, or t
  misc_feature (753)..(753): n is a, c, g, or t
  misc_feature (814)..(814): n is a, c, g, or t
tcctgtgagcccggcggtgacaacggcaacatggccctgaacggagctgaagtcgacgacttctcctgggagcccccgactgaggcggagacgaaggtgctgcaggcgcgacgggagcggcaagatcgcatctcccggctcatgggcgactatctgctgcgcggttaccgcatgctgggcgagacgtgtgcggactgcgggacgatcctcctccaagacaaacagcggaaaatctactgcgtggcttgtcaggaactcgactcagacgtggataaagataatcccgctctgaatgcccaggctgccctctcccaagctcgggagcaccagctggcctcagcctcagagctccccctgggctctcgacctgcgccccagcccccagtacctcgtccggagcactgtgagggagctgcagcaggactcaaggcagcccaggggccacctgctcctgctgtgcctccaaatacagatgtcatggcctgcacacagacagccctcttgcagaagctgacctgggcctctgctgaactgggctctagcacctccctggagactagcatccagctgtgtggccttatccgcgcatgtgcggaggccctgcgcagcctgcagcagctacagcactaagagaagcccctgagaaaaaccctctagaaaaacagccggaaaaangnnggggagncgnggnnnannnccatggtcgggccgcctcggccctcgagagaagcgttctaaaaccttcctgtgggnggcgcggggccccaatgggggaaggggaacatgggccatagcggggttgcctagggaaatnctgggccgtgaac

SEQ ID NO: 261998 - DNA, 419 bp, Homo Sapiens
actgtttgagctaatttgaacaaaattatgaaccttacaaccaggacttttctcttttctttgcagtgtgcgaatctccagggagtcaagatgctctgttctaatgcagaaggagcatccctgaaactgtgtaattttgaggatccttctggtcttaaagccaatttagaaggtgagatcctttctgtaaacacctattctacgaaggaagcagactgtaaaggaaaaagccctggaaaataattgttaagggtgaaacaggatagctgtaggggataggtttcttctgtcatcatatttggagaacttccaaagtggtaagaaacctccatttggtttcagtcaaatgctaatcaaaattgaggactcagaaaaaataaaacctcaaatatttaataaggttttagttggaaaattaa

SEQ ID NO: 261999 - DNA, 607 bp, Homo Sapiens
gcatctcaccgcagaggaggagcgggggctcagtgggggaacagtgacggtgacctggacccccgcaccaggccagctccggcccccagcaggacagacgcgggcgaggcagtgccgcgcatgagcactcggtccacagacaggcccgtgtcagtggctgctgctgtcctttgataacgaccgcagcatctggaaaacgcggcaggcactttggaggaaagaggaacctgggtcctgcaggaaggagggtctgaagcggaaagaaatccctggggcctcagggagtgagtggaaggcaaggagctaagacggggcacgcgggcctctccgggaaccatggctccctccacctcgagggccatgccacagggccccggccattctcaccagagccccgtcccagggaggtggcgtccgcagagcctattgcctcccttgggctgataggacaacaagtgaacgttcactcacggagggactcgctggatgctgaattctgagcagggtgagaggtgagccctagcgtcaaggtgatgagggaactaggtcccaccttcttaccttcttatacggctttttaattttggcaaaatcgttgaaatagtct

SEQ ID NO: 262000 - DNA, 657 bp, Homo Sapiens
cgaggacttggctgggaaggtctttgtcacctctgggctcggcggaatgagtggggctcaggccaaggccgcagtcatcgtggggtgcatcggtgtgatagcagaggtggataaagcagcccttgagaaacgccacaggcagggctggctgacggaagtgactgacagcttggaccgctgcatccagaggctcagggaagcaaggaaaaaaaaggaggtgctcagccttggttaccatggcaacgtggtggctctttgggagcgcctggtccacgaattggacacgacgggggagtgcttggtggacctggggtcagatcagacatcctgccacaacccgttcaatggcggctactaccctgtgcagctcagcttcacggaggcccagagcctcatggcctccaaccctgctgtgttcaaggacctggtccaggaaagcctgaggaggcaagtctcagccatcaacaggttggccgaggagaagttcttcttctgggactacggcaatgccttcctcttggaggcccagagagcaggagcggatgtggagaagaaaggtgctggcaggacagagttccgctacccttcctatgtgcagcacatcatgggggacatattctcccaaggatttgggcctttccgctgggtgtgcacatc

SEQ ID NO: 262001 - DNA, 603 bp, Homo Sapiens
  misc_feature (242)..(268): n is a, c, g, or t
  misc_feature (531)..(554): n is a, c, g, or t
gtaggatgtcctcatgtctcttcatctctgctcctgtgtcatactcattatatagcaaacattcagcaattattagaatggttgcttctatcgacaggtaggtgggtgaatggatggatgaatgggttagtgaatgttctactattatctctcagacagctgtttcattttccaaacggctgtctgagataaataatattgtaatctccaaggacagaagaaaaaactaaggttcaagattnnnnnnnnnnnnnnnnnnnnnnnnnnntgtcatctgactcgagacttgacacaatccagctgttgctggccctctgctctaggccacagatatggctggacagagaaaggagaactccagtgaccttgcagtacatccacaaaaaatgagcacttttgtcctggggcagtggaacattcactgcagtgtatgtgtgcctatgtgtatgtgtgtgagagtggctgaaagaccctgatttgatatttttgataaaatacacctgggttagcatcctagatctaccttatttnnnnnnnnnnnnnnnnnnnnnnnnctgtgtggtcttgtgagtcaaatcattacccctctctgagcttcacatg

SEQ ID NO: 262002 - DNA, 665 bp, Homo Sapiens
  misc_feature (111)..(124): n is a, c, g, or t
aaatgtcctgcgtgtttcccagagtgtctgtcctaacaccgcttaaagattagccactgctagacagtgatcctcaggtatatggtctcaggattggccccaagcacacgnnnnnnnnnnnnnnataaatatatcttcacaaagcataggtacccattaaagccatattgctttgctgaatggttctaatagctacagatgatttctagcctgaaagaaaagcaccacgaattgtttgaagttgacttgtcagatgtggcatgcttggtctaagttttgacaggaagggtatgtgggtaggggtgtacggagcatctcatgagaccagttctcctcctgagaggtccgtgatgttggaactgttgccccagatggactttgcccttgtgagactttatacttttcaatggagtttttccctctttaaaactcgccagcttttatgtagtgttttataaaattacaggaataaaaagaatatcttttatgctttttaaccaatgaggggagagggagaaattatttgtcctctgaaatgaatgcaggttttcaatttctagccaggacagtttgctgcaaaatgcacccgtgttgacaacttgtgactggcagaacaaatgacatttgtggtgaacattttcggatcatttcgaatgttcttctct

SEQ ID NO: 262003 - DNA, 1678 bp, Homo Sapiens
  misc_feature (855)..(855): n is a, c, g, or t
gggacttttgaaacgcttggcggggaagtgctgttggagccgctgtggttgctgtccgcggagtggaagcgcgtgcttttgtttgtgtccctggccatggcgctgcagctctcccgggagcagggaatcaccctgcgcgggagcgccgaaatcgtggccgagttcttctcattcggcatcaacagcattttatatcagcgtggcatatatccatctgaaacctttactcgagtgcagaaatacggactcaccttgcttgtaactactgatcttgagctcataaaatacctaaataatgtggtggaacaactgaaagattggttatacaagtgttcagttcagaaactggttgtagttatctcaaatattgaaagtggtgaggtcctggaaagatggcagtttgatattgagtgtgacaagactgcaaaagatgacagtgcacccagagaaaagtctcagaaagctatccaggatgaaatccgttcagtgatcagacagatcacagctacggtgacatttctgccactgttggaagtttcttgttcatttgatctgctgatttatacagacaaagatttggttgtacctgaaaaatgggaagagtcgggaccacagtttattaccaatttctgaggaagtccgccttcgttcatttactactacaatccacaaagtaaatagcatggtgggcctacaaaattcctgtcaatgactgaagatgacatgaggaaaataatgtaattgtaattttggaaatgtgggttttcctgaaatcagggcatctatagttgatatgttttatttcattggttaatttttacatggagaaaaccaaaatgatacttactgaactgntgtgtaattgttccttttatttttttggtacctatttgacttaccatggagttaacatcatgaatttattgcacattgttcaaaaggaaccaggaggtttttttgtcaacattgtgatgtatattcctttgaagatagtaactgtagatggaaaaacttgtgctataaagctagatgctttcctaaatcagatgttttggtcaagtagtttgactcagtataggtagggagatatttaagtataaaatacaacaaaggaagtctaaatattcagaatctttgttaaggtcctgaaagtaactcataatctataaacaatgaaatattgctgtatagctccttttgaccttcatttcatgtatagttttccctattgaatcagtttccaattatttgactttaatttatgtaacttgaacctatgaagcaatggatatttgtactgtttaatgttctgtgatacagaactcttaaaaatgttttttcatgtgttttataaaatcaagttttaagtgaaagtgagggaaataaacttaagtttcgtacacaccacaaataccacaacaaaataaacattgtccggccgcccttcggcccttaagaaaccttttctaaaacaattccttttggccgcccccggcccccttaaggaaaattgcaccacgggtcataagcttgttttccctaacgagaaatccctggctcttgtactaagtgggctttgggaattcctccccacatcaacaaaacgccccctgtcgggatacaccccatgctcttcttgaaataaaattccccaaatgacaattcttctttacggact

SEQ ID NO: 262004 - DNA, 665 bp, Homo Sapiens
tcatccttaatcctgacacccatgtaaatgtccaaaatgttgatcttccactgcaaatttcaaaagccttgtcaatggtcaagcgtgcagcttgttcagcggttctttctgaggagcggacaccgggttacattactaatgagagttgggtagaactctctgagatgtgttcagatagtgtaattgctacattctctgatgtagttaagtatttacagatgttaaatggagtatttttattttatgtatatactatacaacaatgttcttttttgttacagctatgcactgtaaatgcagccttcttttcaaaactgctaaatttttcttaatcaagaatattcaaatgtaattatgaggtgaaacaattattgtacactaacatatttagaagctgaacttactgcttatatatatttgattgtaaaaacaaaaagacagtgtgtgtgtctgttgagtgcaacaagagcaaaatgatgctttccgcacatccatcccttaggtgagcttcaatctaagcatcttgtcaagaaatatcctagtcccctaaaggtattaaccacttctgcgatatttttccacattttcttgtcgcttgtttttctttgaagttttatacactggatttgttaggggaatgaaattttctcatctaaaatttttct

SEQ ID NO: 262005 - DNA, 427 bp, Homo Sapiens
  misc_feature (348)..(348): n is a, c, g, or t
aatgggttctctaaaacctaacatatatctatcatttttttctgggtcacttacccagtaagtgtagagagcatggagaagaaaagatgatgataaaaactcaatttacaacacagagtaaacagaatttccacaagttggcctaagtctttgaaaggaaaggagaaaccagctgtgtgcaatgcagaatatgttagaaatgttttggaaagcacttgatgatgaaaacctgcagagagtaccacaggaagcgagggtgattactaaacacagtacatggatgaggttggtgggggcagataattctaaattcaagactcagaaacaacataacttcctaaacttatncattgcaacacttcagcactgattctgccattcaacttacccaaaggtaatctccatcaacttttatggcaaacttcag

SEQ ID NO: 262006 - DNA, 284 bp, Homo Sapiens
taataataaccagagtcccctgttgcttaacagttctgtgattcataagtaattccttttagtattcagtaggactgtcttcttatcctgtttcttctactgactttgtgaaagctattcttccatcttactagcaaataatgagttaacatttagattaaggttatctcaaaataatttatactaatgcttataattttctatcaagaaaatcctaatgttttcatttttatctgaaaatgttgtttctctacccattgggctacccaaagtcagtgatgact

SEQ ID NO: 262007 - DNA, 424 bp, Homo Sapiens
  misc_feature (224)..(373): n is a, c, g, or t
gattggaggtgatttacagtgaaagacacaaataaaatacaactgttcaatggaaatagaaaataaacaccataaaagagagaagagaggtaatttgttagcatcaagagtcaagttgctatatggtcaaaggttaaatttatctctaaaaaatggcaggattcaaagttgtacatacatgtgattacttctgttttttacacccacatacagtacaaaagatnnnnnnnnnnnnnnnnnnnnnnnnnnnnnnnnnnnnnnnnnnnnnnnnnnnnnnnnnnnnnnnnnnnnnnnnnnnnnnnnnnnnnnnnnnnnnnnnnnnnnnnnnnnnnnnnnnnnnnnnnnnnnnnnnnnnnnnnnnnnnnnnnnnnnnaattctctcaaaatactaaacagaggtggttttattgataagattttggct

SEQ ID NO: 262008 - DNA, 651 bp, Homo Sapiens
  misc_feature (370)..(417): n is a, c, g, or t
caaggaaggggacaacagtgggaggaaggtatgtgttacacacccaaaaggtataaatctctaagtgagagagaatggaagtgactggaaccaatatgaaacctcattgatgtgggtactactcatttgcaatttccagtaattctctttgtttctaaattatcttggtgtttcctatgaacaaatgagtctataaaatgtacaggcagtatggtctaacttgggggtacattaaaattacttaaagaactgcgtttttaccttctaaagaaggactctaaagcgctgggctgaggcccacacttcttagaagtactccttaagaggggaatcacaaacccagaagaagaaaagaaccaatatcagagtnnnnnnnnnnnnnnnnnnnnnnnnnnnnnnnnnnnnnnnnnnnnnnnnctgttttttttgaaaagataaataaaattcataggccattaacaagattaactaagaagagagaaaatccaaataagctaaataagaaatgaaacggaagagattacaactgacaacacagaaatacagaggatcaatcaaggctactatgaacaccattatgcacataaactagaaaaacctagacgagatggataaattcctggaaagatacaaccctcctagcttacatca

SEQ ID NO: 262009 - DNA, 610 bp, Homo Sapiens
ctgacacacgctgaactctcaatacattgattggcttaaaatatcaactgtgttctgcgttttggaaatggctgaagacccagtgattctaaacagcccagcgaacctggacagatcaagactcacacagatgaatgtgtatcacccagacttgttctaagaacttcattaaatgctccctgctgggaaaacttggacatttcattgcagtgattatttcatctcgaactaggaacactgataagccaagctgcaaataacagtaagacggcaaactgaaccaaggtgtgtcctttctactggaccactgaaactttcatctgtccccaaacaccaaaatgcccttacatgtagaagctacaaaacctttaggagaaattctcatttaaaaaacttgtcagaacaaataatctcaacaatgtctttgcatcaatgaatgcaaattcatggatgtttatatataaaagggttttgtgtagcctttgtatctagtattttcatgcagttcaatattaatatttaatttttttctcttttgctttctcagccagctaaattaaagttagttttctgaaactgcaattaaaataaatttacaatcctggattta

SEQ ID NO: 262010 - DNA, 543 bp, Homo Sapiens
agtaggcaccagggctggaatggggccgcccggctccccatggcagtgggtgacgctgctgctggggctgctgctccctcctgccgcccccttctggctcctcaatgtgctcttccccccgcacaccacgcccaaggctgagctcagtaaccacacacggcccgtcatcctcgtgcccggctgcctggggaatcagctagaagccaagctggacaaaccagatgtggtgaactggatgtgctaccgcaagacagaggacttcttcaccatctggctggatctcaacatgttcctaccccttggggtagactgctggatcgataacaccagggttgtctacaaccggagctctgggctcgtgtccaacgcccctggtgtccagatccgcgtccctggctttggcaagacctactctgtggagtacctggacagcagcaagctggcagggtacctgcacacactggtgcagaacctggtcaacaatggctacgtgcgggacgagactgtgcgcgccgccccctatgactggcggctggagcccgg

SEQ ID NO: 262011 - DNA, 702 bp, Homo Sapiens
tgctgcgccaccccacggcctggaaggaccgctttattgatggcttcatctctcttggggctccctggggtggctccatcaagcccatgctggtcttggcctcaggtgacaaccagggcatccccatcatgtccagcatcaagctgaaagaggagcagcgcataaccaccacctccccctggatgtttccctctcgcatggctggcctgaggaccacgtgttcatttccacacccagcttcaactacacaggccgtgacttccaacgcttctttgcagacctgcactttgaggaaggctggtacatgtggctgcagtcacgtgacctcctgggcaggactcccagcacctggtgtggaagtatactgtctttttaagctgggcctgcccacgccccgcacctacatctacgaccacggcttcccctacacggaccctgtgggtgtgctctatgaggatggtgatgacacggtggcgacccgcagcaccgagctctgtggcctgtggcagggccgccagccacagcctgtgcacctgctgcccctgcacgggatacagcatctcaacatggtcttcagcaacctgaccctggagcacatcaatgccatcctgctgggtgcctaccgcccgggtccccctgcatccccgactgccagcccagagcccccgcctcctgaataaagaccttcctttgctaccgtaa

SEQ ID NO: 262012 - DNA, 895 bp, Homo Sapiens
ggcacgagggctggaatggggccgcccggcctccccatggcagtgggtgacgctgctgctggggctgctgctccctcctgccgcccccttctggctcctcaatgtgctcttccccccgcacaccacgcccaaggctgagctcagtaaccacacacggcccgtcatcctcgctagaagccaagctgggacaaaccagatgtggtgaactggatgtgctaccgcaagacagaggacttcttcaccatctggctggatctcaacatgttcctaccccttggtagaactgctggatcgataacaccagggttgtctacaaccggagctctgggctcgtgtccaacgcccctggtgtccagatccgcgtccctggctttggcaagacctactctgtggagtacctggacagcagcaagctggcagggtacctgcacacactggtgcagaacctggtcaacaatggctacgtgcgggacgagactgtgcgcgccgccccctatgactggcggctggagcccggccagcaggaggagtactaccgcaagctcgcagggctggtggaggagatgaacgctgcctaatgggaagcctgtcttcctaattggccacagcctcggctgtctaaacttgctctatttcccgctgcgccagcccccaggccctggaaggaccgctttattgatggcttcatctctcttggggcttcccctggggtggctccatcaaagcccatgctggtcttggcctcagggagtggcacccagggcccagcactgacacagctaccacctactccccaccccctgtacccctgggagctggtctggagagagaaacacagtctggacaagagaaacgctcatcagacacccaccaataaacatcaaacagacaccaa

SEQ ID NO: 262013 - DNA, 587 bp, Homo Sapiens
  misc_feature (11)..(11): n is a, c, g, or t
  misc_feature (47)..(47): n is a, c, g, or t
  misc_feature (109)..(109): n is a, c, g, or t
  misc_feature (123)..(123): n is a, c, g, or t
  misc_feature (139)..(139): n is a, c, g, or t
  misc_feature (151)..(151): n is a, c, g, or t
ccccaccaaancctgggatttttaacccattaggcacccaacccggnaacaggtggtttattggatccccaagccctcccaatccaatgtgggacaaaggcctccaaanccccagaccctggncatcaagggtgatcangggcaaaatggnccctagtgagtaagggatgagtcaggggtgacaatatgttgagcttggatgatggaaagaaagataaatcccatgagagatgaaaaacttgcatctttttccccacatgatgattttaagcatctttgtattttctaacttggtgattatcaagtgaagcagaagccatgaccatttatatactgtatatgtgccttccccatggaacttttttagggcactaagaatttcaaattctaagaatgaaatgttttcatgtcttttttattcagggaaatgaaaaagaaaaaacttccaagtgactcaggagatttagaagcgttagagggaaaggataaagaaaaagaaagtactgtacacattgaaactcatcagaacacaagcaaaaatgttgcggctgtgcagccaatgaaacgatggacaaaagagtaaaatg

SEQ ID NO: 262014 - DNA, 694 bp, Homo Sapiens
  misc_feature (576)..(584): n is a, c, g, or t
tccatgaaaattaagaacaagacagtcacgtctgtcatcactcttcaacattgttttgaaaaatccagctaatgtaacagtaatcagtataaacattaagaggaaataaaatgatctatatgttcaggtgaaataatttcatatctagaaaacccaaaatattatattcttaaaaatctactgtaatttcaatgattaaataagctcattagacagaagataaaaatacaaaaatctataggttgtctatattgtcaaaaatagctaattacaaatgagaagaaaaaaaccaattcacaatgtcaaaatatgaaataaaactgtaaaaatacttagaaataaattcagttagctatgatatacttacgtgaagaatattccaataacaagaccaaaagatttcaatgatgtacgaagactcttgagtgctaagatttaatattattaaagagccctctaaacaaaaatgcaggattttaattgtgatgtcagccatcataattagaattttattaaaattctgcatttcattttttcacatgaaaaaatgaatgtctaggacatattatataaagnnnnnnnnnctaatgaagtgggacttgctttatcggattctaaaacttacgatgaagccactataattaaatcatgatattggctcagaaatttgaaaatgggtaacattttaaataaa

SEQ ID NO: 262015 - DNA, 464 bp, Homo Sapiens
tttcaaagtagacctctgtcttggattactatgtacctggacaggtgaactcttgtatgtttctgttttggggatttttaggggttttccatgtacattcatagagcctggtcagcagcgaggagtccttgttgcgtatggacggaaggctccctggcacccagatgtctcccttcgtcctggctgacacagagcatggtggtcatctgctcttcatgtccagcaggctcagaaagaactcggagttcccctcgcacccttgggccaagcttttcaagtccgagtgccaggactggatgagctggggtttgtgtgtctgctggcggcacagtgggtgtgcacaagaccaccatttgggtatctaacaaacacaggctcacaaaagggattttggcatatctgacaaagctttttgtctgagagttggattgagcttcctttcaacttcatcttatcgtaggtgt

SEQ ID NO: 262016 - DNA, 1343 bp, Homo Sapiens
  misc_feature (40)..(40): n is a, c, g, or t
aatactgactaacatccatcaaccaacactccaaggatcnaagatatttggccaactgaacagtcatttgcatttaacttgaattaataaaacaggtttaaattctggaaaataaggtaagtccctggaagatgggcactgcacacgccggggtttagatgtcaagacagacaaacactgcgaaggggacccagccagccatggacgggtgtcgccggaagaaaggcgggcctgaggacggacagctgggttctcacttcaggtgcctgaagagtttcccccacaggtgaccacattttaagctgcccattcggacacatccccctgtgggcgcacacgggtgggtatgggtttaggtgcagatgctggtttcggatgccaaggaatcctgagggattggggcggtttttgtgttttgcttcacattaatgatggaggattgaagctgatgttcaggaagtcaccacgtcctcagaacaaagctgggcagggccgagagccagccacacccacggtcacagctgggggcgtggtcagccccagtggcgagaaaccctgcaagctcagggccgctaccccaaagcctggctccactgagttatcaacgggtattgtagagacattcaaagttagtgttacttgctcattagtttaacagtttttggaaagggggagaaacatatttaaaatgtttgcattatttccttcagaaaaatcataaaatttggaagtattatcaaagcgattaaaaatcacaagatttcactactgtccaacacaaaaataagttaatatctgctccccaaagtgcactgcaaagccgattctgctgttttgacgtaagcattggtagtcccttacctgccggaagggatcttttgggcaagtgacagcggggcctggggccttcgaactctaaggtgtgtgtggggacactgcccggcctgtccctagaacaaccttccaagttagggcatcataaggagcataaatctatgagccgatccagtattttcttaggacactttgggagaagttagagtctgaactggaaagcactactcccaccctgtcttaaccggcgagtgcccctcagaggccacggccgcgcgagcaagtcagtggctacacagctcgtttcccctgggtcctctgtgtagttaactttgctggggaccctgatgggagaagggacagccaccagccagtgaaacttccagtcagtgctcagggaggcgtgggaccctgcagggccacacacccctgaaccccacgcttacaggtcacaaaaccacggagtagccactctcaggtccaaagacactgcagtttttaccaaggca

SEQ ID NO: 262017 - DNA, 769 bp, Homo Sapiens
  misc_feature (96)..(96): n is a, c, g, or t
aggagaacccaaaatgaagggaaaaacttagagctaatttcctagagtatgtatttaaatggaaagtcggagctcacagagagcagtcaggaattntgcattttctggatctatcttttgtgccttctcatagtactcagcagcttgcctcttttctccttccagcttgtaaacaaaccctagggcacttaaactctgcacatctaaagcattgtgacaaagtctcttggtagacaatttcttcagagcacttgtcagtttggtgcgaaggggtgatctgtctttgacctttaaggcttctaaataatgatggatggcagtattttctgatttacggtgaaattcctgaaagcggccatagtggtaatggatctgatgtttgtgatcatcggttatgttctccagacgaagagctttccggaaaatgtcctcagcattgctatactggcctccttcagcatacatgttggccaggtctgtgtaggcaaatgcaaacatagagtctcgttccatggctgctttgaaatgaaatatagcagatgaaatcagctcatcaacctttagtttatcctttcctttaggtctgttgtgtgtggccttcttgatttggatcatttgtgccctgtagcaaagtcccatctggtgatgcagaaaagaagaagttggtgtcacctccaaggccttttttaaaagttcgagagctttgttccaggaattttttctcctatagaacttggctgcataacgaaggacgtaaggctgggatgat

SEQ ID NO: 262018 - DNA, 723 bp, Homo Sapiens
cagcgtacttacaacctcagtttcaccacgataggctggtacattttattatttgtcacttatttttgttttaggttagagccacagctgaaacaactacaaacaaaatatgatgaacttaaagagagaaagtcttcccttaggaatgcagcatatttcttatctaatttaaaacagctttatcaagattattcagatgttcaagctcaagaaccaaacgtaaaggaaacgtatgattcatccagccttccagctctgttatttaaagcaagaacacttctgggagccgaaagccatctgcgaaatatcaaccatcagttagagaagctccttgaccagggatgagaagagcagtctactaaaatgtgcctataggaagactagtctcatgctgttaccttctgaaactgtacctttataaatcaattgttttgcaaagaagttatggcctacttagaatctaaaatttgttattcaaattaaatggctgtgaacaatgttaaatagcatcagtttgtccaatagttttaaaggccataatcatcttttctggttaatatcttgagtaattttaaaatgttgacaccttaatcggtcccaggtatgagctataataaacttgtaaaattaagttgatgtgaacataattttgattaattaataaggcgatttctcctgaatttacaccaaagctaatttttaatgaaattggtttacagaagt

SEQ ID NO: 262019 - DNA, 876 bp, Homo Sapiens
ggcatcaagaaagcacttgacacaaagattggacggtacaaagcaccttttcatcagctgagaatatcatatggtactaacaaaggaaaaaaactatactgaagaagaagatcgttttctgatttgtatgcttcacaaacttggatttgacaaagaaaatgtttatgatgaattgcgacagtgtattcgcaactctcctcagttcagatttgactggtttcttaagtccagaactgcaatggagctccagaggagatgtaataccttaattactttgattgaaagagaaaacatggaactagaagaaaaggagaaggcagagaaaaagaaacgaggaccaaagccttcaacacagaaacgtaaaatggatggcgcacctgatggtcgaggaagaaaaaagaagctgaaactatgaatatgtttttgtttcataatcactaactttaaaccagtagttctttaatttacgggtcttcataagatgtactgtacaatgctcaattgttatgtcatttaaagacatcaggttcatctgtttactgagctagaaacatagtatgtagtttcacttttttaaatgcaacagctgtgctgaaatttttttatcattaacacttgaagtaataaaataggcttcatttattactaagtgtttcatttgatttatttttctattgtagttccatttgtgaagattgtgactttttgtttattagctataatttctacacttgtaaggcttaaaaacaagttaaaaagaaaattgcaaataacatttgtccctttcagtcttcacctagttgtgtaattattttaattcactttgcctttgcagaaatttgggtattttctttgtagtgctattgagtctcatct

SEQ ID NO: 262020 - DNA, 459 bp, Homo Sapiens
  misc_feature (35)..(35): n is a, c, g, or t
  misc_feature (56)..(56): n is a, c, g, or t
  misc_feature (89)..(190): n is a, c, g, or t
ggagtttaaagagcagcctggctaacatggtgaancccccatctctactaaaaatncaaaaaatttagccgagcacggtggtgcatgcnnnnnnnnnnnnnnnnnnnnnnnnnnnnnnnnnnnnnnnnnnnnnnnnnnnnnnnnnnnnnnnnnnnnnnnnnnnnnnnnnnnnnnnnnnnnnnnnnnnnnnatgacagagtggagactctgtttcaaaaaaacagaaaagaaaatatagtttgattcttcatttttttaaatttgcaaatctcaggataaagtttgctaagtaaattagtaatgtactatagatataactgtacaaaaattgttcaacctaaaacaatctgtaattgcttattgttttattgtatactctttgtctttttaagacccctaatagccttttgtaacttgatggcttaaaaatacttaataaatctgccatttcaaatttca

SEQ ID NO: 262021 - DNA, 785 bp, Homo Sapiens
atgagggcagcagctccgaggccgacgagatggccaaggcgctggaggcggagctcaacgacctcatgtgagcgcgggcagcgggcagggactgaagcctgaccgacctccagcagcactcggacgtccccggaccagccctcagtctcggtccacgctgctttcttcccaaaggacatgtatatttgcagagctccacatacagaaacacattattttgcagaaataggtgtttttaagaagttttactacaggaatgtctacttttgtaagtgacaggtgttaaaggcccaggtgtgctgtgccaaagagctcagcagaggctcacgtggcccaggctggtgcgcccgctgtctcggtaaggggcgggttggtgtgttttccccttgtgtaccagagcacattccttaggggacggctttgggggtcccacgagacatggactaggagtttaagcaggacagtgtgcgtgcacgagctccgagcccagcacagacatgcctggaacccccgccgcctgctgctccctcctagggaacccatttccggggaacgccgtgactgtcgggcagcctggagcttcctgcagcctcctacgcagggtccacgccacgtggcctgggctgccatcctgccgtcctcccactggcatcctggcaagggggcgttgcttttcctgggcggccttttatgtcttggagacacctgatgtaaagtttctgtaaatctatttcatatctgacccaccaaacagatttctctttaataaaaatccttttccaaaa

SEQ ID NO: 262022 - DNA, 742 bp, Homo Sapiens
gggatctcgcgagagccgcgcggcccccgaaggctcgcaggcggaagtgagacgccggaagcggtcgttgccatggatcctggggacgactggctggtggaatccttgcgcttgtaaatcgtaccaggatttctatgcattcgacctgtcaggagccactcgagtccttgaatggattgatgacaaaggagtctttgttgctggctatgaaagcctgaaaaagaatgaaattcttcatctgaaattacctctcagactttctgtaaaggaaaacaagggcttattcccagaaagagatttcaaagtgcgccatggaggattttcagacaggtctatctttgatctaaagcatgtgccacataccagattgctggttaccagtggccttccaggttgttatctgcaggtgtggcaggttgcagaggacagtgatgtcattaaagctgtcagcaccattgctgtgcatgagaaagaggagagtctctggcctagggtggccgtcttctccacattggcacccggagtcctccatggggcgaggctccgaagtctgcaggtcgttgatctggagtcccggaaagaccacgtacacctccgaatgtcactgaacagggagggacctggagtagccctgcagggtccctagaatgcaaaacaccttttggcccttctggctgtggccttcaaggcccgggcttggggggcttttggttggccaccccgcgggccagaaaaatggggc

SEQ ID NO: 262023 - DNA, 595 bp, Homo Sapiens
  misc_feature (75)..(83): n is a, c, g, or t
  misc_feature (402)..(431): n is a, c, g, or t
aaaaatgcaattataccttcctcatgctaattattccataaataatatggttagttctaaatggacttaatactnnnnnnnnnttggtaaaataatagataccaatttatagagctttaccaaaacgaaccaaaaaaatattttcaaagaaagcctaggtgcttcttcctagtttgcaagtcaagcttaatctaaatggtgatttagattatccttttaatttattctacaacataccttaagatataattttagacctataaatagatatgaggacatcctgaaatcactgcaagcaaagaaggaagatataaaatcatcaattgggtgcctgctattttaggtactttcacttacttcctaaagtgctcaaaatgagcttgtgaagtattttcgccagtnnnnnnnnnnnnnnnnnnnnnnnnnnnnnngactactactaatttacccaatgtcacatagctggaattcaaatctaaactaggttaccttcaaaacctgaactctttcccactgccccatgtggaatcccggtaacaccaagatcactgactgttatctcataaaaactcattttaagaactgaacttttatc

SEQ ID NO: 262024 - DNA, 946 bp, Homo Sapiens
tccacaattaagctttttatattccactctctgtgctgaccctggctgaggcattttgggagacaaggactctgaatcttctgcttccattaaagaagaactgtgatattcaacattggatttctgagaataaagataggatgattcctttgaactttgacttacttgtataaaatgtccagctaggttaggtttttgccatttcctatatactttgggtaaagctacatttgatgagcaatgtgaatgtttctgagaatgttcattcctgttttctcttaagagaatgtgctgtgtactaaatacaggccacatagtgtctgcctgttgaagatctggaaactgcctccccagatctgtattgtatttggtaggtaagggggtcagtttctttttctcattgtgtgttgataatctacacaccatctgttggaaccagggtgttattatggggaactcctcctgtgtactaggaggaggaccttagggagaccaagaggagagaagcatttcctttgatgaagtcacatcctgtctatgagcccactaatgctgtaacattggcctgaaagagagtgttctttaaaagcctttctcggctgttagtataaaaacatgatggtatcagctcttagcatgtttgcttgacccttatggaaggtataaatccacagaacttccttcccagagaactgggaaattgtcctagaaataaaccttgtacagttgagtggacatggataagcaaccaatttgttacttttgcaggaatttgtttccttgggaaattgggttggtggggtccatcctggaaaataatttcatggatagggccgggtttaaatatcccttttttggaaaaaatcccgtttgaaaaacctggggaatttgggggaaagaaacaaaaaatataaattttttgcggcggaacagtaaacaaacacac

SEQ ID NO: 262025 - DNA, 843 bp, Homo Sapiens
  misc_feature (700)..(773): n is a, c, g, or t
gggcgggcagccgcgggccgagcgcagccgcctccgccaccgatgcgcctggtggccagactccaagtgggaccggcggacacgcagcctcgcgtgtcaggggaagctgatggagaatcgagctctggatccagggactcgggactcctatggtgccaccagccacctccccaacaagggggccctggcgaaggtcaagaacaacttcaaagacttgatgtccaaactgacggagggccagtatgtgctgtgccggtggacagatggcctgtactacctcgggaagatcaagagggtcagcagctctaagcaaagctgcctcgtgactttcgaagataattccaaatactgggtcctatggaaggacatacagcatgccggtgttccaggagaggagcccaagtgcaacatctgcctagggaagacatcagggccgctgaatgagatcctcatctgcgggaagtgtggcctgggttaccaccagcagtgccacatccccatagcgggcagtgctgaccagcccctgctcacaccttggttctgccgacgctgcatcttcgcactggctgtgcgggtgagccttccatcctccccagtccctgcctctcctgcctcctccagtggggcagaccagagactcccatcacagagcctgagctccaagcagaagggccacacctgggctttggagacagatagnnnnnnnnnnnnnnnnnnnnnnnnnnnnnnnnnnnnnnnnnnnnnnnnnnnnnnnnnnnnnnnnnnnnnnnnnngggtttggtgtcgggaataacgggaccaataaatgatgctttactattaaaaaagaaaatccatgtaaat

SEQ ID NO: 262026 - DNA, 390 bp, Homo Sapiens
ttttaaaaaatttatgtatgtaaacacatcttaatactaatttgagttactacttttattctttattgtcacattttccaagttttgcgcattcaaacttggcaaacatcatggagatttgtacaaacatacatatacatatatacacacatatttatagccccagcttcctcattaaaccttgtgctcaggctcctgttaaaagaggtaaaatggtgagaagataaaaatcagggaaaacatgaataaatgctgactgacaaatcttgttgttatgaatttgtaaggcagacattttaaagcaaaatccattaccttgctaaaatttccactaagctacagcttcagatatttacaagaaaaataaatatcttttaacagacttcaatg

SEQ ID NO: 262027 - DNA, 994 bp, Homo Sapiens
  misc_feature (35)..(35): n is a, c, g, or t
  misc_feature (51)..(51): n is a, c, g, or t
  misc_feature (58)..(58): n is a, c, g, or t
  misc_feature (82)..(82): n is a, c, g, or t
  misc_feature (493)..(546): n is a, c, g, or t
  misc_feature (560)..(678): n is a, c, g, or t
  misc_feature (692)..(811): n is a, c, g, or t
tctaattccccaatgctggaaaggctcttgagatnggaagttattaatccntggggcntatggtagaagactgaagaaaagnatgtttcagctcctgaatcaagacttactagccagtctggtggcaccacactttgcctttgtattttgttggcttatactgtgataaaaagttgattgcagaaggacctggggaaacagtattggttgcagaagaagaggctgctcgagtggcccttagaaaactttatggattcacagaaaatagacggccgtggaactattccaagcccaaagaaaccttgagagcagaaaagagcatcactgccagctagccgccatggatgcagcagcctgaaacttgagagcgaaagtgagataaatgtcaaaggtgtttcaagccagacattttcacaattgtgaagaaatagatgttttgtttctgttttttactgtgttcccaaaattaaataaatgttaaccaagtcacagnnnnnnnnnnnnnnnnnnnnnnnnnnnnnnnnnnnnnnnnnnnnnnnnnnnnnnctcttgagatggannnnnnnnnnnnnnnnnnnnnnnnnnnnnnnnnnnnnnnnnnnnnnnnnnnnnnnnnnnnnnnnnnnnnnnnnnnnnnnnnnnnnnnnnnnnnnnnnnnnnnnnnnnnnnnnnnnnnnnacacaccaccatannnnnnnnnnnnnnnnnnnnnnnnnnnnnnnnnnnnnnnnnnnnnnnnnnnnnnnnnnnnnnnnnnnnnnnnnnnnnnnnnnnnnnnnnnnnnnnnnnnnnnnnnnnnnnnnnnnnnnnngtgtgagccactatacccgaccagatcaaatctttttttgacatttttgcaaaaaaattttcctaatgttcttgatttaattgtatagaatttgtataattaggtgtattttatttgcgtctagctttgaggtatcataatttatgtatcttatgtgaattttttgctgtaataccaataaag

SEQ ID NO: 262028 - DNA, 1326 bp, Homo Sapiens
gggcagaaccattattcgatcagcatacaaactgttctatgaagcagcccaagaactactggatggaaacttaagcgctgtcgatgatattccagaattcaaagacttggatgagaagagcagacaagccaagctggaggagttggtgtgggcaattggaaagctgaccgacatagctcgccatgtcagagctaaacgagacggatgtggtgccctggaactggaaggggtcagaggtttgcgtacagctagatgacaaaaagaacattcacgacctcatccccaagcagaccctggaagtccacgagacagtggctgaatgcatgatcctggccaaccactgggtcgccaaaaagatctgggagagcttccctcatcaggccttgctgcgccagcaccctcctccacaccaggagcttctttgcagaactccgggacatgtgctaaagccaaaggcttcttcatagatacacggtccaataaaacactggctgattctctggataatgcgaacgacccccacgatcccattgtgaacaggctactgcgctccatggccacgcaggccatgtcgaatgctctgtacttctccaccggatcctgtgcggaggaggagttccatcattacggtcttgcattagataaatatacccactttacttctccaataagaagatattcagatattgtagtacaccgcttgttaatggcagccatttcaaaagataagaaaatggaaattaagggaaatctgttcagcaacaaaagatcttgaggaattatgcagacatatcaacaacagaaaccaagcagcacagcattctcagaagcagtctactgagctcttccagtgcatgtacttcaaagacaaagaccctgccaccgaggagcgttgcatatctgacggagttatttattcaattagaacaaatggtgtgcttctatttataccaaggtttgggattaaaggtgctgcttatctaaaaaataaagatggtttagtcatctcatgtggcccagatagctgttctgaatggaaaccaggatcccttcaacgatttcaaaacaaaattacctctactacaacagatggggaatctgttacgttccatttgtttgaccatgtaaccgtaagaatatccatacaggcctcacgttgccattctgatacaatcagacttgaaataattagtaacaaaccatacaagataccaaatacagaacttattcatcagagttcccccttgctgaagagtgagttagtgaaagaagaactaaatctgtggaagaagctcagcttgcccaagaagtcaaagtaaacatcat

SEQ ID NO: 262029 - DNA, 488 bp, Homo Sapiens
gtcaaagatccaattcttttttctatttaaataaccatcattgactgattagtccatccttaccccacccctactgattatgatgtcactgctgtcacatattgtcatacgtggggggctgttactgggttctccagtctcctccctttatctgtttgtgtatcccctgtgctggtgcccacactgccctcgttcactgatgtttttaataagcctgcacccatttgtatgtcaaatcttcctgctcttcttatccatcaaaaatcactttaacttttcttgttcctttactcttccatataaattgtttattcaaccatcaggttccaggaaaaagcctgttagtattttcattggacttacatggaatttgtagattttgaaaaaacagatatttttatgagtcttcctattcataaaaatagtatgtctccatttacttatgtctttaagtgtatttcagtaaagctttctatcttttcctcatt

SEQ ID NO: 262030 - DNA, 195 bp, Homo Sapiens
ggtttttgggaacaaatgaacttataaagtggttttatataaaacatcaattgtcttgtatattttggataagcagcagtaccagctttcatttgtaacagtctgtggcattggaaaaaaaggagtctgtgattgttgaagtgaattatgttataaatgcaaagagaagataaaatattaaaaaacatatttttt

SEQ ID NO: 262031 - DNA, 558 bp, Homo Sapiens
taaaagggaaaatctcacacataattaagcagtggaaaatgtgctcaatgctatggtgcgtcaggccctctgtctaccaggtttctcccctttctgcagagctgtggaccctgtacgtaccaaacaggtgaacttggtccatctttccttcttcctttttttgcacatttgcatttatatcttcctgtactaaaagaaacaaattatttataattggggtgacaatataaaggaacaaaagatggggcaatagttgcttcctagctggagctgtaagtccatgttacagaaactcactatttaaaaagttttaaaagatttatgaacccttgtcctacaattcgctgaatacttatttgtcttttaaactcccctcggtgtatggatcatcttcgtcagaatgcccgttggttcattgtgaatcaggggaaaatgttaatcatttggagactgttttcttattaccaaatgtacaatccataagacaactgaaagcaacaactgctgggttcactgacaaagattataaaaatcatcacgttcaaagtagagttttta

SEQ ID NO: 262032 - DNA, 280 bp, Homo Sapiens
cccttaagctttaatcctcgtcattgtcttaaagtcaactggtgtttcttgttcattgactttggtacgatggtgctttgcaaggatgtatttatgttataatggccaacatttggtcagcccttgtccacttattcacttccctccttttgtaaaataagtgctttaattataaactgtataaaaataccttgtataaaccccttttttgattattacaataaataagctgaattgtaacaaatgaaatttgatttttgtaataaaacagtggaaaagt

SEQ ID NO: 262033 - DNA, 927 bp, Homo Sapiens
  misc_feature (176)..(176): n is a, c, g, or t
  misc_feature (286)..(295): n is a, c, g, or t
  misc_feature (336)..(352): n is a, c, g, or t
  misc_feature (363)..(619): n is a, c, g, or t
ggcctgggtggcgattctcggcacgagggccttgcttactgcctgcaaattttgagaaatttaaaaataagcattctaacacttttattcccacagaaaaattccaagtcaaattatcaaatcaaacacaaaaataagtcttacctcttgtataagcatgttgtactaaaaaaaanttttgaaacattttgtatattggagatctctctcatcttactgttctttgctttaaattcctggcacttctttttactgtctataagagaaaacctatcataagcccaannnnnnnnnnccacttagggtaaatgtttggctcttctcatttcattatcnnnnnnnnnnnnnnnnnaaagacagatnnnnnnnnnnnnnnnnnnnnnnnnnnnnnnnnnnnnnnnnnnnnnnnnnnnnnnnnnnnnnnnnnnnnnnnnnnnnnnnnnnnnnnnnnnnnnnnnnnnnnnnnnnnnnnnnnnnnnnnnnnnnnnnnnnnnnnnnnnnnnnnnnnnnnnnnnnnnnnnnnnnnnnnnnnnnnnnnnnnnnnnnnnnnnnnnnnnnnnnnnnnnnnnnnnnnnnnnnnnnnnnnnnnnnnnnnnnnnnnnnnnnnnnnnnnnnnnnntgagccaccatgcctggccttcattatctcttttttaaaaatgaaaaagtttataatttacattcagtaaaatcaccctttttagtgtctaatctgtgaattttgacaaatgcatggttttgtaaccaatcgataggacagttctgccacccaggacattcccctctgttcctctgttcctctcttctccctgccccctagcaaccactgggtggtttctgtcccctcttggtcattgacatttatttttaaaaataaaatattttaaaatccgcctaactgaaacacaacatggaaaaaaaccttgt

SEQ ID NO: 262034 - DNA, 547 bp, Homo Sapiens
  misc_feature (108)..(217): n is a, c, g, or t
ggattttaataaaatgcagaagtaggttgacaagaatttcacctgcaaccttgtcaaccacctagaataaaagcctctgcagccctcccctaaagactcatcaatgtnnnnnnnnnnnnnnnnnnnnnnnnnnnnnnnnnnnnnnnnnnnnnnnnnnnnnnnnnnnnnnnnnnnnnnnnnnnnnnnnnnnnnnnnnnnnnnnnnnnnnnnnnnnnnntacaactataaaaaaataaataaatcctccagtctggatcgtttgacgggacttcaggttctttctgaaatcgccgtgttactgttgcactgatgtccggagagacagtgacagcctccgtcagactcccgcgtgaagatgtcacaagggattggcaattgtccccagagacaaaacactgtgtcccccccagtgcagggaaccgtgataagcctttctggtttcggagcacgtaaatgcgtccctgtacagatagtggggattttttgttatgtttgcactttgtatattggttgaactgttatccttatatattacccaatacttagt

SEQ ID NO: 262035 - DNA, 914 bp, Homo Sapiens
caaatatgaaattaagaacagctttggacagagggtttactttgcagcggaagatactgattgctgtacccgaaattgctgtgggccatctagaccttttaccttgaggattattgataatatgggtcaagaagtcataactctggagagaccactaagatgtagcagctgttgttgtccctgctgccttcaggagatagaaatccaagctcctcctggtgtaccaataggttatgttattcagacttggcacccatgtctaccaaagtttacaattcaaaatgagaaaagagaggatgtactaaaaataagtggtccatgtgttgtgtgcagctgttgtggagatgttgattttgagattaaatctcttgatgaacagtgtgtggttggcaaaatttccaagcactggactggaattttgagagaggcatttacagacgctgataactttggaatccagttccctttagaccttgatgttaaaatgaaagctgtaatgattggtgcctgtttcctcattgacttcatgttttttgaaagcactggcagccaggaacaaaaatcaggagtgtggtagtggattagtgaaagtctcctcaggaaatctgaagtctgtatattgattgagactatctaaactcatacctgtatgaattaagctgtaaggcctgtagctctggttgtatacttttgcttttcaaattatagtttatcttctgtataactgatttataaaggtttttgtacattttttaatactcattgtcaatttgagaaaaacggacatatgagttttagcatttatcactggaaatttcctttgaaaaaactgatttgaattatgatctctgattccatgtccattttactaccaatattaactaagggcttattattttatataattatatcag

SEQ ID NO: 262036 - DNA, 1047 bp, Homo Sapiens
  misc_feature (425)..(530): n is a, c, g, or t
  misc_feature (532)..(541): n is a, c, g, or t
  misc_feature (547)..(552): n is a, c, g, or t
  misc_feature (558)..(680): n is a, c, g, or t
  misc_feature (743)..(752): n is a, c, g, or t
  misc_feature (884)..(892): n is a, c, g, or t
  misc_feature (910)..(920): n is a, c, g, or t
gtgccagcgtatgaggtaattagattggttctctccagaggtaacctgccaagaagagatgctatagatgttactcctatactgtaaaacattgtgaaatcagattactttaaaatgatgtattacaaagttatgcaaaaaagcagttgtgactatggaagcccaaggcttatatcccagctctgtcttacactaaatatgggtacagtgtttccactctgtccataaaatgggagctaatattctccaacctgtgtgcctgacatgatggttaaagggattaaacaaaacaatagtttgtaatttattctgtcagagcaaactgctggtaaataaaagggactaagttgacgaaaaataaattttaaaaaacctaataaaacaagtttgtaatttataattgtatacaaataaaagatgttacnnnnnnnnnnnnnnnnnnnnnnnnnnnnnnnnnnnnnnnnnnnnnnnnnnnnnnnnnnnnnnnnnnnnnnnnnnnnnnnnnnnnnnnnnnnnnnnnnnnnnnnnnnannnnnnnnnnaaaaannnnnnaaaaannnnnnnnnnnnnnnnnnnnnnnnnnnnnnnnnnnnnnnnnnnnnnnnnnnnnnnnnnnnnnnnnnnnnnnnnnnnnnnnnnnnnnnnnnnnnnnnnnnnnnnnnnnnnnnnnnnnnnnnnnngggccgcggaggcggccccgaaaggtccccacacaaaaaccccccggggggcccaaagggcgnnnnnnnnnnccaattaaaaagaaaatcccggcgggactctaaaaattgttttgaaaaacctcgcctggaggctttttggggggttcttgtggggattttcttacaccggatttgggggcaatttgtttattttattttttnnnnnnnnngtgggaccaccctttatnnnnnnnnnnntggaacatttttataaacccctggcggcagaaaaaattggcccccccttggggaaaaaggtggggttgaacaaaatgtgggccaaatgggggccccaacaatttgtgttgccacctggggggaaaaa

SEQ ID NO: 262037 - DNA, 739 bp, Homo Sapiens
gtgacggaaatgcaggttacacttctcacaatggtaaggtttctctcctgtgtggattcgcaggtggctcttcagagtctgaaggtgccggaaacgggtgccacagatttcacagggatagggcttctcaccagtgtggataagcacatgggcacggaggtgggccacctgtacaaatctggctccgcaggtttcgcatttgtagggcttctctccagagtgaattcgagtgtgggttttcaggttggctggccggttgaactgggccccacagatgttgcaacgatagggtttctcaccacagctagaatctgagtactcagactgggtctctcccatctcctcagggaacgtggggccagtggtgtggaggcacatctctgcatgctgtggggactgagagccgcaggacgtgcacttcggggggtgcatgtagagtggtgagtggctctcactgctgctgcggggagagcccgtcatggacctgttaacgatgttattgagccggctggcttgtgggatggtggagtcctccccgctggcactcagcttggttggggactggaggtcaaggttctcaggctccatgggtggctggcaggcaggtggggccgtgtaggctcgtggggaaaggcggcccagctcagcctgctcaggcccctctggtttggcattctgattgaggctgttgagcacgatgaacttgtatttcttccagttgcaggctttgctgtgccga

SEQ ID NO: 262038 - DNA, 1026 bp, Homo Sapiens
cttacagatgcaaatactgtgacagatcatttagcatatcttctaacttgcaaaggcacgttcgcaacatccacaataaagagaagccatttaagtgtcacttatgtgataggtgttttggtcaacaaaccaatttagacagacacctaaagaaacatgagaatgggaacatgtccggtacagcaacatcgtcgcctcattctgaactggaaagtacaggtgcgattctggatgacaaagaagacgcttacttcacagaaattcgaaatttcattgggaacagcaaccatggcagccaatctcccaggaatgtggaggagagaatgaatggcagtcattttaaagatgaaaaggctttggtgaccagtcaaaattcagacttgctggatgatgaagaagttgaagatgaggtgttgttagatgaggaggatgaagacaatgatattactggaaaaacaggaaaggaaccagtgacaagtaatttacatgaaggaaaccctgaggatgactatgaagaaaccagtgccctggagatgagttgcaagacatccccagtgaggtataaagaggaagaatataaaagtggactttctgctctagatcatataaggcacttcacagatagcctcaaaatgaggaaaatgggaagataatcaatattctgaagctgagctggcttcttttagtacttcccatgtgccagaggaacttaagcagccgttacacagaaagtccaaatcgcaggcatatgctatgatgctgtcactgtctgacaaggagtccctccattctacatcccacagttcttccaacgtgtggcacagtatggccagggctgcggcggaatccagtgctatccagtccataagccacgtatgacgttagcaaggttgaccagagtgggaccaagtccaacagtagcatggctctttcatataggactatttacaagactgctgagcagaatgccttataaacctgcagggtcactcatctaaagtctagtgaccttaaactgaatgattt

SEQ ID NO: 262039 - DNA, 1005 bp, Homo Sapiens
  misc_feature (439)..(465): n is a, c, g, or t
ggcctgggtggcaattcggacgagggggaacctacgagaaaacagctcaggttttatcaccgactgggaatagacaacctcaatgctgaaccgcactggagaaaaggggcaaggtacccctgctgaggtgtatgggctgccatctcaggctgtcttgaggacctgggctccctctgctactcccaggaaatgggctcctgacacagcagtctgccaccacagccccaggagggtgtcaacaccagcaaatgctgtatttgcagcatgtccaagatgacccttctcccctacctctacctagccactggcagggaggggagacagtggtgatagcagcagcactctaggcatggtgaacgcctgggaccaagccatgtggcgttttttattttgcctttctggaagactcaagatatgtctcttcattctctctcagtannnnnnnnnnnnnnnnnnnnnnnnnnnaatctcagagagaggtgtgtttagtgggcacaagctgtaatattcagcaaaactttgtcgactggcactgtttacaagtctgttagctgcataagctcaataaaaagttggtctgggcattacatcccctctggcaggccaatagctgcatcaagctgttgggagaaatgggagggcaggggaaagatgtaaagccaaagtacagcaggaacccaccacctgtttcccttccttctcccattctactcccagtccggaatgccacgaggaccttaaccttgtttctggctttagctgctagttttcccaaatctcagtgctttccctttttgaacttcccttctattaaacttaaaacagatgtcttaattaatcaggctgtcttggaagggtattgtattgggagacaaggggcggtggtggacctcaccttcaatccaagttttcaaagatattttctcaataactctaaaagggaggtgcttgggattaaggtgacagtccacttgatccttttctttgttttagtgtgaatttcaa

SEQ ID NO: 262040 - DNA, 709 bp, Homo Sapiens
ccccagtggtcctaaaggcaacagcaggactacgcttactgccagaacacaaagccaaggctctgctctttgaggtaaaggagatcttcaggaagtcacctttcctggtaccaaagggcagtgttagcatcatggatggatccgacgaaggcatattagcttgggttactgtgaattttctgacaggtcagctgcatggccacagacaggagactgtggggaccttggacctagggggagcctccacccaaatcacgttcctgccccagtttgagaaaactctggaacaaactcctaggggctacctcacttcctttgagatgtttaacagcacttataagctctatacacatagttacctgggatttggattgaaagctgcaagactagcaaccctgggagccctggagacagaagggactgatgggcacactttccggagtgcctgtttaccgagatggttggaagcagagtggatctttgggggtgtgaaataccagtatggtggcaaccaagaaggggaggtgggctttgagccctgctatgccgaagtgctgagggtggtacgaggaaaacttcaccagccagaggaggtccagagaggttccttctatgctttctcttactattatgaccgagctgttgacacagacatgattgattatgaaaaggggggtattttaaaagttgaagattttgaaagaaaagc

SEQ ID NO: 262041 - DNA, 658 bp, Homo Sapiens
tgctgctgattgagaaccacttctgaatatagcaaggctgtaaattatccactacgtgccctcgtaattgtcttagttcaagcccagattattgtagtagacttagtatttctttgccttagttgatctgtgacccctccaatatctattccacactgttgcctaagtggccttagtaaaattcaagtctggttattttattcccctgcttggaatttctcaatgtagaatgaaactcattcagcattaacacataggcccttcttgatctgacatcgtgtttctcctagttagactaaagaatccccactatgaagttgtttcatccgtaagtacctttgaacccagaagccccctttctcatatgtttctcattcctgtttgcccttcagagttcagctttagttgctaaaacattcagacatccctctgacttagatcccccactactgtttttctgtgagaagcagctatgcataattcctcttcaacacagtagttcttgaaattttgcaggcctctcctggaaaggaggaaatgacttctctgactttgtatgatgcttatttgtggatgaatgggcaagggaaaaaatgaaggaacaagtgaatgaacagtatgggagtatgagaaaaggtataaattgggtatagttgaa

SEQ ID NO: 262042 - DNA, 566 bp, Homo Sapiens
caagcaagaacagctaaaatgaaagccatcattcatcttactcttcttgctctcctttctgtaaacacagccaccaaccaaggcaactcagctgatgctgtaacaaccacagaaactgcgactagtggtcctacagtagctgcagctgataccactgaaactaatttccctgaaactgctagcaccacagcaaatacaccttctttcccaacagctacttcacctgctccccccataattagtacacatagttcctccacaattcctacacctgctccccccataattagtacacatagttcctccacaattcctatacctactgctgcagacagtgagtcaaccacaaatgtaaattcattagctacctctgacataatcaccgcttcatctccaaatgatggattaatcacaatggttccttctgaaacacaaagtaacaatgaaatgtcccccaccacagaagacaatcaatcatcagggcctcccactggcaccgctttattggagaccagcaccctaaacagcacaggtcccagcaatccttgccaagatgatccctgtgc

SEQ ID NO: 262043 - DNA, 733 bp, Homo Sapiens
  misc_feature (662)..(662): n is a, c, g, or t
  misc_feature (680)..(680): n is a, c, g, or t
  misc_feature (693)..(693): n is a, c, g, or t
  misc_feature (714)..(714): n is a, c, g, or t
tttgcagttaaaaaaattaaaatctcagtgtcttacagtgaaatttacttctcactcgtgtacatgttgtgtgtgggtttgctttggctgaaggagttgtctttatccaggacatgctccccttgtagtagaaggaaaggagtgccagtggcccaattatgtgttggttcaacgcttttgcccagaaattatatatgtcacttccactcacgttttgtcagaaaaaataagacaaaaatggccaagcctgatggtagtgggatggggaagtataattatgcgtaggaagtgattgagaaccataatacaatctaccacaattctccaactagtaggtagtttgacttatatgaatagatagtggcttttatttgctctctatatgtagagaaataagtaaaacgtttttggtgtcaagttgaatggtggcatgtctattattacagtagtcttctctgtagttggtgataagggaaagggagtaatgccaattgaaaaacatgtagatatgtctgttggattttgattatttttgctagtggagaatagtatcacaaatattttgaaggtgctaataaccaaaacataattttcattgaacttggggacatattatttttcctttcctttcttgggctttgtttctgaatttatccatcccnttttagcctgctagactncagataatagtantttggctaacactggagtgcntatgcctggtgtgccaacc

SEQ ID NO: 262044 - DNA, 674 bp, Homo Sapiens
tgttaccattctgacgtggcccctagtgctgtctcaggagaaggctctggaggacttgaggcatgctgggcctggtgcagtgatggcgctaaggagacccggggaaagacagtatcgtggtcacgtatgcttaggaagcagcacagctgtgtccttagggatgttcgcgtccagtaaagacactggtaactgcggtttcagccaacactcttcatggcagtgtcgacctcgggttagcttctgttgtctttgtggatggttttcctggagcggcctgacgttgacgtgttctctggtcccatgtcttagcggggcatggtacggtttcgtgcctgacgcgtgcattagggtgttctcttatactttcagtagcatctttccacagcaagggccaaaccctcctggttcccttcagagtctttttggcctgatgatgactcttgagtgataccctgtgatgcagacatgccccagatggattctactttctttaaaactagggactttcaagattaaaaaaaagattgtcactactaatttgacgcctaacttcagaagcttcactgtctacatgtgaacttttccagaaaaactgtgccatggacatttttcctctggggaattaacatctaaattctggtaactattaaaagacagatctggttaatttaaaa

SEQ ID NO: 262045 - DNA, 877 bp, Homo Sapiens
  misc_feature (850)..(850): n is a, c, g, or t
gatggcccggcgggggaagagcccgtggctgggcaggaagctctgactctagggctgtggtcaggccctctgccgcgtgtgacgttgcactgctccagaactctcctaggctttgtgactcagggagatttttccatggctgttggctgtggagaagccctggggtttgttagcttgacaggcttgctggatatgctgtccagccagcctgcagcgcagaggggcttagtgctactgaggcctcccgcctctctgcagtatcgatttgcgaggattgctattgaggtgtgaatgcgtgcttgtatcccagcagggcatagataatacgttattattgtctgccaagttctacatgtggagaatctgcttctgctttaaaatatcatgtgaaactccctggaaacaagaataaaaaattatgtattatgcagatgatgaaatgtttacatcattccagtaatgtcattgattttcatctttccctgtccttgctgtaatacttttaaattatttggccaaaagctttgtattatgatctcttggtctgtgtagttgtggctgaaaataatgagaagctctacgagttatcatcccctttttttgttagaaacaaagggcttgtcaggtctatttgaaaaacctcatagtcatgtgataagcaacaatagatgtttaatgatttcactgttatagcagaagaccagagaagacgcttggcctctgtacatgaaatatgggctcctgatggacctcattcaattctgtactgtgatttccatgcccaacaactcaagccttaagagagaaatcatggacaactgatttctggctgttttcaggcaggcaccgntttatggcgtcagtgcctaggctggaa

SEQ ID NO: 262046 - DNA, 1373 bp, Homo Sapiens
  misc_feature (1310)..(1310): n is a, c, g, or t
  misc_feature (1326)..(1326): n is a, c, g, or t
  misc_feature (1347)..(1347): n is a, c, g, or t
cgtcggataaatatattagcaaataaatatatttcttaacatagtgcctgattcaagcgtctgtctggttcagatataaatacccatgtgggtacctaggtgctagtctccccactaactgagggaaaaaggttcccaggtggggtcctctgcccactttgccaccacattcacattccaaatgggataatgcctgaggggccaagagtggtcaggctgccctggggtgaatgtcaccctgatgaggcccatcagctcttgtccactcagtgaggccagacttgtgctctaatccactctcctgtgggtccctggcctgtatggcttatactggggagctgggcctctgggctgtccaaacccaaggggtcacactttgcttttcctttgttgtccccattttccatccttgctctaagacaaaacttttcccagagaagaactctttgttgtccccgctcagctgtaattctgccttttctaccttcattccatccttcctctgcccagataaagtccagcagaaattcctcctttctacctctctgggactctgagacaggaaatcttcaaggaggagtttttccctccccactattcttattctcaacccccagaggaaccaaggctgctgtacccacctcagggacagaactccacactatagtgggaaagcttcagggacccctccttttagtgctcagggctcacctatgctactggtccttttggcaaaaaaggaaaatgatagagccagggttgcccctgatgtagcagccttactgtggaggggccaaagctggtgttcagagctcacccaaggagggaggtgataaggtgtcatgcgttctgctgaacccactggctggtatgaacatgaggcttggggtgagggaaaccaagtaggggttggagaaggagcagcacctttgtaacacctggctacccatagctagctttctgccctcaaaaactcagccttcaagggatccagcccacacacgccacaggcagcagctggttgcctggctggacatggatttgctgcactgcagatgttttctgcagacaaggtctggagctggagcaggaaacggcaccctctcaccctccaccatcaccagtcctcttccagtgcttctaggaagtacggcaaaaagaatggtgtttgctgtggtcctttcctttcccaggagcaggactctgtgccaggtagggcccaaacacatctggagcacactcttggttggagctaggcctgaacatctcacacagcctgttcacacagctcctcgagttcctcctctganccaggctgggccgacnagacctggcagtgcggattanaggcatggcctgccctctgccgaaat

SEQ ID NO: 262047 - DNA, 718 bp, Homo Sapiens
gtaatcagtcattggcttcttatctggatgaaggcttttggaggagaaccaaaacgacaagttccaagaagaaagatgaagctccgcctccgccgcttagtcccaaccctgcccaggaagaaggcgcccgtggggctttgcctgtgcccgtccaccaaaggctgtcatgtgtctcgaaatcagcagccctccccatcccaatcccaggcagcttgtgtgtacaatcagcttctctagcaactctgtatctgttggcttcaagagaatattttgcctccacatatgtaccccttctcctttttttaaagatggatttaaaccaagatgcctccaggaaagaggacgaaatgagtatattcacagaggaatccaaaaaatacagtttgggggaaaatgcaataatttttgatgagatgggtgaaggacaagaagtgagttgtgtcaattattgtagatacaattttctgattaaatctggaaaaataaaaggcagcctgttttttctgcttttattgtattaacagctgaggtagctaaagttatttaaaataaaattaaatttatgatccaagtagcttatttttccctttaaatctcattgtaaatatatttgatttcttgtagaaattgatttccttctgtttaattttatgcttttattatactcttgatttttctaaatttgtgtgtgaaatataacattgattgaattgcaaaa

SEQ ID NO: 262048 - DNA, 390 bp, Homo Sapiens
tctttcccctaagagaatttgaagaaaatcttcaccaatatttttagtgttgatggtaattaggaaaatagtagttgagagatgtaagaatagtttgagaagagtgagtaaaatgggtgaaatgacaagtgggacccatgtagctgagatgtatttgtttagatgaaaagtctacactggttcttaatcggaaaatcaaaccatgtatttcccttaagaacaatgttgttgtttttaatttattgtagcgatttagtttttttcacgtaatatttctattttctttgcagattgtttttaatttaaattgtggaatttttacttctcaaaatgtattaagtactgtattttttgaaatcttatttttaaataaatattttttaaaaacgt

SEQ ID NO: 262049 - DNA, 828 bp, Homo Sapiens
  misc_feature (552)..(681): n is a, c, g, or t
  misc_feature (688)..(690): n is a, c, g, or t
  misc_feature (692)..(692): n is a, c, g, or t
  misc_feature (695)..(712): n is a, c, g, or t
  misc_feature (718)..(718): n is a, c, g, or t
  misc_feature (721)..(738): n is a, c, g, or t
acgcactggtatgtgtggatgatgctgccagggcgccatcgccaagtaagaaagtgaagcaaatcagaaacttgtgaagtggaaatgttctaaaggtggtgaggcaataaaaatcatagtactctttgtagcaaaattcttaagtatgttattttctgttgaagtttacaatcaaaggaaaatagtaatgttttatactgtttactgaaagaaaaagacctatgagcacataggactctagacggcatccagccggaggccagagctgagcactcagcccgggaggcaggctccaggcctcagcaggtgcggagccgtcactgcaccaagtctcactggctgtcagtatgacatttcacgggagatttcttgttgctcaaaaaatgagctcgcatttgtcaatgacagtttcttttttcttactagacctgtaacttttgtaaatacacatagcatgtaatggtatcttaaagtgtgtttctatgtgacaattttgtacaaatttgttattttccatttttatttcaaaatatacattcaaacttaaaattnnnnnnnnnnnnnnnnnnnnnnnnnnnnnnnnnnnnnnnnnnnnnnnnnnnnnnnnnnnnnnnnnnnnnnnnnnnnnnnnnnnnnnnnnnnnnnnnnnnnnnnnnnnnnnnnnnnnnnnnnnnnnnnnnnaacacannnanacnnnnnnnnnnnnnnnnnncacccncannnnnnnnnnnnnnnnnnaaaaaacttttctcaaacacatctttcctaaaacccagccccatccccctaaatacacttcaaaacccttccccccatcctttttttctt

SEQ ID NO: 262050 - DNA, 436 bp, Homo Sapiens
ctgcagcaaaaaggtcaacttgccaagtcactgctgccatgtgtgtactgtattattttcagaaaaaaatataatagtctgagtcccaagttatcttgatttaaaattgatagagaaaagaaactgtcgagcaagttatataacaactaacaacattgcactttctgtatatgaaatcaatatttaaataacttatttttctccattgctgttcttaaaaaaacattgtaagtagctgtaatataccagtaccaatatgttcttgcaattgcttcagcccaagaaagctgtgtattgttttaaaaattgtaaaaattattgtgatgattcatttagcataaaaaaaggtggacggaagggttttcctatgtatcaaaacttgtctataattatgtcatctatggacctagaaaaaagtaaataaatttcttcagtt

SEQ ID NO: 262051 - DNA, 2041 bp, Homo Sapiens
  misc_feature (1372)..(1428): n is a, c, g, or t
  misc_feature (1657)..(1657): n is a, c, g, or t
  misc_feature (1670)..(1670): n is a, c, g, or t
  misc_feature (1674)..(1674): n is a, c, g, or t
  misc_feature (1786)..(1786): n is a, c, g, or t
  misc_feature (1916)..(1916): n is a, c, g, or t
aaaattctggagaccacagaactcaagtgtgtgtttctcctcttttgggtcccctttaagtagttgggatattttggacctggagataacaccagttacccatccttaccagggaatgttgccatcaattccagttgaaaataatagaaaagactgaatttttatatgcttcacttaggctttcatttgagtagactctaaaaattctgccttgcttaagttctaacactgcctctcagatttcagttttggacattgcacaactaagaccttttaaacgcatttgcttgctaactcggaagacacatagtctgcagcaagacattcctatattgaagaaatgagagaaaattttatgctgcatcaggtggagagcaaggctcaacggtggttgcattagttccctcggaagtattgaaaaaactttgaaatggaagaaaatttttgcacctatgttctgagtaccagatgtctgggttctttcttctgcattagataaatgatcatgctcagtgtaacaaagggaattaaaagttttcccacagtccccttctaggggagtaaactcattgtgtcactgaaatgtttagcttactttaatcttgatatcagcctctacagaccttttattctaagctatcgagcttcttgattgcatttggttgaccacgagtgaccctaaggcattgggggactgtccactgggagttggagtgagcacgtggtgctgcaacaggcattgttttacatactttgtctccagtattctgacaccaagtgtcaactgtggtactttctttgcctaggatatgaattcataattgttgcttttgttgatggttgataccctttccattgatttaaacctaacacattatttctattccacatgcccagtagacatatattccaaagccactggaccacttgagtacataagtgccactgtttaatgcaatatgtatattcaggtctgtaaagctaacagtgtgacttggagtgcttcctgcagatgattctgacttgagtatttacatggaccatggtgatatccaaaagaaaaatgctttttatatttatagattatttcattgaactatatatgaaatgggtatcaataaatgtatttactccaaacgaagagtgcgcgcaaaccaccggtgcacatacccatcccaaaactctgccagaaacctaccaaaaaacaagaagcacgcggactcccgctcccacaccactcgaaagccttgccgagtgatcaggcgagaacaccgagcgcccgtcccgtcctctgcgaaccaccgcccccaaccgtgtgccctctccaaccacccctgttccgccggcccctcctgcattccgccttcgtcgnnnnnnnnnnnnnnnnnnnnnnnnnnnnnnnnnnnnnnnnnnnnnnnnnnnnnnnnntccgccgttaccttcatttggaagacctttccccgcacgcgccgatctcacgtcgttttattccgcgtcccgataccgctaaccggccgtcgcccgccccgtttgccgtaccaccccacctctccatttttccacctatgattgcgcgcgtattgcgggtcgccgcgctggtcgcccgccgattcgtggacagccgcgccgcgtgcgcgtttaaggcgcgcgcgccgtntcgttccgcgctntctntaccgcgtaggcccccctcgtactcctcgcgcggagactctagtgtgtccgttatgccgccgccgttctcttatacccacccgtgttgtccacgctgttcgccatcactcgnttggatcacgccctatattataccgggcgcggacgcgcgcctagatccgcgcattcgcgcctattattcatccgcgccgcgcgcagaatatataccgcgattattgtccactatttatgcactatgcggngcatgagatacgcgccagtacacacgctcagttatggcgccgcgcgatatctgttctcgcgccggcaccgctatttatttcccgcccactattttcgcgcccgtaccccgcgcccggtacttccc

SEQ ID NO: 262052 - DNA, 944 bp, Homo Sapiens
  misc_feature (603)..(603): n is a, c, g, or t
  misc_feature (766)..(766): n is a, c, g, or t
cctgggtggcgaattcggcacgaggtgaaggtcgatggccaggtggtcttcataaactatactgccttgtgatgcctccctagaaatgagaggtctcaataccagctcagaccatgtggaccgcggatgagattgctcagctatgctatgaacactatgggatcaggctgcccaagaaggggaagcctgagccaaaccatgagtggacattattggcagcggtggtgaagatacaatctccagctgacaaggcctgcgacacccctgataagccggtgcaagtgacaaaggaagttgtgtcaatgggaacaggaacaaaatgcataggacagtccaaaatgaggaagaacggagacatcctcaatgatagccatgctgaggtcatagccagaaggagtttccaaaggtaccttctccaccaactccagttggcagccaccctgaaagaggatagcatctttgtcccaggaactcaaaaaggagtgtggaaacttagacgagacctcatttttgtgtttttctccagccatacaccctgtggggatgcctccatcattccgatgcttgagtttgaagatcagccttgctgtcctgtcttcaganattgggcccacaactcatcagtagaagccagtagtaacctggaagctcctggaaatgaaagaaaatgtgaagaccctgacagtcctgtaaccaaaaagatgaggcttgagcctgggactgcagccagggaggtcaccaacggagcagctcaccatcagagttntgccaagcagaaaagtggcccaatctcaccaggcatccacagctgtgatctccactggaaaagggactgggctactggtcacagaataaccccctggtagtgccaaaggtgatagacggttaatagaaactggaagcccaagtgtgtaccttgggagaagctgggagactccggggac

SEQ ID NO: 262053 - DNA, 1443 bp, Homo Sapiens
  misc_feature (19)..(19): n is a, c, g, or t
  misc_feature (445)..(508): n is a, c, g, or t
ctgtggtgcggcggggtcncctaagccacggtgccacggtcggtgaaacttcctccattaatcctcccagtcccagagattcctgactcctcctacctaaaagtagaaagtcacaggactggaaagtcaaaagggtcccaatataaaaaacatccctgtgaaattcctcaaatattagaaaattttcaagatgtaagaaaggcttttaatctgtattaatattttctcatacagtatatttgctgcaatttgaaaactccgtaaatatttactgtgagaattcaatgaaaagaatccagaagaaggaaagccactatctaaattagtcacagagtttcctttctgcgcaacagcacctgttcaagtgaacagcaccttaacagcttgggctggctttgttcactgtcatttgatcaaagtgagtcattaaaagcaggtagttgcnnnnnnnnnnnnnnnnnnnnnnnnnnnnnnnnnnnnnnnnnnnnnnnnnnnnnnnnnnnnnnnnagaatatttagaagtggttataaaacaaaataatatattaaatgcatgggagcaatatagaccagagctggtaaggaaaggtttggtgttggcattttaattcttcaggcttctggtcattgttaccagttgtagcataaattcgctggaatagtggtgtggcattaagacttggaacggtcaaaaaatcttcaggggttcacaaagttgagtgttgtttaaaaaatgactttcttacttaatcttccccttcctcagccaactctgtttctttgtgtaccaccactcttgtgaccgacatgtcagggtgctgctctctggcttccctgatcgcctgagccagtgcccgggtcatgatcaatatctccatctcctgtgatcacaatgcgtttctcaattcttgtttcagaaattccaccttttacagtcttggtgatgtgtgtggttgtcgttgttgacacggactcagatgtgatggtttgtgcggtcagtaacgtgcccgaatcaccaccagccccgccatcaatctgtggagactcatatgtgatggttttggtctcagtttggacaatggggacttccttggtggagatttctgtcctttgtgaggcatcagaaattgttaccatctctgtttttaccactggtggctctgaacaacaaataatttgtggcaaaacatcaatgtcaacatgggacacctctccgttaactttctgtggctcttcctctgcttcttctcccatgtcttgcttaagagcgccttcgtgtacactcttctctccgggtatcttttgggcacctacattttcctggatcactgtttctactgtgattacactggcacctgcttgtgtgactgggctggcttcgggcactgcttcctccctctctactaccttggctgccgggcggggttcttcctccacctcttc

SEQ ID NO: 262054 - DNA, 629 bp, Homo Sapiens
  misc_feature (27)..(27): n is a, c, g, or t
  misc_feature (38)..(38): n is a, c, g, or t
  misc_feature (79)..(79): n is a, c, g, or t
  misc_feature (94)..(94): n is a, c, g, or t
  misc_feature (106)..(106): n is a, c, g, or t
  misc_feature (166)..(166): n is a, c, g, or t
ttattccaaggcagggtcctccccagngtccaattatnggaaggattgaatttgggtatgttaggaaggaaggcactanggtttaaggctgccngatcttttagtngagggaagaaagttttctctttctcttcccctcctgttctggaatgctgccgaaggatgntgtctgacaagcattggcactgtggtcggcagggtctctaagcacagtgcacagtcagtgaacttcttcattattctccagtccagagattctgactctctactaaaagtagaaagtcacaggactggaaagtcaaaagggtccaatataaaaaacatccctgtgaaattctcaaatattagaaaattttcaagatgtaagaaaggcttttaatctgtattaatattttctcatacagtatatttgctgcaatttgaaaactccgtaaatatttactgtgagaattcaatgaaaagaatccagaagaaggaaagccactatctaaattagtcacagagtttcctttctgcgcaacagcacccgttcaagtgaacagcaccttaacagcttgggctggctttgttcactgtcatttgatcaaagtgagtcattaaaagcaggtagttgcacacaaagtaaacag

SEQ ID NO: 262055 - DNA, 916 bp, Homo Sapiens
ggggcaatagcgagacgctggagcgcggcgtaggtggctgccgagtcttttcctgtttagggtcttatcctggcattgagggcgccggactggcgcttttggccggcttggcattgggtgggcggcttcttgggacccacatgagccagtggcatcatccccgcagtggctggggccggagacgcgacttttcaggacgctcctcagccaagaagaagggcggaaaccacatccccgaaaggtggaaagactatctcccagttggacagcggatgcctgggactcgtttcattgctttcaaagttcctttgcaaaagagttttgaaaagaaacttgctccagaagaatgcttttcccctttggatctttttaacaaaatccgagaacaaaatgaagaacttggactgattattgatttaacatatactcaacgctattataaaccagaggatttgccagaaactgttccttacttaaaaatttttacagttggacatcaagtgcctgatgatgagactatttttaaattcaaacacgctgttaatgggtttttgaaagaaaataaagataatgataaacttattggtgtccactgtacccatggtttaaacaggactggctacctcatttgcagatatttgattgatgtagaaggcgtgaggccagatgatgcaattgaattattcaataggtgccggggacattgcttagaaagacaaaactacattgaagaccttcagaatggtcctatcagaaagaattgggaattccagtgtaccccaggtcaagtggattttgaagactcaggcacatcttcatggcaacccagtccacaataaggcctgtttaaacagggacctaggtataatctacatccagatcccagggtccctcaagctcctcgaaattttccacc

SEQ ID NO: 262056 - DNA, 572 bp, Homo Sapiens
cttgacagtataaggtacatgtaccctcaattttcttcatccagtaagacaagtatgcatcttaaagggaaagcttttagttcataacaatatgtttggttgcttttctctgctttcggaacatttactgtttttcctttattggctttagtgtttgctgccaaccagataacatgttaacatataatttacaactctctctaggtaggtgattacatagaaaactaatgccagctaagatttatggattcaaaagataactgacacaagttcttgtcctctacacttgagagaactagctgtttaacgcataaatatattgatagtaactacaagttaaataacattcagtgtcactatataacatgctgtcttacttgattctgtttttcagacttcattctagtttctctttgttggaagagtctcagagataatgtgtgctttaattttaaacactcattaccaatatgatttttgcccaaatgtttgttaatgtaagttaaaaaattatatttggtttggattcaaatatttatagatttacacaatacctatttcatcaaaatata

SEQ ID NO: 262057 - DNA, 1491 bp, Homo Sapiens
ggtagcgaggcctgggtggcgaattcggcacgaggctgaggagctgggacatgctgggcagttgtcagatgtaaaggcacagctggagcagagggcatgtcagtaatgattggtccctggggaaggtctggctggctccagcacagtgaggcatttaggtatctctcggtgaccgttggattcctggaagcagtagctgttctgtttggatctggtaggacagggctcagagggctaggcacggagggaaggtcagaggagaaggcaggcagggcccagtgagaggggagcatgccttcccccaccctggcttgctcttggtcacagggcggttctgggcacttgaactcagggccgaagcagaagcacaggcccagtcctggctgcaagcacaatagcctgaatgggatttcaggttaggcagggtgggaggggaggctctctggctttagttttgttttgttttccaaatcaaggtaacttgctcccttctgcctacaggccttggtcttggcttgtcctcacccagtcggaactccctaccactttcaggagagtggttttaggcccgtggggctgttctgttccaagcagtgtgagaacatggctggtagaggctctagctgtgtgcggggcctgaaggggagtgggttctcgcccaaagagcatctgcccatttcccaccttcccttctcccaccagaagcttgcctgagctgtttggacaaaaatccaaaccccacttggctactctggcctggcttcagcttggaacccaatacctaggcttacaggccatcctgagccaggggcctctggaaattctcttcctgatggtcctttaggtttgggcacaaaatataattgcctctcccctctcccattttctctcttgggagcaatggtcacagtcccctggtacctgaaaaggtacctaggtctaggcccttcttccctttcccttcctctcccctaccccagaactttggctccctttcccttctctctctggtagctccaggaggcctgtgatccagctccctgcctagcatccatgacctgttggatgttacctccaatcagtttcctgtcctacctgcctctttggcttggacctatatggccatgctctggctctacccttgggaagcctgatcccggtgtgtggcccagcttgttcaggccctgggatgctgcatctccaggcaactatgcactttcccggggagagaaccagtatgagaagtgggggcagggcacacattcatcttttgtaggaaggtctggcctggggtcgggtgaaggagggcccaggtcagttctggggtcccagtgacctgctttgccattctcctggtgccgctgctgctccctgtttctggagctggatgttccccaacctggcagttgagctgcctgagcccaatgtggtctgtccttgggtaactgaatggaacaataataaagggggaaacattttgggccctcgggt

SEQ ID NO: 262058 - DNA, 1293 bp, Homo Sapiens
  misc_feature (782)..(782): n is a, c, g, or t
gggagcttgttacagcttatcagatgcttcagagagagaagaaaaagctacaaggtatattaagtcagagtcaggataaatcacttcggagaatagcagaattaagagaggagctccaaatggaccagcaggcaaagaaacatctgcaagaggagtttgatgcatctttagaggagaaagatcagtatatcagtgttctccaaactcaggtttctctactgaaacaacgattacgaaatggcccgatgaatgttgatgtactgaaaccacttcctcagctggaaccacaggctgaagtcttcactaaagaagagaatccagaaagtgatggagagccagtagtggaagatggaacttctgtaaaaacactggaaacactccagcaaagagtgaagcgtcaagagaacctacttaagcgttgtaaggaaacaattcagtcacataaggaacaatgtacactattaactagtgaaaaagaagctctgcaagaacaactggatgaaagacttcaagaactagaaaagataaaggaccttcatatggccgagaagactaaacttatcactcagttgcgtgatgcaaagaacttaattgaacagcttgaacaagataagggaatggtaatcgcagagacaaaacgtcagatgcatgaaaccctggaaatgaaagaagaagaaattgctcaactccgtagtcgcatcaaacagatgactacccaggggagaggaattaccgggaacagaaagaaaaagcccgaaagagctgccttttgaggaacttgnaaaaaagctttgagtacagcccaaaaaacagaggaagcacggagaaaactgaaggcagaaatggatgaacaaataaaaactatcgaaaaaacaagtgaggaggaacgcatcagtcttcaacaggaattaagtcgggtgaaacaggaggttgttgatgtaatgaaaaaatcctcagaagaacaaattgctaagctacagaagcttcatgaaaaggagctggccagaaaagagcaggaactgaccaagaagcttcagacccgagaaagggaatttcaggaacaaatgaaagtagctcttgaaaagagtcaatcagaatatttgaagatcagccaagaaaaagaacagcaagaatctttggccctagaagagttagagttgcagaaaaaagcaatcctcacagaaagtgaaaataaacttcgggaccttcagcaagaagcagagacttacagaactagaattcttgaattggaaagttctttggaaaaaagcttacaagaaaacaaaaatcagt

SEQ ID NO: 262059 - DNA, 1895 bp, Homo Sapiens
  misc_feature (1232)..(1232): n is a, c, g, or t
  misc_feature (1572)..(1572): n is a, c, g, or t
  misc_feature (1579)..(1579): n is a, c, g, or t
  misc_feature (1635)..(1635): n is a, c, g, or t
  misc_feature (1648)..(1648): n is a, c, g, or t
  misc_feature (1724)..(1724): n is a, c, g, or t
ttaaaaagcaggctggtaccggtccggaattcccgggatatcgtcgaaacccacgcgttcggttgtcttaagatttagaagtgattattagcttgagaactattacccagctctaagcaaataatgattgtatacatattaagataatggttaaatgcggtttccacacaagttttcccttgaaaatgtaattcctttatggagatttattgtgcagccctaagcttccttcccatttcatgaatataaggcttctagaattggactggcaggggaaagaatggtagagacagaaattaagactttatccttgtttgcttgtaaactattattttcttgctaatgtaacatttgtctgttccagtgatgtaaggatattaagttattaagctaaatattaattttcaaaaatagtccttctttaacttagatatttcatagctggatttaggaagatctgttattctggaagtactaaaaagaataatacaacgtacaatgtctgcattcactaattcatgttccagaagaggaaataatgaagatatactcagtagagtactaggtggggaggatatggaaatttgctcataaaatctcttataaaacgtgcatataacaaaatgacacccagtaggcctgcattacatttacatgaccgtgtttatttgccatcaaataaactgagtactgacaccagacaaagactcccaaagtcataaaataggcctatggaccaacttgcagcaagacaggaggtcagctcgcctataatggtgcttaaagtgtgattgatgtaattttctgtactcaccatttgaagttagttaaggagaactttatttttttaaaaaaagtaaatggcaaccactagtgtgctcatcctgaactgttactccaaatccactccgtttttaaagcaaaattatcttgtgattttaagaaaagagttttctatttatttaagaaagtaacaatgcagtctgcaagctttcagtagttttctagtgctatattcatcctgtaaaactcttactacgtaaccagtaatcacaaggaaagtgtcccctttgcatatttctttaaaattctttctttggaaagtatgatgttgataattaacttacccttatctgccaaaaccagagcaaaatgctaaatacgttattgctaatcagtggtctcaaatcgatttgcctccctttgcctcgtctgaggggctgtaagcctgnaaggatagtgggcaagcaccaagtcagtttccaaaattgcccctcagctgctttaagtgactcagcaccctgcctcagcttcagcaggcgtaggctcaccctgggcggacaaagtatgggccagggagaactacagctacgaagacctgctgtcgagttgagaaaaggggagaatttatggtctgaattttctaactgtcctctttcttgggtctaaagctcataatacacaaaggcttccagacctgagccacacccaggccctatcatgaacaggagactaaacagaggcaaatcaaccctaggaaatactttgcattctgcgtacggttagtaccangactganggtcattctactggaaaagattgtgagattgacttatctgactgcttagaccgtantaggaggagctangcactagaaattgcagttagagcaaagttttaaatagtctctgaaatctgtgagcgtgtgaatgggacactcagtnggttcttgtaaatcagttggggagaataccggtgtattaaaacaaacacatgtttttttgccgcgcattttttgtcttataaacaagggtgtaaacccgtcagacacattatgtgtttgggtgtccagatgcgaggcgcccgagtccttgacacgcaggagtggtacagta

SEQ ID NO: 262060 - DNA, 554 bp, Homo Sapiens
agcaagctgacagcggagttttgatacttccgatttgagttggctattttcatctttcaacttcacaacatgcttgattttttgtttcaaattctgatgacccaataatttagcatatgaatctcttattttatttagctgttcctgagctgcaccatgttcattcaacaatgcctgtttttctacttcaaaagcatctagttgtagctgaaaaggttttgttttattatatagttcttcatagaggagacgccacttgttaatttcttcagttaattctgctgttgtattttctttttcagcttttcttccttcttcatcttccagctgttttctaaagtcttcctcctgttgcttgagttggttctgcaaatcagttattttttgaagaaaagaaactgtgatttctttaatttctgtttcctttagtgctgacttgggcctgcagatctaggaaggcatccttacatattcttggatttgaggctctcagttgccaaaatctggatggctggaacatcctctggcatttttcccagccttgggccggtttt

SEQ ID NO: 262061 - DNA, 1722 bp, Homo Sapiens
  misc_feature (960)..(1187): n is a, c, g, or t
atcaacatagttaaccagaagcaagtttatttaagagatcagttcagcacaggctactgtagaatgtcttaccccaccatattgtaatggtatgcacaaaaggcctaaaatcagagctatatatctaggaacaagacagatatgttggatgctgttgtacatgcaccaataatatttgaaaacaagacaaactatttcagtgaccataattgcctaccatagactccagagaagatcagcattttagaattagaaacacacttgaatagatggaaaagaaacaagctgttctacctgtgacaagagcaccagtattgagtgatgaggacaaaaagaggaagaatatattcaaggaaatgtttagcacttttgttcaaagctagaaacccactgttggaagagcagcgtatgggctggtgtcttgtcagttgttaaggcagtttgtttgcattttgaaaagcttactgcagttgaggaatcccaagattgcttgaagattgatttgaccggagtcaaatcaagacttgaccagcaacatccctaaaggtctcttttccttcactttctggggataattaattgctggtcatcctcttgagcctttcacacctcgtttagtggctatagtgcccccaagacctgaggctgtccaccaacagctataccctgaagcatggctgtagaacactgcagggaaggcagccccatgcaggccatgtgtggatgcaggcggataggaggacaagaaattaggctaaaaaatctgagtttagcaaaaaagtatgtaacattgcttcagcacttgtagatgagtaaggatggctcataaattaggtcataatagtgttccagtagcagctataagaaaggcattaaacaaccctcatttgtgaacattctagggcagcccatggatgagtttaaaataattcaaaccctggctgggcgcagtggctcagnnnnnnnnnnnnnnnnnnnnnnnnnnnnnnnnnnnnnnnnnnnnnnnnnnnnnnnnnnnnnnnnnnnnnnnnnnnnnnnnnnnnnnnnnnnnnnnnnnnnnnnnnnnnnnnnnnnnnnnnnnnnnnnnnnnnnnnnnnnnnnnnnnnnnnnnnnnnnnnnnnnnnnnnnnnnnnnnnnnnnnnnnnnnnnnnnnnnnnnnnnnnnnnnnnnnnnnnnnnnnnnnnnnngcactccagcctgagatcctgtctcaaaaaataataactcaaatcctactaacaaatgttaccagactttgacattaaatttttaaagtgtattaatttttaatatgaactaaaggaaaatagtattttgtttagagttccttaaatgtgtgaatacctaaggctttcccattgtctatgcagcatatttaaaggttccagaaagtgtttaaggccaagaaccaaaattacaggcctaataaagtatttcttctcagatgctaaacagttctctacctttcaaacttaagcctttgtcttaccctttaaagtgtaagggctttgtaggtccacaaagttggtaaatttgttccagttctctcctgtcactatctttggaaataatttaaaatgtacacagtcttgaaatcttgatataacattttacaaaatcacccaaaagctgctaattaggcaacctgtttaagcagctaccaaaaatgaaaggcaagaaatgaaaggaggacaaattatggtttaaagctatgatagtctt

SEQ ID NO: 262062 - DNA, 1296 bp, Homo Sapiens
caaagatggagcgacaatattgactcacgcctactccagagtggtcctgagagtcctggaagcagccgtggcggccaagaagcgatttagtgtatacgtcacagagtcacagcctgatttgtcaggtaagaaaatggccaaagccctctgccacctcaacgtccctgtcactgtggtgctagatgctgctgtcggctacatcatggagaaagcagatcttgtcatagttggtgctgaaggagttgttgaaaacggaggaattattaacaagattggaaccaaccagatggctgtgtgtgccaaagcacagaacaaacctttctatgtggttgcagaaagtttcaagtttgtccggctctttccactaaaccagcaagacgtcccagataagtttaagtataaggcagacactctcaaggtcgcgcagactggacaagacctcaaagaggagcatccgtgggtcgactacactgccccttccttaatcactctgctgtttacagacctgggcgtgctgacaccctcagcagtcagcgatgagctcatcaagctctatctgtaacctgtgagccctttcctgccaaggtgcagcttacgtagttgaggcagggtgagtagctgcttgacaccccagtgagtcaggccaaaactgagatgtgtttaatgaagatttatggagtaaggacttaaaatcatacatcttggagaacctttcttactcatttcagtcccatctaaaaatgtgtcagctattctaaatcccaacttaaattgttcttacggtttctagaaactttccttttcagtttccagaaatacaagttagataattggctacttaactgatgaaagatgagcccaagtccacctgtcttcatcctcccctgcactccagactgatctgcctaaagcacgcgagatgcaggcgaaaagcagccacacccctctgccacaaatgaccaacagctggtcaggacgttacacgcggtgccttgtaagaggcaagaaacacttgccgaatctgcatctggcttccagtggtaagcacattcctcagcaggatcaagccaaacagtaaaaactaccaagagaacacgaggaaggcagaaacgatgtttagcaacagtattctgcatggttcactgcttaagaaaatgccttctggaatatttgtaaactgaaattctgtatgtgtaagagatgtttaaatatgtttgggtcctaaacagctttttaaaattatacttgggaataaattcagcatcttttcaaataaactctatgaaagattttaaa

SEQ ID NO: 262063 - DNA, 718 bp, Homo Sapiens
ctacctggtgtggctttatgaacgggactcaaactttcaatctgaaaacttgctgtaagccagcatggggtgggggaggtgattatggctggggaagatgggcactcacccgacagcagcatctagcaccacagtgacagggacgttgaggtggcagagggctttggccattttcttactgaagatgacattttgagaacgttagagaaagtacaagacagtaccacagtgatgtatgtcacctaatgtggacagtggatgtttgcttgaaactcacattaatactaatggggttaaggggcagatcccaatactttggactaaggaaacaagaatttgagttctttagaaagaagtatttttggaaaactatactcttagactctgggtaagagatgtaaattcaggaaaaaaggaggaagttttgctttgattatcgtctagagagagggagatataagttacctattccttgataaaaatcttcatcaatacaatctctgctcttccacgggagttaactacttaagtgaaaccccctagatcatatactgcggcctgctgcaaattcagtgatttttcttccaaaggcaggaaaaggtacaatgaaaggcagtgctgactgctggcaagctgggggcacattctggttctgatcctgttggactgtaatccgcagtttgctctgtaaaattatggctgggcacataacgtgaaa

SEQ ID NO: 262064 - DNA, 542 bp, Homo Sapiens
  misc_feature (274)..(274): n is a, c, g, or t
  misc_feature (472)..(472): n is a, c, g, or t
  misc_feature (478)..(478): n is a, c, g, or t
  misc_feature (501)..(501): n is a, c, g, or t
  misc_feature (516)..(516): n is a, c, g, or t
aaagatggagcgacaatattgactcacgcctactccagagtggtcctgagagtcctggaagcagccgtgggcccaaagaagcgatttagtgtatacgtcacagagtcacagcctgatttgtcaggtaagaaaatggccaaagccctctgccacctcaacgtccctgtcactgtggtgctagatgctgctgtcggctacatcatggagaaagcagatcttgtcatagttggtgctgaaggagttgttgaaaacggaggaattattaacaagattnggaaccaaccagatgggctgtgtgtgccaaagcaaggaacaaacctttctatgtgggttgcaggaaagttttcaagttttgtccggctcttttccacttaaaccaggcaaggacgttcccaggttaagttttaaggattaagggcaggacactcttcaaggttcgcggcagattgggaccaagacctcaaagaggagncttccntggggttcgattacattgccccnttccttaattcattntggttgtttacagacccggggcgttt

SEQ ID NO: 262065 - DNA, 625 bp, Homo Sapiens
  misc_feature (336)..(371): n is a, c, g, or t
acttatgaaataagttttgacctagacacaaggggtatatgaaggaggaaaaaaatttctttgcaaaatctcccaaaacttgctttttttcccttccacacaggcactattataattttcagtgccatgttaaattggattatttcatttactttaagttaggaattactgtgtaatttattaattcatgattctcataacattcagcataagtgtagcaaagttgctaataacggaaggggatcatagtggtgttgaatgtaactttgaagtagggaatggccttttaagtctgagagagaacatttgaatccttttcacggatttgtgtagggnnnnnnnnnnnnnnnnnnnnnnnnnnnnnnnnnnnnagataagtgtatatacataaatacactcttctaaagttgtatatacatatgcacattacatacattttaatttattgacaaaattaaccaaattaagatttggagatgtgggatgttcttgttttaaaatagcatgtttgaaaccatcagtttgtgtctaaaattagctgtagcacatggatgttgtccatattaagctatttgctgtttgaattatagaggtctacagtatttgtgttggcatagtttttgta

SEQ ID NO: 262066 - DNA, 617 bp, Homo Sapiens
gggaaacaggcaagcaaggcttttcctggatagtgtttgcccatgaaacaaatgaatcacctcactaaatgattaaaaaacatttcctgttggtttcatactactaacaattataatattttaatggataggagaaattatgggtttaaaattaaattctctgttaatgcacacgtttcaataaactggttatcagactgcttatgacaatgtcagtaccatacattcaactgcttttagtccttctagtctttctcttgggcaaaattggtggttatctaatttctgttacctatcaatcacctgttttggacattaactgtcaattactggctgcaaaatatgtctgtgtatatttacatgagatgtaactatacagatgcatgttgaattgtagacatgagttccattatttcagagctatactctgaatgtgagacctttatatttacacacacatacctctccagcccaacccaacattcattcatataaaaatatatgactattgtagaatccttcatttacatatcactaaaaatatgttctttcattctaacatctttttatctagccttgccaaccaacatcataagactgggatataaaatcttctc

SEQ ID NO: 262067 - DNA, 344 bp, Homo Sapiens
  misc_feature (203)..(215): n is a, c, g, or t
attcccagcttttattctataagaacataaacatcgtctttttccacgcacagcagcaatacaatattaatttattctgatttaagattagaagtaaatagagctagaactaacatttataataacgatagaatgcatttgcttaaaacaagattggcaattcttcataataatagacatttatacagattggtatttatagnnnnnnnnnnnnnctgcatctacaggtttgacccttttatgcatgtaacttcacagtataaaggaaatacaaacaatgtctcccttctctagtttattccacttaccccagtcctcctaggcttctgtgaatttcagaaagc

SEQ ID NO: 262068 - DNA, 235 bp, Homo Sapiens
tgtatggttaaaccttggcgtctagccgtattttatgtcataatacaatggatttgtgaagagcagattccatgagtaactctgacaggtattttagatcatgatctcaacaatattcttccaaaatggcatacatcttttgtacaaagaacttgaaatgtaaatactgtgtttgtgctgtaagagttgtgtatttcaaaaactgaaatctcataaaaagttaaatttttgtttg

SEQ ID NO: 262069 - DNA, 1019 bp, Homo Sapiens
  misc_feature (26)..(26): n is a, c, g, or t
  misc_feature (192)..(192): n is a, c, g, or t
  misc_feature (267)..(376): n is a, c, g, or t
agcttgtttactgatggggaccaagncagtgttctttaccaaatctcagggcgggtagcctgcaagcctacagtgtggatgttggccacttgtgtcacttcttgggacggggcttagggacctgacttacttaggaacataaattttggggttggaggaagcagcagtgctctactgcggcacgacagacanccctgttaaggcaacactgggatccagctcaggaaaagcattattttcaaattgtgcaagccaatgcacagaaannnnnnnnnnnnnnnnnnnnnnnnnnnnnnnnnnnnnnnnnnnnnnnnnnnnnnnnnnnnnnnnnnnnnnnnnnnnnnnnnnnnnnnnnnnnnnnnnnnnnnnnnnnnnnttcaagtaactgatgtgcagtcaagcgcgaggaccactggcacacaatgtttaaattctaaatatattttacttcctagtgtattgctactgacaaaacgtagttttctggactcatcagaatgttaggctcataccttctggcaataaattaaggtagttaaaagtaactgctgaacctaaaatgaaggcagcagcaattagatataaaaaaatcttaagatcagcctgcaaattgtaaactagtttacaaagcaggctatacaatgaggaataattcgagcttgtagaaatccatggtttccaccagatacaggtattccggatctagaattatctttctatttgcaggatttccgaagagaccgttaagcatctacgcgccccttcctggatcccatgcttcttggggcaggaaatttcttttggtccgtcgctttcgtcgtgaaatacacaactaattttcctttcatgttataaggcaccatatttatgattttgttaactgaagaaaaaacccgagataaaccatcttaagtacttttaaaagtccagtggctgaattcggtgtttaatctgatacccttctggattcgctgacactggagagaataatttccaagtcttagtatagccaaaaaaaa

SEQ ID NO: 262070 - DNA, 493 bp, Homo Sapiens
  misc_feature (18)..(18): n is a, c, g, or t
  misc_feature (27)..(27): n is a, c, g, or t
  misc_feature (128)..(128): n is a, c, g, or t
  misc_feature (155)..(155): n is a, c, g, or t
  misc_feature (309)..(309): n is a, c, g, or t
  misc_feature (360)..(360): n is a, c, g, or t
gtcctcgcgcttgactgnacatcagtnacttgaagagccacacttcagatcaatgcagtcggaacctgggaaagtaggtcccagacatcgggacctttttaaaggctcccccaagtgaattcttacgnttccccaagtttgaggacccacttttnctgtgcattggcttgcacaatttgaaaataatgcttttcctgagctggatcccagtgttgccttaacagggtgtctgtcgtgcccgcagtagagcactgctgcttcctccaaccccaaaatttatgttcctaagtaagtcaggtcccttaagcnccccgtcccaagaagtgacacaagtggccaacatccacactgtaggcttgncaggctacccgccctgagatttggtaaagaacactgccttgttccccatcagtaaacaagcttacctacctcaggaggctgcttgtgagagagcaaatgcagtatcttcagaatgatttatttttttaattaa

SEQ ID NO: 262071 - DNA, 1279 bp, Homo Sapiens
  misc_feature (1112)..(1150): n is a, c, g, or t
tgggtggcgaattcggcacgaggacacctcttgttattccttagagtcacttcaaggcctgtttgaatgtggcaggttagaaagagagagaatgtctttcatttgaagagtgttggacttgtgtgaaaggagatgtgcgtgttggaatctgcttttccaagccgccagggtcctgacggcagcaggacgaagcctgttgtggcgtcttctgggaaagcctgaccgtgtgttcggacggcactggctcctttacgaagttctcagtaactgagcccagagtaactgcacgcctttgtgcagctctggagctccaccaactctcggcctgccagttctcaagcgagctaatcttgtcattaatcgatagaagctaacttccgaagttaggacctagttactttgctctcaacatttaaaataatgcagttgctctagtgaatggggcgttaggggcctgtctctgcacctgtctgtccatctgcatgcagtattctcacccatgttgaatgcctgctgcttgtttaccctttggaaaccctggggtgaccaaggtttggaaagccacctgagaccacttcatagcaagggaaggctttaagcagttactagaaagagatggggatttggcccctggctcctccagcctgaatgagctatttaatccactgtccatgttcctcatcagtcaaatccaaagtcaaaggatttgaacctgcatctggaaacgtaaccactcacagcacctggcccgccaaggttgggaggattgtacactactttcatttaaaggggaaagtttgataatacggaattaattaatatgaatgagatgcattaataagaacctgagcatgctgagagttgcaattggtggttttctggtttgattgatttccttttttctaagacacatcaaagtcaaaaaagatgggttttacctttactgacccagctggacatatgtatttagactgtttttaaatgtctttcttcatgaatgcttcatggggctccaggaagcctgtatcacctgtgtaagttggtatttgggcactttatatttttttaaaaacgtgttttggatcctgtactctaataaatcataagtttcnnnnnnnnnnnnnnnnnnnnnnnnnnnnnnnnnnnnnnngccctgttataaacgttgaactttcccaatgttaaaatgttaaatatttggatatagcaacttcttttcttttcaaatgaatgccaagatttttttgtacaatgattaataaatggaacttatccagag

SEQ ID NO: 262072 - DNA, 1017 bp, Homo Sapiens
  misc_feature (38)..(38): n is a, c, g, or t
  misc_feature (967)..(967): n is a, c, g, or t
gcgccaactgctgcgggataacaccacagggtctaatncttccctcaacacctcgctgccttcacctggtgcctggccctacagtgcctctgacaactcctttaccaacgttcatagcacttcagcaaagttccctgattacaaatcaacatggtccccagatcccataggacacaaccccactcatctctccaacaagatgtggaaaaaccatatttcctccaggaacactacaccgctgccccgccgcacatcctggggtctgaacaaccccaaaccatcatctccctggagcagcacagcaccccgatcagtcagggggtgggggacacaggactcacggctcgcctcggcctctacctggagtgatggtggctcagttcgtcctagttactggctggttcttcacaatctcaccccacagattgatgggtcaaccttgagaacgatctgcatgcagcatggcccactgctgacattccatctggaatctaacccagggcactgccctgattccgatacagcaccaaacaggaggcggccaaggcccaaactgcactgcacatgtgtgtgttgggaaacactaccatccttgctgagtttgccactgatgatgaagtcagccgctttctggcacaagctcagccccctacacctgcagcaaccccaagtgcgccagctgcggggtggcagtcgctggagaccggccagaaccagtcagatcccgtgggacctgctctgaatctttttggtgggtccactgggctcgggcagtggagcagcagcgctggtggcagcagcggggccgatcttgctggcgcttcattgtgggggcccccaaactattcttctagcttatggggagtcccaacggtggtagatccccataggatgggcagccctgctcctttactacctggtgaccttctggggagagggtcgggatcaatctgaacttaaaactttncactctgacctcgtgacctttttttggacagcagcagcactaacttgacc

SEQ ID NO: 262073 - DNA, 775 bp, Homo Sapiens
ggacatgctgccattctgccaagagaggctcttctgggggccaggctgggactgggccccggaaaccgaaaactccgtgccttacccagccggggccctcctggagccttcttggggtgattgtggctgggaacccgacaggcaccagtgcccatgccaggcctggtgccctacctggacccgccatgacacgtgccagcctcccacctgcttcctaaaggcaaccctggcccacacccgcatgcgcccggtgcagcctgccaagggccagtcggggggtgctgcgtcctgccagtgtccaccacagctctgcctgcccttcagcccagcaaggtttaatcaaaatgcaatgctttgcaagtctttactgcttggaggtggctgagttgggggccctaggcaggggtaagctggcaggcagtgccatggcaggccagggtcccctcccatggggtctggcccccgttccagcatgtccagcccctgaagttggagtggggggcggtctgcctttgctgccactgccaggcctctgccctgcagctgaaacttggccatcacatcaacagaaaacccctcccagtgccagctgcccagcgtgggcaggccctggggacaatacaggtccacctgaggggctgcagggtgacacccagcagccgctgccccctcactgcccacccagcgagggcagcctacccgagcctgccccctgccaggtgtgtgccctgaggctggcggctggatgcgtggccaataaaaagcagacctaaaa

SEQ ID NO: 262074 - DNA, 1311 bp, Homo Sapiens
  misc_feature (1114)..(1114): n is a, c, g, or t
ggataaagagtttgctgaaaacactgaaaacttgaaaaccaaaatgtcagaactaagactctgctgtgacctccttgttcagcaagtagataaaacaaaagaagtgaccacaactggtgtgtccaattctgaggatggaattgatgtgggaactttgctgaaatcaacctgtaatacttttctgaagaccttggaagaatgcatgcagattgcaaatgcagccttcacctctgagctgctctaccacactccaccaggatcaccacagctggccatgctcaagtccagcaagatgaaacatcctattataccaattcataattcattggaaaggcaaacggagttgagcacttgtgaaaatggatctttaaatatggaaataaatggtgaggaagaaatcctaatgaaaaataagaattccttatatttgaaatctgcagagatagactgcagcatatcaagtgaggaaaatacagatgataatataaccgtccaaggtgaaataatgaaggaagatagaatggaaaacctgaaaaatcatgacaataacttgtctcagtctggatcagactcaagttgctctccagaatgcctctgggaggaaggcaaagaagttatcccaactttctttagtaccatgaacacaagctttagtgacattgaacttctggaagacagtggcattcccacagaagcattcttggcatcatgttgtgctgtggttccagtattagacaaacttggccctacagtgtttgctcctgttaagatggatcttgttgaaaatattaagaaagtaaatcagaagtatataaccaacaaagaagagtttaccactctccagaagatagtgctgcacgaagtggaagcggatgtagcccaagttaggaactcagcgactgaagccctctttgtggctgaagagaggtctcaaatttttgaagggatttttgacagaagtgaaaaatggggaaaaggatatcccagacagccctgaataacgcatatggtaaaacattgcggcaacaccatggctgggtagttcgaggggtttttgcgttagctttaagggcaactccatcctatgaagattttgtggccgcgttaaccgtanaggaaggtgaccaccggaaagaagctttcagtattgggatgcagagggacctcagcctttacctccctgccatgaagaagcagatggccatactggacgctttataagaggtccatgggctgaaatctgatgaaggttgaagaatggctgctgggcaaccccctcttaattccaggggataaaagggcttaagtggt

SEQ ID NO: 262075 - DNA, 308 bp, Homo Sapiens
gaacgtgagccactgcgcctggcctaaatatttctaattctttttttgttttcagttccctactcgtgaaaatttaagtagattcttaaatgtttgatggataaatgactggatgaatagcatcatgtgattattctcttcccaagactgaaaagtaaacaccaagattgtacgcaccttattcttttcattttgaataatttctaatagctggtctgtgtgcccttcttctatgcatctttgcccagctaactgaaataggccaaaatcctcttctttaaagtcttgctcttctaggatttgctggc

SEQ ID NO: 262076 - DNA, 240 bp, Homo Sapiens
gtgtttgtttggcgggagagggtgacctggaaagccacaagtgagtatttgacatattctgtatccttaatccaatcatttggcaaaataaaaggtttctgtgttgtaagaatctgatactagtgcttaagactttgggaagcattgcactgttgtttattagaactttatgtatatttactgtacatagagacttgtttgaaaacatgaatagtcattaaataaagacattgttaaatt

SEQ ID NO: 262077 - DNA, 717 bp, Homo Sapiens
  misc_feature (34)..(34): n is a, c, g, or t
  misc_feature (62)..(62): n is a, c, g, or t
  misc_feature (142)..(142): n is a, c, g, or t
agatgaggggtccttgcccatgttgccccgggcnggtccttgaactccctgaccctcacacnaatccctccctgccttagccctccctgagtaacctgagattaccaggcacaagctgctgcaccccagcctctgtaggtgncttttaaatgattatacaatggaaataacattcattgacatttctgtggtttgaatcccagagagatacttcttatagaaaaacaaatgtttatgctaaaaataacaccaaaatgtggtgaactcttaaggacttttcccttcaagtgtgaaggaaggtgtgatgaatgctgtggagaggcatctggaacagaaattcaaaataaagccttgacattaaataccccttccactgctcactttgtggatggtagcatgagctgtctaccaagaagaaacctgctgctctcttaattttaatatttcctaatttgttgatggccttttgtgttgtgaaccacaacaaagagaggcctcttttgtggctggttattccagttccctgggattttaaattctttggtctattaagtatccttgtattggatacgtaataccttagtgctgtcataatgttgtacaagatcatgatcagcttctccctttcttcattttctgtgatttaaccatgttctttcctgtctctttccatttaagatattttatttgaatactgataaacattttatcctgaaa

SEQ ID NO: 262078 - DNA, 537 bp, Homo Sapiens
  misc_feature (24)..(24): n is a, c, g, or t
tccacccactcggctcccaaagtntgggattacagcgtgaccactgcgcccggccacattcagttcttatcaaagaaataacccagacttaatcttgaatgatacgattatgcccaatattaagtaaaaaatataagaaaaggttatcttaaatagatcttaggcaaaataccagctgatgaaggcatctgatgccttcatctgttcagtcatctccaaaaacagtaaaaataaccactttttgttgggcaatatgaaatttttaaaggagtagaataccaaatgatagaaacagactgcctgaattgagaattttgatttcttaaagtgtgtttctttctaaattgctgttccttaatttgattaatttaattcatgtattatgattaaatctgaggcagatgagcttacaagtattgaaataattactaattaatcacaaatgtgaagttatgcatgatgtaaaaaatacaaacattctaattaaaggctttgcaacacagaccccgaaacccgcgagagcaaagaattgccttg

SEQ ID NO: 262079 - DNA, 540 bp, Homo Sapiens
aggacgtttgatggaagtgaatgaaaacatcctccataagccatctattcttcaagaaaagccatctactgaaggctacattgcagttgtgttacccaaatttgaagaaagtaaaagcataacagaagggttactgacacaaaaacaatatgaagaagtcatggtgaaacgcattaatgccacaacagctacgtcatgaggattgacatggaacaaaaagcaaagtgggattcttgttacctggcctaaaccatcagggtactaaaggagaagaaccagtatatgtaaagcatacctaacagccagccatatgcaggggaggcctagtgcttcacttagttttccctctctgtcttcataatgagccttggttcccatttgtctacagcctgccagatctggcctgcccatgtactcacactgttctcttgcatctctctaacaactggcatgcaaggcatgtttttctgattaaaaacaaacaaagatctttgaagaagatttagaaaatacagaagagttttaagtagccaagtaaaa

SEQ ID NO: 262080 - DNA, 1005 bp, Homo Sapiens
cccctccccggaaccaaggttcccccatttgttgccccccgatccccggccggggtcccctgggagccccgaaaacggggtttgcccctttccaacaaggggagccacttttcaaggagccagctcctgagccccagggtctatggctggggcctgggcaaggctcaagccattcgtgctgagttcaaccaagccgggtgggcgagcagctactgcgggacagccacgtcacctggatgctgagacggcggaacaaccatgaaaccatccaccatggccagaaacgtcagcccacagatgctcctagaggaagatgcagccgacacgaagggcggtatgagaacaggagaaacacagacagctgccgccaccaccggctcacacgcagcctccgacatgaaaagaaagtgcttcaagagcttccactccactggtctggcttcccttcaaccagaaagggggcacaggcacccagcaagagcctgtgctggtgacacagaatgttctttctagagcccaggggacagccccatcctctgagctggtcacaactgatgtcaccttttccttcttgaagggacatgccaggatgcaggggaacaagttaaaaagcttttcctaatttgaggtgagagacaccactgaccgccacgatcagcaacttagcgtcgcctcccccggtctcatcttcttggcatgcccgtcgggcccaggcgggggactccggcgccgctgcttcttctctagctgctgctgcagtctctcctctttcttcttcaggtaggaggtcacgttgtcgaacgtggccttgtagagactgctgaagctggcgtctgcgccggcagagccttccagcatggcccagttcccacgaagaacaccagagactttctttaacacggtgctctcaggaacagactgccactggtcgcccacaggcctgtagagcaccaggggggcttcctggccctcgtgccgaattcgccacccaggcctcgctacctt

SEQ ID NO: 262081 - DNA, 1232 bp, Homo Sapiens
  misc_feature (771)..(819): n is a, c, g, or t
gttttaacatcgtgacaatgagggctttttctagcaatgatttttaaattgtgtaagtttgacagtattttattgttgggtttttatttgattttagttgtgtgcttttcatttgcagaagttagtaactgtttttcacctactgcaccaaagttctcgattttaggagcccagctttagtcatttgaacatgcttctaaataaaataaaacaaaaccaaaactatacttttgatctataataagagctcaataactttgtcaaggaaagctctaatatatgcagtgatggtttatgaaagggtgtggcaattttaaatttatattgtgtgtgatgttcaaataaagtggtatctacattcatgtgatttatgggtcagcatgaccattaattactgagtagaaattgactaaactttgatttcctttttttaaatcgtgttgcatttgattcctgagcaaattccctcaaagtgaactcttgttcttaaattttgaattttatggtgagattgtaaagatagaggcaattgaaacattgttccttatttatgaactgcttgaagtgaatacttaatttaagtttgcactttaataccaaacttaaaaccaaacactcatttaaaagtaggttaagtgatcatggatcattgttattagctttgtggctttgtgaaattctaaaggaatcaaataattcatcatgatttaaattttctagagattttgatttttttataatgtttctttcctgtagattgtgtgcttgttnnnnnnnnnnnnnnnnnnnnnnnnnnnnnnnnnnnnnnnnnnnnnnnnnaaaatagaggtcacgagcctgagacctccgacgcaaatgtgccgtcgcactcacctcaggatcgcaggaatcagggagacgcgactcacagggtggtccccccgcaacaatctaagacaacggcaccagcgatcatcagagccacaccacagagacgacgcgccgcgctgccatcctcgcgcatcaccaccccactatacaatcgcaatactgccgcgcacccaaataaggactcctaaaccacgccagctggccaccaccagcgccgcgggcgccccgccaaacaacacacggccccctactcccccgactccactgaccgacacactccggcagaacccccgaccaccacgcacactcgccactcccccacgctcgcacaaaacccgcaaaaaccctggccgaacaccccc

SEQ ID NO: 262082 - DNA, 629 bp, Homo Sapiens
  misc_feature (575)..(575): n is a, c, g, or t
ctccttgattacataatgttagtagcactgagacccccatggtaatgtaacttaattataagctatgtcactaccattctgtaaaatactattggacagacacagagggacccttggcccctgtgtctggtccacacacccacagaagccttgtattatcagtgaatataaatgtactacatttgcatgccttttgggtttgccttaattcttacctcatttgcatcctatcgatctggaaagagctgttttggatgaatgcagtataaaatgtaaaaaccctgctaaatgacttattgattaagtatatctatctatatatacatatacacaaagatattatttatcgaaagtaaaaaagatggaagtgtattggtttctgtttgaattttcaaaggcttccaatgtggtggcaataaatgtcccaaataaatttataacaattgattttccccctaattcttattttataattttaaaattgcagcagttgctagcaacaacttactaaatctactcttaaatatacaactttggaatttgaaggattaatggccaccaaaagggggaaaaangcaacttttcccacctttttcatcccggggtcccaaaagggggggcccaccggg

SEQ ID NO: 262083 - DNA, 1169 bp, Homo Sapiens
  misc_feature (811)..(985): n is a, c, g, or t
  misc_feature (991)..(1041): n is a, c, g, or t
  misc_feature (1055)..(1117): n is a, c, g, or t
ccgctccacccctgccaggcccagcagccaccacagcgcctgcttcctcggccctgaaatcatgcccctaggtctcctgtggctgggcctagccctgttgggggctctgcatgcccaggcccaggactccacctcagacctgatcccagccccacctctgagcaaggtccctctgcagcagaacttccaggacaaccaattccaggggaagtggtatgtggtaggcctggcagggaatgcaattctcagagaagacaaagacccgcaaaagatgtatgccaccatctatgagctgaaagaagacaagagctacaatgtcacctccgtcctgtttaggaaaaagaagtgtgactactggatcaggacttttgttccaggttgccagcccggcgagttcacgctgggcaacattaagagttaccctggattaacgagttacctcgtccgagtggtgagcaccaactacaaccagcatgctatggtgttcttcaagaaagtttctcaaaacagggagtacttcaagatcaccctctacgggagaaccaaggagctgacttcggaactaaaggagaacttcatccgcttctccaaatctctgggcctccctgaaaaccacatcgtcttccctgtcccaatcgaccagtgtatcgacggctgagtgcacaggtgccgccagctgccgcaccagcccgaacaccattgagggagctgggagaccctccccacagtgccacccatgcagctgctccccaggccaccccgctgatggagccccaccttgtctgctaaataaacatgtgccctcaggccnnnnnnnnnnnnnnnnnnnnnnnnnnnnnnnnnnnnnnnnnnnnnnnnnnnnnnnnnnnnnnnnnnnnnnnnnnnnnnnnnnnnnnnnnnnnnnnnnnnnnnnnnnnnnnnnnnnnnnnnnnnnnnnnnnnnnnnnnnnnnnnnnnnnnnnnnnnnnnnnnnnnnnnnnnnnnnnaggggnnnnnnnnnnnnnnnnnnnnnnnnnnnnnnnnnnnnnnnnnnnnnnnnnnntttttttgaaaaannnnnnnnnnnnnnnnnnnnnnnnnnnnnnnnnnnnnnnnnnnnnnnnnnnnnnnnnnnnnnnagggaggaaaaaacaccccccggggggaattttaggaaaaaaacccctcttt

SEQ ID NO: 262084 - DNA, 972 bp, Homo Sapiens
  misc_feature (677)..(677): n is a, c, g, or t
  misc_feature (799)..(799): n is a, c, g, or t
  misc_feature (830)..(831): n is a, c, g, or t
  misc_feature (850)..(850): n is a, c, g, or t
  misc_feature (873)..(873): n is a, c, g, or t
  misc_feature (886)..(886): n is a, c, g, or t
  misc_feature (900)..(900): n is a, c, g, or t
  misc_feature (902)..(902): n is a, c, g, or t
  misc_feature (920)..(920): n is a, c, g, or t
  misc_feature (923)..(923): n is a, c, g, or t
  misc_feature (931)..(931): n is a, c, g, or t
gcaatttctgaataaggacataaggctagattcatttttcttaatagagaaaaaggaaatttctgatttatcacttttctagttgataagtaggattcaaaacgtttgatatgtaagtatttatataagactaatgtaatttaaagttctgtattattgtgattaatcatacagaaattcaggaactgatcagaagtgagattcttttccacatctggttaatgtagtgagttgacaccctgtgggtggtaaagcattataaacatttcatcttgaaccatgatttatacacatctgtgttataagggaggcttgagtacatataccaatgaagagatattcagcatttgtctatttgataaggaattaaatgtcctagtgattataaagtaaaaccacagaccaatttgcaaatgatcttcaatgttaagcacttgctctaagattaaaattccttttctttttaaggttaagggtgtgtacgtatggcagtgatgtctatgttgagattaacttatgtattgaggaaaatttgaagtttattttttcgatgaataaggctgtcaaatgatttagtatagattaatgacatcttttttagaaatattaaagtgagtattcctcattatgtcatcatttctgataattagagtgctaatttgaatgttagataatgnttccacatctatacctatttctttctagggcacttctgaccctggggcttggggatggcctttaggcacaagtagtgtctgtgttaagttcactaaatgtgtatttaatgagaaacattccnatgtaaaaatgtgtgtatgtgaacgtatgcnnacattgttattgtgcaccngtacattgtgaagaagtagtttngaaattttgtaangcacaacccttaangnggtgtggagttattaaantgntgtaggcncaaatgtaatgtttagcctataaaaggccctcctattgtcc

SEQ ID NO: 262085 - DNA, 531 bp, Homo Sapiens
  misc_feature (498)..(498): n is a, c, g, or t
taaccaggtgggctttgccaagctgctctttgtggaggatgacaaggccgaggcccagcagtgcacacagcagggccagcagctgcagcacccagtggcagcgtgctcggcctttccgtgagagggagtgcagcagcgaactctcaggagaaaacaccagtagtgcctcggtcatcaggaaggagaatggagccaggcctggcaagcacagccacaaagatggtaaagcccagggccacaaggtgggcggcagcgccagaagcagtacgcagagctcggtagatgtgtgactcggtctccgcagaaagggccatcgtcagccgtgctagtggttgtagcctgaaagcatagtagcgtgggccaggatctcaggtgcccactgttcactcctcactggagaaaaggctgcaaggcaggaatgccaccctcttccaataagttatggtaggaaagaacagtaccaagaccagcaccaggaatggtcacaacatgccagtncggagggcggcctgtcaacgtgtacccatgtct

SEQ ID NO: 262086 - DNA, 1004 bp, Homo Sapiens
  misc_feature (431)..(431): n is a, c, g, or t
tcccccccggggggcgctcccaaaatggccccaacttgttccccagtgcctggaaggtggtccccctgacttcaagctgaggaggaggttcaaaaaggtcccctagggcccagctccttacagggagggggcaaatcccaggcttccccttaggctgggaaagaggctcatggttgggatcctcttgcgggtataggtaggcattgctcacctggttcataatgaccaagctggtgaggacagggcataatacagccaggtaccaggctgcaccagtgacagaggcagtgaaccagagtgagcacatgcccagcaagaggctggcactacccagcaggtagcccaccagcccagaagtagcatggtatagcttgagcttcgccaggggccatcggggcagcagcttggggtagagcagccccaccccaccntgagcactgcagccctgcccacagcacagccagcagccctgcctgcccatgccgcgtaaccaggtgggctttgccaagctgctctttgtggaggatgacaaggccgaggcccagcagtgcacacagcagggccagcagctgcagcacccagtggcagcgtgctcggcctttccgtgagagggagtgcagcagcgaactctcaggagaaaacaccagtagtgcctcggtcatcaggaaggagaaagccaaagacataagcaccgggtgccaggagaacaggctggagccaggcctggcaagcacagccacaaagatggtaaagcccagggccacaaggtgggcggcagcgccagaagcagtacgcagagctcggtagatgtgtgactcggtctccgcagaaagggccatcgtcagccgtgctagtggttgtagcctgcctctgccgcagcgcagatctgatgcggtggtttcctccaaagaaagcgggatactccgggccctgccgcgcgcaccgccgctccgtcacggagccgctttacttccggatcccgggaatccggaccggtccagcct

SEQ ID NO: 262087 - DNA, 569 bp, Homo Sapiens
  misc_feature (50)..(50): n is a, c, g, or t
gggctgctctaccccaagctgctgccccgatgccccctgcgaagctcaanctataccatgctactctggggctggtggctaccctgctgggtagtgccagcctcttgctgggcatgtgctcactctggttcactgcctctgtcactggtgcagcctggtacctggctgtattatgccctgtcctcaccagcttgtcattatgaaccaggtgagcaatgcctacctataccgcaagaggatccaaccatgagctcttcccagcctaggggaagcctggatttgcccctccatgtaggagctgggcctagggacctgttgaactctctcagctgagtcaggggacacctcaggcactgggacagttgggcatttggaggcccgtgtgtgaattcctgctcctcatgctggagtgcctcccatttccttcccctttctctgtcatcccagaggaacataggcatcatgtgtctggatgaagctggggctgcaagactgcctctcctgcaaggcagctcatacttgtactgtatgttcagaaattttaggagagaaaaaagtaaaaaatttgt

SEQ ID NO: 262088 - DNA, 541 bp, Homo Sapiens
actggtggccccgtgttcccctgcaggaggacctcctgaggcttcgggcaggagctggtgcacacctggaggagagtgctggtgaatggcaggtgtgtgcctcagtgtccttgctgccagggtgtcagccctgcttcaccactggccgtttgtctctgtcccctccactggcctcttgaagcacagagaccctccgggtactttccttcctctgggcttccactcatgctattccctgctccctttttctacctggagacccccattcctcctcctcctctgctgccctcacctccacctgggccctcccagctcccgggagatggctgaaccccactccccacccgctagtcatcctcttcagcggtcctcccagagctgtcctcagcatggcagcctccacagcccctgggtgtcacccccggtttcgtgtctgcctcggactccagacctgcccctcccaggctggcccagatggatcctctacagtgactaacccaaaccagcaccaggcagggacccaataaacctttgtgaatgg

SEQ ID NO: 262089 - DNA, 1105 bp, Homo Sapiens
ggcccagtaatgagggcagaggggtgcagagccatacctggctacgcccacaggtggacacagggagcaagctacttcgctgttctctgggctcattcccccagcacaggagggcctccatgcacactcattccacaggccccactggccctgtcacactcacacggcacgcacttggcgctgcctgctgtctgccttccacctgggggtacaagaggtcacccaagggggcaggcgtgcagggccttcttggatcttttctggcggcaataggagtactttctgcaggatctggcggaggtgctcctcctcctcccgatgcaggatacgtaggaagttatgtagttcaggcatgctgaaggcgtcccagttcacctccccagagtcattttccttcaggacaaagctcagggccttgtcactgggccctgccaggagccgcagccgcaggggctgctcatcatccaacagcttccgcaagtacacttggccgtgacgctcagcgcgctcaaagagtgcaaacttgcgggggtcatccaccacccaagaactttcgcagcagggcctcaatgacttcacgtgcccttgtgcgtgacagcacatgcaggtgcttgacagcatccttgggcaggtaaaaggaagtgcggcgcctgacacttgtgccccgtcctgggccccgccgggcatcctgcaaggagggtggcttcttgctggagggcacagagacagggcgcaccagcttcagctgaaccttgatgaagcctgtgtaagaaccgtccttgttcaagctcatgaagaggttgctgttgatctgggcattgtactccttgatcttctgctcaatctcagcttgagaaaggtcaggtgtctcccactccacaggctcgtcctggtcccggcgcggcctgcgagctagcgaggttcgcgcggtgaagtactgctcgagctccgagtccgagtcctcttggctgcagtagccactgctcgtcgtgctgctccaggtcatttcgaaagaaggcgcctccgcctcgcccatagccgtacccgcccgtcccccagtcctgcgcgtccgtagccgccaaccaccgccccggtcgcgtgcgtg

SEQ ID NO: 262090 - DNA, 1020 bp, Homo Sapiens
  misc_feature (148)..(148): n is a, c, g, or t
  misc_feature (266)..(300): n is a, c, g, or t
gggtatctaactttcagtttactcaaaaacttttgggtaaataaaaaagggaagtacagatagtttaggttgtgcatggttgcatgaattttgaagtcatttctatgtggagcattatttttcttcttgttaaatatagaaaaaaaangagattctagtacaaagttactgtttaacaaaagcaacataaactctgggaaagatttcattttgccatgttatatttactgtttattctgtgtactagtacatatctttaaattacnnnnnnnnnnnnnnnnnnnnnnnnnnnnnnnnnnnctatcacttggaattagcaatatcacccaactggctttaaaattgaaaatttaaataacatggtggcatgaagtacaattcgagtattaggcaatttgcatagtgttcctcatgctactttctgttacacctctattatattagttttgaatataaacatctttttcagaccaaaaaaaactttatgtatgagagcttatcttatcctgtttatttttccaatgcttttctgtaatacattatgtaatttaaaaaatattcctttttaaacagcaacagaaatgcactataaaatatagtatgtgattaaccaatcctgcttccatatttaagccacttgggaatggaaacttaatctctgtgactacaaagggaagttttacgtgccttggtgttccagtacactgatagtggttcttagaatcttctgtggctgacttcttgtattcaactctggtttattatcttaatcttcaacttcagacatacatttgtgtgtttatatgctcacaggtggactgagaaatcagttacatcttaagtgacctacagggtatatgttggcaaaagcagactgtgtatatgtcttataaagttgaatttatgttcagtgtgtttggaagtgtatagcatgtaaattatttcatatatgatttaaaggtaattaaatgttcacattttactttgaatgtttttcttctggataaaacaaatggaatc

SEQ ID NO: 262091 - DNA, 514 bp, Homo Sapiens
gcccttgttccagctttggaattggaaggagggaacctgtgtttgaagtgattgacaggtggggacaggagtgtggattctggcctgtgcttgacactcaaacccaagctacggcaagggttagcagcccgtggagggagaggccaggaggcccggggagactgctgtccctgagcagctgcgccgggctgtgcttgcccctggtggtcaccatgcaacctcaggggaaccttcaacctggtgaatggcaactggttcctctgttgagcaaagtctccaaggaaagccgggttctccagagaatcttaacaccctgaccagccgggaatctgctccatgatgtgtggatggggacacatctctgagggcccctgaaaaatatatttaatcacacagaggataggtgcacagatgtgggtccctcaaattgtaaacagtgctgtgtggtcctcaggacatcaaggtccactgggtgggggcactgtggccacaactgtgggccaccggcttcccg

SEQ ID NO: 262092 - DNA, 1324 bp, Homo Sapiens
  misc_feature (876)..(876): n is a, c, g, or t
gggtggcgaattcggcacgaggccgcttttctctcgggtgatccggccgagtggccctgggttagcagctgctgcatttccccggctggctgcggtcactggtggcagtgctcaggcgcccgccgcccttgaccttcggccccgcgagctctaaccctacagcgcaggaagatcggccgccgcggccaggctctgatgctggtgtctggtagaagaaggttactcacagttctgctgcaggctcagaagtggccctttcaaccctccagagacatgagactagtgcagttccgggcaccccacctggtggggcctcacttgggcctggagacagggaatggtggaggggttatcaacctcaatgcctttgaccccacactcccgaagacgatgacgcagtttcctagagcagggagaggccaccctctcagtggcaagaagagccctggctgcccagttgccagtcctaccacggtcggaggtaaccttcctggctccagtcacacgaccagataaggtggtgtgtgtgggcatgaattatgtggaccactgcaaagaacagaacgtgcccgtgcccaaggagcccatcatcttcagcaagtttgccagctccatcgtggggccctatgatgaggtggtcctcccaccacagagccaggaggtagattgggaagtggagctggccgtggtcattggaaagaaaggcaagcacatcaaggccacagatgctatggcccacgtggccggcttcactgtggctcatgacgtgagtgctcgtgactggcaaatgagacgtaatgggaaacaatggctgctgggaaaaaccttcgacaccttctgccctctgggcccctgccttggtgaccaagggacagntgtaccagatcccacacaacttaaagatctgctgccgagtgaatggggaagtggtccagagcggcaacaccaaccagatggtattcaagacagaggacctgatagcctgggtctcccagtttgttaccttttacccaggggatgtcatccctaactgggaccccccccaggtgtcggtgtattcaggaaacctcctgtctttctcaagaagggggatgaagtccagtgtgagattgaagaactaggtgtcatcatcaacaaggtggtgtgatggctcctgcacaggccctgcacataggatgagggcatctgctcccactcagcctagcccagggaaaggcccagtgacaggtgtggacaggtgccagccctgcaagccgcctcttctcggtagaagggagaaggacagagctctcttcaataaattcgtcaggtcaaagcagcaaaa

SEQ ID NO: 262093 - DNA, 564 bp, Homo Sapiens
tccagggcactttttttaaagctaataactgcaagagctccatatattgggtgtgagttcaggttgcctctcaaaataaagaaagttggtctttgtctgcaggtgggctgctgagggtctgggatctgttttctggaagtgtgcaggtataaacacaccctctgtgcttgtgacaaactggcaggtaccgtgctcattgctaaccactgtctgtccctgaactcccagaaccactacatctggctttgggcaggtctgagataaaacgatctaaaggtaggcagaccctggacccagcctcagatccaggcaggagcacgaggtctggccaaggtggacggggttgtcgagatctcaggagccccttgctgttttttggagggtgaaagaagaaaccttaaacatagtcagctctgatcacatcccctgtctactcatccagaccccatgcctgtaggcttatcagggagttacagttacaattgttacagtactgttcccaactcagctgccacgggtgagagagcaggaggtatgaattaaaagtctacagcactaaaaaaa

SEQ ID NO: 262094 - DNA, 542 bp, Homo Sapiens
  misc_feature (29)..(29): n is a, c, g, or t
  misc_feature (42)..(42): n is a, c, g, or t
  misc_feature (78)..(78): n is a, c, g, or t
  misc_feature (136)..(136): n is a, c, g, or t
  misc_feature (143)..(143): n is a, c, g, or t
  misc_feature (227)..(227): n is a, c, g, or t
  misc_feature (246)..(246): n is a, c, g, or t
cccctgtccacggaaacccctaaggaccntccagggaaattnccctggggaaagagggatagccattggaaaggattncccccccttgaatcccatccatccaaggaaccccctggggaggaaccctttggaaatncccatanccccaagccccaactcctccccagacatgtaaaaaataggggaaaagtgattccaaattgaaatgcccctgtgtatttcccccnttgtttttaatgttaatancccccatataatagggaaagggtgggatttttttgtgggaatgtgggaaggtgggggttatggaggagataactcaaaacttcttcaattttgcctagtgcctgcgtaaataatatatttaatataaaggactccaggtataaatggtgtagaaatccatgattccaagaaaaaacacttttctagcaaacctggttgtttttaaaatgacttttatatatgtaatattgcttggaaactatgagtaataaagcaatgacaacatccatttgtttatttgaaagtattaggggccc

SEQ ID NO: 262095 - DNA, 781 bp, Homo Sapiens
ggaaccgaaattgattttcatttccaaaacaaacactggcaccaacatttttactttgggaagacttggcagagtgttagtcatgatctgttacttacgtgttcagtctgttttctcacccccttcttagttaccatctcttttttaagaagaaaaaagaaaagccacagtattatcaaggtctctacacttggactgggggaaaatttgaaattaagcacataacttttgaattagttctttgtttcaatgttgaatgtggcgcagttatgcagatgattaatcaggctgcactgatggaagttttgactttgtccctggtataatttgcattgaaatgctttatgaaataaaaggttctactagaactgatgttagcacattccactgagcaaaactatcagactgacacttgttaaattgcttactggactgaataaactctgttttgtccagttaaaaggggtttctctttgttacaagtgttatttgtaaagtcctgtcacattcatggtcgaaactgggttgaaagaattgaaaattgtccaacagatagatagataggaaaccgcctggagtggaggagggttgtatctaagcctccactatcagtcatgttaattcaaggggcacagtggaagaaaataaatccaccaaagtagattatctaattaccatcaaaatgagtcagaaaccaaaaaacaccacccctccaacaggcctcttaagaagtaccccctggttcctgcttactaaaaaatactaaaactccattttcccc

SEQ ID NO: 262096 - DNA, 873 bp, Homo Sapiens
  misc_feature (45)..(45): n is a, c, g, or t
  misc_feature (55)..(103): n is a, c, g, or t
  misc_feature (130)..(130): n is a, c, g, or t
gtgaacaaggtaaattttggtgaatgggttaaaaggcagatgaantaccaaatgnnnnnnnnnnnnnnnnnnnnnnnnnnnnnnnnnnnnnnnnnnnnnnnnncacaagccatatacactccaaatagtntagtgtttcaccttgtaggaataaatcattttcaagcaaacaagacttgaacagaacatatggctttacgataaaatcaatttatcaactatgatgtagcaataaatactttacttaatctctaccaatagacttacatttttgatccgttttaaacaatacagaaaacaattaccaatcaaaaactggttataaaaagaacaccaaatatttcttattcaaaatcacttttgtaagttagaacaaccaaaataacacttagagggcattttcattctacaactccttgtcggcctggaggaaaaatgaattcataattttgtacaaggtgaaaaatgtatgaaaaccgcctaatactttggtcacactaataattgtcaaagttatgtttcaaatacaatagatctgtgtattcacttttataaaactattcttacagccattttaactatagtattactactattattacatgggtggcaagatcttatttcacaggctacccattatttagaacaatacaatataaacatacgcaaaaattcttggtatttgtcaatgtgcaatatttttacacttctgaatttctctgtacaatgtcttagaatctagaatataaaggttgctggtcctgatcccttgcagagtgagtgcagcagtgacagcttggtgggctccagctgacccctccagagcccctgagtggtggcggtctgcagtcctcagtcagcagcagcagaacg

SEQ ID NO: 262097 - DNA, 503 bp, Homo Sapiens
gcagtgaaacccatctgattaagatgctcaacttttctgaagaaaaagctgacaccaagacctgcctaaggtcacaccatcatgagtggctgagttgggctgtgatgagccacccggctggagagcttgtgccctggttacacgattgccagtgagatgcctatggactcgcatgtagagagtgagtgcagcagtgacagcttggtgggctccagctgacccctccagagcccctgagtggtggcgggcggcagtcctcagtcagcagcagcagacgtcacccgtcatacagggccattcactgaagtgtcacctggtgcgcttggttggccagtcctaaggagcaacagacaggcatcggaggcacttgcagcagaaatatgaaaaacaaaacctacttagctgagctccccaagggcagggacaacttattttaacattgttttgaacttagtaagtttttaataaaatgatatgtaaatgaatggagcaaaagctctaga

SEQ ID NO: 262098 - DNA, 780 bp, Homo Sapiens
ggggtttggagctggagacggcctgggtgctggcgaagcggaggccggagttaatacacgaggaactcatgcaaaggaggggactttcggaaatccaaacttagagtgccttgtatttagaatccggaaggaaaaggaaatgaaatgtgaagaaactcatgcaccaaactcgaactggtaagaacactgttagaatgccctcggtaacacagaggctgagagatcctgacataaatccttgtttgtcgatcctgtcctaccttttaaatgatgcctctcttatatctgtaaggaatctgatgcttccaccaaatgtctggatgaaaataactatgacagggaaaggtgttccacttacttcttgaggtacaaaaactgccggagattctggaattctatcgtgatgcagagaagaaagaacggagtgaagccatttatgcctacggcagcagaaagagatgaaatcttgagagcagtgggaaatatgccctattgaatgtttgcattaaaagtgtttatataacttagaagcagatgaatatttctaataaatgattgctgtaatatttaagactgtacacccctcacccagacagaccttaagttctttcagtggagacagtgaagtcacccccgtggtcttttttgcttgctctcagtgccatgccgatggtatgttgctgttggctgtgttgtggcatgagtttgcatgactttctggaggcatggaggttaggtaaggctaccatgagaaattgagctttttcccctggggttttg

SEQ ID NO: 262099 - DNA, 637 bp, Homo Sapiens
  misc_feature (303)..(303): n is a, c, g, or t
ttcggttctcagtgttggaaagtaatatggtaaaacttctcttctccgaggacaatagaatagtatttgttgtatagactgaaccatcctccaaaatttggaagtcaggatcacttgaatgaattagatttgcagctgtaaagcactctttcaggttaactctaccaacaagtttctcggcatctagtttggagggaacatgtaatgtcacatttttgcaggcatcactggcaaatattaagatcgcgagggtcagcaggagcagccggcagagggctccgttccaggagccggacgggcggngctgcctccatggagagggctcggggcaggtcgcgggccgaacgtcgggccgggggtaggagggctccgcggggcgagggccgcggccggagcgcagtctgggcccgctgctcaggaggagcgcgaggcggaggaggtggggcgcgcggagaggtgcttttcttagcttctctgaagcgcctgcctctcatccaaggggcttttcctttggcggagggaggggctccagacgcgtccaaaagacaccgatcggcccctccttgttgtctatttaagacttaagacttcatttctctaagaaagccacgggtgggaactccctctcgccgccacc

SEQ ID NO: 262100 - DNA, 782 bp, Homo Sapiens
  misc_feature (79)..(79): n is a, c, g, or t
gctgtctgtatcccaacaggctgagactgggtcttctgagctgagagctttctctcctggaattccccactgggattanaagagagcctgaggttaaaatgacttagtctttccctgggcacactttgtttcaggctgaggtagttttagcgggtggaggggcagggaaaaacccagttaggtggagtgttactaaggcttcagatttatatttctgtttagtaacattttaaaattatgcctgggtagatgcttctagcctaatgtaaaggctagaaagtacacgagctgtctatgtgtgcatgtgagtatctgtgtgtgcatgcctagctttaatgaacataaataggccgcatgtcactcttcatgagatttgggcatttggcacaggaagcatactgcacaaaagtattacaagattcagggactagcagaggaaaaaatactcaagtcccccacagattgcctaactgtcctaccttgagagtggattgtctccccattttacctacagcaaagtcacattaacacacttgtctttttttcatttgtcagtaggaaaccgaaaagagaagagcacctaagtgaagaagctatcaaggtgatcgctggccttcctgacttaacattcatgcatgccaaggtgttgatgttcccagccacgttaacaccttccacaagctctcaagaaaaagcagacggataactgatgtgaattggacagtttctattgcttttccttttttccatcccttccctaccatcaaaagcatacctgctct

SEQ ID NO: 262101 - DNA, 454 bp, Homo Sapiens
agatatgaacacatgtacatctgatcagttccaggagtctctaccacccgtccagtttgactggagtagcagtggccttactaaccctttagatggtgtggatccggagttgtatgagttaacaacttctaagctggaaatctccacctcaagcctcaaagtgactgatgcatttggcaagactcatgtctacagtagagaagacaagcacatctacccagtaggaaaccgaaaagagaagagcacctaagtgaagaagctatcaaggtgatcgctggccttcctgacttaacattcatgcatgccaaggtgttgatgttcccagccacgttaacaccttccacaagctctcaagaaaaagcagacggataactgatgtgaattggacagtttctattgcttttccttttttccatcccttccctaccatcaaaagcatacctgctctaattaa

SEQ ID NO: 262102 - DNA, 923 bp, Homo Sapiens
gaccccagttttcggcacgaggtagcctggaggcctgcagtccgcgcggccgcggggagggacgagagggcctgacgtacagattataagcgccatggctatggctagtgttaaattgcttgccggtgttttaagaaagccagatgcctggattggactctggggtgttctccgagggacaccttcatcatacaaactctgtacttcctggaatcgatacttgtatttttctagtaccaagttacgtgcaccaaattataaaacacttttttataatattttctcactgagactcccagggcttttactatctccagaatgtatttttcctttttccgtaagacttcaaaagtaatataaggtctacaaaatctactaaaaagtctctgcaaaaagtagatgaagaggactctgatgaagaaagccatcatgatgagatgagtgagcaggaagaggagcttgaggatgatcctactgtagtcaaaaactataaagacctggaaaaagcagttcagtcttttcggtatgatgttgtcctgaagacggggctagatattgggagaaacaaagtggaagatgcctttcctacaaaggtgaacctcaggctgaatgaggaaaaattatggaagaaaagcagaacggtgaaagtgggagatacattggatcttctcattggagaggataaagaagcaggaacagagacagttatgcggattctcttgaaaaaagtgtttgaagagaagactgaaagtgaaaaatacagagtggtgttacggcggtggaaaagtttaaagttgcctaagaagagaatgtctaaataaatggattgctttttagcaatagagctgctttctagtggtaaaggaaggggtcacctgaaaaataggacatttttattaaaataaagttctcttagcgttttt

SEQ ID NO: 262103 - DNA, 618 bp, Homo Sapiens
cttgagttcttcgacagaactatccttcaatcctgacttgtctatgtgattaaataatgcacgtgcaatctttttctctgtttctgacataaacatcactgccatatcaaacctttttagttcagaaagtctttgtaagatttcaaagatgagtaatggcttttctttctcaatgtaaaagtcatgcagaattttaacgatctggttgaatacatctggatccagatttttctgaaacaacttaggatacaaagatggttcaatttgctttaaatactgatacaacatatctggagaacttttcaattgtctgaaatcagattcgagctggaacgagtttgcaggaattggaggaagaacagttgtggcaaactgagcaggtttttgttctatctctatgggcattttctcgctgtaagactgacatacatcctgcttcaaactggcttgaggttgcagggatgaagtatcactgaaataaaatattttcaatacttttgctcttggagtatcacttgtgggaaaaaggtcatcttggcttgaattcttcttacttgtggtgcctgtggctgctattacatttgctagattaataggattattctctggagcagcggc

SEQ ID NO: 262104 - DNA, 704 bp, Homo Sapiens
  misc_feature (351)..(375): n is a, c, g, or t
ggggagtgtaattattttcccttaccccaatccctgtgtacgtgttgggtatagttacgacattatccggatttgcaaatagacacaactttcagtcttaccctgtttattgtttaagagtgatagactgttgtcctcttgctggtggaaaatctaaggtggagcccactcttctatgctgaagttcaccaggcagagcagttttcttacaagtcagctactctgcttggtttattttaggttttggtacttcacgtaagcactgttagaaggtacaagtgtattaatatcactagttttgaggcgcttgggtacatttgtttttaatatatttagaatgtgcagtaaacnnnnnnnnnnnnnnnnnnnnnnnnnagcaaacttgttattttaggtccaattattgagttgacagtctactgtgagaatgagatgacatatctactgtgagaataccataaatgatgaatagtttatttgagaacttttatactcagtggtgttttatatattaagataaaaatatgtacacacatgcatgtcacatctctctactgtggagttaatgtgaatttttaaaaaatggaattgcaaccacaatcatatctaagagaacattcactcctagtgagggttttaccaaagctactaaagagaataaggtaaaatgataaatgcaaaagggtccatggattttggggggt

SEQ ID NO: 262105 - DNA, 813 bp, Homo Sapiens
gaaaagctccagattctcaaaccagaggctaagatgaatgaggggtttgagtggcaactgaaattataccaggcaatgggatacgaagtggatacctctagtgcaatttataagcaatatcgtttacaaaaggttacagagaagtatccagaattgcagaatttacctcaagaactctttgctggtgacccaactaccgtttcacaaggattgaaagatgaggttctctacaagtgtagaaagtgcaggcgatcattatttcgaagttctagtattctggatcaccgtgaaggaagtggacctatagcctttgcccacaagagaatgacaccatcttccatgcttaccacagggaggcaagctcaatgtacatcttatttcattgaacctgtacagtggatggaatctgctttgctgggagtgatggatggacagcttctttgcccaaaatgcagtgccaagttgggttccttcaactggtatggtgaacagtgctcttgtggtaggtggataacacctgcttcttcaaatacataagaatagagtggatgaaatgaaaatattgcctgctttgggatcacaaacaggaaaaatatgaacatgatattttatagccttgggaagaaacttgcagatgatatgtgctgcctttgcttcctatcattcatggcagattgtttgtgctttcaacatttcatttgaaatgggagaagataaaatcacttgatgtaacctggaaactatgctttacatggcaatcaaagccttttgatcatgtacattttatttgatattaaaatcttttataacccg

SEQ ID NO: 262106 - DNA, 445 bp, Homo Sapiens
  misc_feature (69)..(69): n is a, c, g, or t
  misc_feature (108)..(108): n is a, c, g, or t
  misc_feature (112)..(112): n is a, c, g, or t
  misc_feature (381)..(393): n is a, c, g, or t
tccttggacccaggtgttgtattgcaggaccccttcccccagcagccaagccccctcttctctccctcncgccctggctcagctcccgcggccccgcccgtccccccncccnggactggtctgttgtcttttcatctgttcaagaggagattgaaactgaaaacaaaatgagaacaacaaaaaaaattgtatggcagtttttactttttatcgctcgtttttaacttcacaaataaatgataacaaaacctccccgtctgcgggtgctgtctgtctccccccctttccttccctccctgtagttttgaagcggatgtttgttctttatagatgttgtttaaaaagcctgataatggtgattgaaatttacaaactttgtgnnnnnnnnnnnnnaagaaaaatataaaatagttttcttcaggctcaatgtgctttcctaaccgtg

SEQ ID NO: 262107 - DNA, 333 bp, Homo Sapiens
agggttgtggctttgttaggaatggcaaaacgctccccagagccatcaccccaccaaccaacgcccaagctcagcctgtctgggcaggtccccagctggaagcctcacctgggggctggtgggtagggctgggggtagagtggcagagtccccagacactggctgtctgaagtccatagaagaaggaaagataggaggctggctgagccccagtgggagcccagggttttctcgtgaccagtgcacgtgccccctgtccccttggctcagagtgcttctgacactcaaaggggatggggcagggggcagcccaggggatatgggagccagcca

SEQ ID NO: 262108 - DNA, 1663 bp, Homo Sapiens
  misc_feature (670)..(695): n is a, c, g, or t
actatccagaatcagtgatgcctgtcatctgttcatcttaaaataaacacttcttactttatgggatgtaaatatcaaagagaagatgaaatgaaaagcttttacatatataacgtgtttgttaattctaattgtcagtaaaaatgtgaatgttgaagttgaaatgtgaatgttgaagttggcacctttgtagtaatcagaattcttgcagagaagagaaagagagtgaagagtatactttacaaagctcgaaggagacttgaggctgtcgtttgtgctggtgttcctctagccacagggggctgctgaccggattcctgtcccacgtggcccagccacacctcctgcgggggctgtatgtgctgccttggtctgggctgcctgcggcttcagacttgagctgggccttttccgaagagggtgaaccttctgtatttccctgatgtgtcttggccagagacaggcttggccgactggctgctttcagtactgctttctttcggtgtgccttcccccaggattccacctgtctccttgggctttgtatccaaaacaggtgatttatgactgggtaccaccgtgggatgctctcgtgcctctgcgtctggtacatcaaatgcccggagcacttcagggctcttgttgccagtctgaaatctcaagtcaacannnnnnnnnnnnnnnnnnnnnnnnnnaccctcatacgttttggcataagggccttgctcagtggggcccatttggcccctataatggaaatcggcatcacctgctccaccatcaggtctataatcaatttcctcctgccgtcttctatcccgtggccgaagtgcctggggaggttcgctctcaggaccgcctatatgtctcagcacatgaactgattttccagcaccatagcagaaactcaggatggctaatgccataattatcagcactggaagatgaagcagcgctggaatttccttcatgagtgctttaataaattccccagttccttttccaatatgcttcaatggctccgttacaaatgtggtgaatgtaactgcaagtgcctttgttggtgggaccaaccaaatagggttgactagtaagagctcatagtatttttggcatgggtcatccttataggtccatgaacttctaaaccattcccagatacttccagtccagtccatctttttggcacacacattgtttaatggctccatcttggcgacttcagcctgatgctgtgcaaaagctagcttatataaatacatccaattccatcccaaactgaacagaaagctgatgattaaaacacgtctcaactgagtgtaccaacgtacatatgtcccacagctcagtagccactaaaaccacgatgcagagcagacaaagaagtaccttaaaacagagagaagcagaaatcagccaccaaaaacacttaagacagctaaaaagaactggactcaaaagcacaaaatcatttctacaattttgtggcttgttcatcaatacggtataagtgacctagtacaggttcttaacgtaattatggtggagtttggaaagtattttaaaaaggaaacttaatgacgttgcccttgccctcatcccatcttaccattaacacattatatggatccactccaaaggaatcttcgaatcgccacttacc

SEQ ID NO: 262109 - DNA, 426 bp, Homo Sapiens
gaaacaatctattacttttttccttaaaaggagaatttatagcactgtaatacagcttaaaatatttttagaatgatgtaaatagttaaccttcagtagtctattaaggcattaatacttctctggacatgcgcgtttgagggtggaggggtcctgtaaggtgcttcatcatctgtgattactgcttgggatgtgttctttggcagcttgcgagattactttacctagtgtttataaagtaggaagttaagtgaatcatagattagaatttaatactcttatggaaataattttttaacatcttaattgacaatggcgtttttttatacataaccatggatgtagtgggaaacaatgttgtttggtaaaaataatgtacttgatcaatgtaaaaaagtatataaaatagtcttactaaaaatctaa

SEQ ID NO: 262110 - DNA, 476 bp, Homo Sapiens
acaggcactcgcatcgtgtgtttgtgtgaatgattgtgttttgtgggaaaagcgctgcatttattcacctcggcatttgagcagagctcagtttccttagggggaaaatttttttcaatacttatatcacaaatgacctttaaaacatgggaagcaggtaaatggaactacgtttcacaatttgggagacaaagagaatggtttccttaatgtgttttaaggcagaagataatgaaactacacatgcgaagtctgtagaaatggctttaatgctattcacaagcacaggtgggtgtacatttcacaagcacaggtgggtgtgcggaagggtgaacacaggcataaaagcctcagcctacaagatgggtggatggcatagtaaggcaacaattcattacacaatgaatagtaatttgctgttttaaaacaactaataaatgtacattgttttacatttggtgaattgattcacacga

SEQ ID NO: 262111 - DNA, 438 bp, Homo Sapiens
  misc_feature (54)..(94): n is a, c, g, or t
gggggcacaggctacgaccgcaaggactacgtctaagggacagacgcagggagnnnnnnnnnnnnnnnnnnnnnnnnnnnnnnnnnnnnnnnnngcgagctggagcgcgcaccaggccatccagcgtgcagccttgcctcggaggccagcccacccccagaagccaggaagcccccgcgctggactggggcagcttccccagcagccacggctttgcgggccgggcagtcgacttcggggcccagggaccaacctgcatggactgtgaaacctcacccttctggagcacggggcctgggtgaccgccaatacttgaccaccccgtcgagccccatcgggccgctgcccccatgctcgcgctgggcagggaccggcagccctggaaggggcacttgatatttttcaataaaagcctttcgttttgctaaccacaacaag

SEQ ID NO: 262112 - DNA, 1350 bp, Homo Sapiens
ggatctttcaactgttcagtcccttgcagtgacacagtgcctgtaattgctgtttctgtgttcattctctttctacctgttgtcttctaccttagtagctttcttcactcagagcaaaagaaacgcaaactcattctgcccaaacgtctcaagtccagtaccagttttgcaaatattcaggaaaattcaaactgagacctacaaaatggagaattgacatatcacgtgaatgaatggtggaagacacaacttggtttcagaaagaagataaactgtgatttgacaagtcaagctcttaagaaatacaaggacttcagatccatttttaaataagaattttcgatttttctttccttttccacttctttctaacagatttggatatttttaatttccaggcatagcaatgttatctattttaatgtgtatttgtcacaataacagaacatgcaagaacaatcattattttattttataggcatttgattactattctagacttctggtatcttcttactaacataaatatctcaagtagaaaagtttttgaaaactaacatttaaaaattaatcagttacagtaaagactttgaaaaagaaatgtacttgttaggaagtagcttaattaccccccattgcagtattattgttatatatatagttaatatgttgtacatcacaataatatataattcagtctctagtttccctagagtcatttttgaaaacactgattgcaaacctccctgacaatttttaaaagtagtaaaccacattacatttatctttgtaaaaagatttatgggaaactggtttcttacttgacttttataaatagtattttacatcttatttttgcctttatttcataagtaatttaaaaatcactggattgctttattatattcagggcaatatggattatttttataccaaggatttgcatcgtgaattacattaagttatttggcaatttataatttattactactttaaatcaaatgtagcattatcacactgtatttaaattgtcattttttaaaggaatattttcttcttaagatatatagaggattttggagaagagagacaggaggggtaaaaccagcttaaggttcagcgagcagaaagggacctgagaggatgctcactgtaagactgttggacagtggtgtgtattgaggggatgaatcggaacgatagtctcatgcagaaaatagtgagattaagatcagcccttattgtttctaaattatttcaatccagaggaaagtgatacgattgaaatgaaatcacatagttcgggcctcagaaatttctattttgggaatgggttgaatttaacccttt

SEQ ID NO: 262113 - DNA, 816 bp, Homo Sapiens
cgaagctgccagtatgttccaaaccctcctgggaaggccacctcccactcctgctgcacaggccctggggagcttttgcccacacactttccatctctgcctgtcaatatcctacctgtccctccaggcccatctcaaatcacaaggatttctctaaccctatcctaattgtccacatacgtggaaacaatcctgttactctgtcccacgtccaatcatgggccacaaggcacagtcttctgagcgagtgctctcactgtattagagcgccagctccttggggcagggcctgggcctcatggcttttgctttccctgaagccctagtagccggcgcccatcctagtgggcacttaagcttaattggggaaactgctttgattggttgtgccttcccttctctggtctccttgagatgatcgtagacacagggatgattcccacccaaacccacgtattcattcagtgagttaaacacgaattgatttaaagtgaacacacacaagggagcttgcttgcagatggtctgagttcttgtgtcctggtaattcctctccaggccagaataattggcgtgtctcctcaacccacatggggttcctggttgttcctgcatcccgatacctcagccctggccctgcccagcccattcgggctctggttttctggtggggctgtcctgctgccctcccacagcctccttctgtttgtcgagcatttcttctactcttgaaagctcaggcagcgtttagggctgcttaagtctcatggccccaggggctggtctcacccaactgcagtttactattgctatctt

SEQ ID NO: 262114 - DNA, 833 bp, Homo Sapiens
ggggaagccaacaagaatttgagaactgtaaataccaagccttgaaagggaccatggtgcggcctgtgagacataagaaaccagtcaattactcacagtttgaccactctgacagtgatgatgattttgtttctgcaactgtacctttaaacaagaaatccagaacagcaccaaaggagttaaaacaagataaaccaaaacctaacttgaacaatctccggaaagaagaaatcccagtacaagagaaaacccctaaaaaaaggatggctttagatgacaagctctaccagagagacttagaagttgcactagctttatcagtgaaggaacttccaacagtcaccactaatgtgcagaactctcaagataaaagcattgaaaaacatggcagcagtaaaatagaaacaatgaataagtctcctcatatctctaattgcagcgcagccagtgattatttacatttggataagatcactgtggaagatgatgttggtggtgttcaagggaaaagaaaagcagcatctaaagctgcagcacagcacaggaagattcttctggaaggcagtgatggcgataacgctaatgacactgcaaccatactttgcacctgcgggaaaattctcgaggatgattctgaatccttgggcacagtgcggataatcgacccacaactttttctattgaaaaaaacgcaacgtctcaagcaaattttcaaaaggaaagaaagtggaagggtaaaaatccctcccccgctgcaaaaaccaccccagtaacccacctcctctaaacccccaaaccggtaactcggcctttgcgcgggaacctttccgggg

SEQ ID NO: 262115 - DNA, 718 bp, Homo Sapiens
gtagattgggggtgattttctagttttaggacttggccacagtctgggctgaaccccagaaggggtttagggactagggctcctctttggaaacttcgaaccgaccccgtctagccacgccccttgtgctcctttttcccagatttataaatgaccgcacctatttcttcggaaggccaaaagtgcagtttgacagtccagagtgggagaggactccaggctcagccaaggagctccggagacctccgcccagaagcccccagcctgcggagcgtgtggacccagccctgcccctggagaaacagccgtggtttcatggccccctgaacagggcggatgcagagagcctcctgtccctctgcaaggaaggcagctacctagtgcggctcagtgagaccaacccccaggactgctccttgtctctcaggagcagccagggcttcctgcatctgaagttcgcgcggacccgtgagaaccaggtggtgctgggccaacacagcgggcccttccccagcgtgcccgagctcgtcctccactacagttcacgcccactgccggtgcagggtgccgagcatctggctctgctgtaccccgtgggtcacgcagaccccctgacagtgacccctcggccccctttttgatcctcgggccccgaaatcgtatcccaaagcccctcccatggcccttgaaaaataaattaggttttttgtttggaaaa

SEQ ID NO: 262116 - DNA, 335 bp, Homo Sapiens
aggccccaaccctgtcctaccgagctcctcttccatgctgtgcgcccagggctgggaggaaggacttccctgtgtagtttgtgctgtaaagagttgctttttgtttatttaatgctgtggcatgggtgaagaggaggggaagaggcctgtttggcctctctatcctctcttcctcttcccccaagattgagctctctgctcttgatcagccccaccctggcctagaccagcagacagagccaggagaggctcagctgcattccgcagcccccacccccaaggttctccaacatcacagcccagcccgcccactgggtaataaaagtggtttgtgg

SEQ ID NO: 262117 - DNA, 842 bp, Homo Sapiens; identical to SEQ ID NO: 178778

SEQ ID NO: 262118 - DNA, 712 bp, Homo Sapiens
  misc_feature (71)..(71): n is a, c, g, or t
  misc_feature (77)..(77): n is a, c, g, or t
  misc_feature (88)..(88): n is a, c, g, or t
  misc_feature (102)..(102): n is a, c, g, or t
  misc_feature (130)..(130): n is a, c, g, or t
aagtaagttgaaaaatacggttaaaattcccagtgcattttaatacaccctaaccctacctaacatccatngcttanccctacccttnaaatgtccctgagncactccttaacattaagccctactgttnatgcaaaaccatcctaatacaaggtcctattttcataataaagtcttaaatatttcatgccatctattgaataatgcagtaagagtaaaaaacagaatggctgtatgggcattcgaacggtttctactgaatgtgtattgctttcatagcattgcaataagggaggagaccacccctcatattgtcttatgcccgatttctgcctccaaagaaagaagaagtaaaaactaaaaggcagaaatgaaatccgcaggcagacagcccggcgcctcaccctaggcctggtagttaaagatctacccctgacctaatcggttatgttatctgtagattacagacattgaagagaaaagcactgtgaaaatccctgtcctgttctgttctgttctaattgccagtgcatgcagcacctagtcacgtactccctgtttgctcaatcaatcacgaccctctcatgcggacccccttagagttgtgagcccttaagagggacaggaattgctcactcggggagttcggtttttaagatgtgagtcttgccgatgctcctggctgaataaagcccttccttctttaaaaaaa

SEQ ID NO: 262119 - DNA, 402 bp, Homo Sapiens
  misc_feature (349)..(349): n is a, c, g, or t
  misc_feature (363)..(363): n is a, c, g, or t
  misc_feature (387)..(387): n is a, c, g, or t
gacagtgacttttggcccttggaggaagcagaaacctctctcctccatcacgttctgcccatccccttccaggatcctcgtgtttttcctgcttgcctgtgtgcatgcttccccgaatcccagggtgagcacatgggtagcagggtgcgagcactccagcctcagtgtgtgagcagaagggaggagacaccccttcatattgtcttatggcccgatttcttgcctccaaagaaagaaggaagtaaaaactaaaagggcaggaaatgaaatcccgcaggcaggacaggcccgggcgccttcaccctagggcttgggtagtttaaagatctttaccccttgaccttaattnggttattgtttatnctgttagggtttacaggacatttngaagggggaaaaggc

SEQ ID NO: 262120 - DNA, 323 bp, Homo Sapiens
gacaccaatgtgaacagcaccattctgaacttggaggataatgtacagtcatggaaacctggagataccctggtcattgccagtactgattactccatgtaccaggcagaagagttccaggtgcttccctgcagatcctgcgcccccaaccaggtcaaagtggcaggtaggacttttactaatcccttcctagactggatgaatctgaaaattgttaggcttaaagtaaactgaagttacaacaaatctgtatcagtcagctatggctgtaataatgctgcataacaaaaaaaatcttaaaacttcatgacaggtctttattt

SEQ ID NO: 262121 - DNA, 987 bp, Homo Sapiens
  misc_feature (33)..(33): n is a, c, g, or t
ctacatggaagggctgatgatgtttctttctcnttttcatagcttttctagaatattgcaggaaactgtgaaggaactagcccctcgatgtgatgtgacattcatgctgtcagaagatggcagtggaaaaggggcagcactgatcactgctgtggccaagaggttacagcaggcacagaaggagaactaggaacccctgggattggacctgatgcatcttggatactgaacagcttttcctctggcagatcagttggtcagagagcaatgggcaccctcctggctgacctcaccttctggatggccgaaagagaaccccaggttctcggcgtactcttagtatcttgtactggatttgcagtgacattacatgacatctctatttggtatatttgggccaaaatgggccaacttatgaaatcaaagtgtctgtcctgagagatcccctttcaacacattgttcaggtgaggcttgagctgtcaattctctatggcttttcagtcttgtggctgcgggacttggaaatatatagaatctgcccatgtggctggcaggctgtttccccattgggatgcttaagccatctcttataggggattggaccctgtacttgtggatgaacattggagagcaagaggaactcacgttatgaactagggggatctcatctaacttgtccttaacttgccatgttgacttcaaacctgttaagagaacaaagactttgaagtatccagccccagggtgcagagaggttgattgccagggagcactgcaggaatcattgcatgcttaaagcgagttatgtcagcaccctgtaggattttgttccttattaagtgtgtgccatgtggtggggtgctgtctggggcatctgtttttcattttgcctgtggtttgtgttgcagctgttgatagttgttttaaggattgttaggtataggaaatccagtaaattaataaaaaaattttgattttccaataaa

SEQ ID NO: 262122 - DNA, 587 bp, Homo Sapiens
  misc_feature (575)..(575): n is a, c, g, or t
cctcaatcacctgggaggaaccatctatcgtcctgtctaggtctggtcggaactttgtgtggtaattgagatttaaatcccctgttaggaaatctgcaaggttaagggaatttgtcagtggttaatgttaaatcacctttttctaacagaatagcaccatactttaagatttttgagttagtaagctacctttttgctttttgacttaggatagttctgaactggtgaggtgtgctcacaatgaggtttcctctaaaagttatttttctactttcttctgctaccaaagcagttgccgctacagattgaatgcacttgggccatccatgggttactgggttaaggatttttgataggaaggctacgggttgtcagtggcctcagtgctttcgggctatgccttggtttacacttacaacaaggtggtattggagtgttagagtgtcacagagaagaccttcaattatcaattataggttttaaatttaccctgggggctttaaagggaatatggggaccattgttttctctttacctactttctatctctcctcctctctctcctaacctccccncctttgtcctct

SEQ ID NO: 262123 - DNA, 526 bp, Homo Sapiens
  misc_feature (503)..(503): n is a, c, g, or t
aactaccctggccacgggatggagaaagcactggactgggaagagactgggcagactctagaaacattcccaaaatagaattcgcaggactgggtgtcccactggagataggaggaaaaggagataatagaaacagccttctcacttgggcttgaggggccctcgtccaatataggagaccagtaagaaagccttgcccaaggtcacctcaagttaccttgatggctaactcgaatcaagaagctcaagttccttctggtagaaacctcttagtctgcctcattcacattgatcagcaaataaatttaaccatcatctgccagactttccttgttttccactttaatacatgtgcactttttggtcctatggagattaattaaagatcattaggggcaaaattccttttgacctcccataaggcctctcacagtacaagacaatatgtggtcaataaatattggtaattaaatcaaactccaggagccccaagaacccatcanccaggcattgccttacttacaac

SEQ ID NO: 262124 - DNA, 301 bp, Homo Sapiens
cctatactgccatctggaccacacatttgattctaagccggggatgccctactcatctttttatgaagaaatctagtctcagctactagcttatacattcagtggatcttaggatcaactatgcccagacatctctaatgttctagacaagtctgaattctaaatattttacttgttggcaagagcataaaccctgattttagcttcagaacataaagtagatgaagactaatagaacttttctccagtgcctagttcaagggtatgtaataaagacttttcgggccgggcactgtggctc

SEQ ID NO: 262125 - DNA, 193 bp, Homo Sapiens
  misc_feature (50)..(50): n is a, c, g, or t
agctctgtgcagagaacagactcctgcggtggaaatgctggctgcctttnaggctgggttctgtgaccttgggtttcccagcctgagcttccagtttcatttataaaaggggtgacgtggccgccttcctgcaggcgctctgaaggtggcagattacacagaggtggtacgactcatacaggtttctgcaaac

SEQ ID NO: 262126 - DNA, 982 bp, Homo Sapiens
  misc_feature (558)..(579): n is a, c, g, or t
gtagcgaggcctgggtggcgaattcggcacgaggctctctagtggggaagagtggctagaaccaggccattctcagtcgaatttaggaagaccaagactcatgttcctgacaggacggtcattccctcatggcatcactgactcagttctaattcctcccctcctgtttcattttggtttgaacaacctgtgcctgcagctgtttcttccaccttcctggagctcacaattggagcttcatgttcagtcttgagctcctaatgtttccagacagggcaggggataggacagccataatctatgaaagctgtgaaacaaaccctgggttatatagacctcagatggtctcatctgaaggctttgcccacttcccagtgagcagagggtttggggaacaaagaggtagctgaagagtggtggtttttccctgtatcctgattttcagaaagggctttagtctctgagctgtggctagtagctggctggctgaccaggggacgggggtctaatagggtgtctgaccataggacacctctcgtgtttggccttccctttctnnnnnnnnnnnnnnnnnnnnnncatgtacacacacaaatctgtatccccaggagtgcctcctgcagtcactgggggctcttccgtggtgcacccattccatgagagcagatcagagggctgtggtcaggacttcctcccgagctgccctccctccctgggatgagtttcctctccacctgctccaaggtgccttaacgaggtgcagctcttcacctggccacatggcatccatcaccctgttgaagaatgggtggggacgctggccgggatattggtgggctatgaaacctgaatttgtcccaaatcctggaacctccagccaaaaccacccctggggatggggaacccttggtcaagattcaaaggtccaatgaaaccacaatttcccttgggtaaaactattgtggaaaaaattaacactcca

SEQ ID NO: 262127 - DNA, 529 bp, Homo Sapiens
  misc_feature (319)..(319): n is a, c, g, or t
atagcttgcatctcatcccagtaaaaccacttatttataacatatcaacgtattgacaaggttgaagagcaagattgttctgaggtgagatgcaaatttcaaaggggtgagcactaattgttccagtgattgtttatttattggctaggacataattactctctttgaggttacacatctgcctccaggttcctgtgtgcttgtgcccttgggatcaggccagggcagactgtgatcactgagattcaaactcccagagtaatcagcaagagctttctagagaccaaggccaggcctgatccctgagggatgcatgagnaaggcttggaatctcattctgctatggtggctctctcttgatcttcttggagtagcaaaaacagcaatgtgggcccaatggtgtggcctaaatgatcacaaaggtaaatgagtaaagggctcagcagatgagtaaggagccttgtcctgagaaattagcactgggctcctgcattcagaaacatgtgataagcattgcccattgcacatt

SEQ ID NO: 262128 - DNA, 500 bp, Homo Sapiens
gggacgagccaatggaatgggtgtcattggacaggatggtctgctttttaaagtgactctgggcttaattagaaagctattagctccagattgtgaaatcatacaggaagtgggaaaactctatccactggagatagtatttggaatgaatggaagaatatgggttaaggcaaaaaccatccagcagactttaattttggcaaacattttagaagcttgtgaacacatgacgtcagatcaaagaaaacagatcttctccagattggcagaaagttgatataggtggacttttttacaggtcagttgaggcaaaaaactatgggttttttcaggtgaacctcccccatttaaatactcagaagataaggtgtgaatgtatgtattattagagtcctaaagtatttttataagttactggttttcacccacgcttttgtgggagagaaaatcattgcaaaatcattttttttgtccggtacaataaagtttactaaaaaacc

SEQ ID NO: 262129 - DNA, 880 bp, Homo Sapiens
  misc_feature (154)..(163): n is a, c, g, or t
  misc_feature (390)..(402): n is a, c, g, or t
gggcattgtaataaaaggtgtctttccctgtagtgacctgtaaaaagtactcaagggctttattacagacataccctccctttgaaaagggacatgctaaaagactcattactactcagccttcaatgtacctgtgtgtccatcttatatttcnnnnnnnnnnaattgtgaattagacttgtatatcccactgggagcactttgtaggcattgcatgaaccatgggatgatgattctgtggaggtattgccttgtgaatttgctgctattttagttttgtctttgctgtaaacttgtagcattaaacaatcattgttgttaataggtcttctttttgaaacaattatgtgaaatgtatagctgcttttgatgaaaagcagctatttgccnnnnnnnnnnnnncctttgaactttgaagctagtgcattggaaaaatgcaccctttccctcctttggaatgctgtattaatgtagtataataattactggttttgtaacttgttctggtaatggccttcccggactctttttaaatgtccccccccaagttttaaacttgaatgaataattagcccgtttttaaatgttttgcccgggtttttctcttcaatatttgggaatataaaccgatcttcgtgatactgtacatagctgtttgaaatgccagaatgacttctgacattccaagtttttcacaaaatatattttatctgtgattagccatttgactaataatactggctaacagatgttgaaaaaaattgtctgtttgttttctcattaattttggtctaaaacatgtttgcacttgtctttgacttgtgttttattaacattgattggcatattaaaagtcactctgagcttaccttaattgtct

SEQ ID NO: 262130 - DNA, 211 bp, Homo Sapiens
gattcaaatatcactaaatactttaaattgttttcacttaagagtctaatctgggaagttttcaaatcatactagtatatgtgtaatctaagctcttcagatgtatccatgaataatcctggaacaatattgcttgtattcctgtcatagaacaggttttgtaatctttaaaagaaatgaaaatttatataataaagtttcaaatcaatgc

SEQ ID NO: 262131 - DNA, 829 bp, Homo Sapiens
gaactaatactttcagggttctgacaaccacattctagcttaggggtagggcccacacctgcccccactgaggactgctccttggaccactgtggaggaagcctgggctgtctgaattgtgaattatgactgccagcccaccagagataacagatcccagcaggcagagcaagaacccagttttgggtctgcatgccaggaaatgtgaacttcctccaaatgtggccactgtgcctcccaatccaggcctcagcaaggtcattcttgggctttccctacacgagtccttccagtagtccacacataatgctctacatattaaaaacaaaccatttttgtactgtggataagaacagttgtaacaaagtcatagctacatatttttctctacattttgtttattgagacaaactaattaaaaggcacaaacatagggcatgtttacatggacattataacaaacatatacattaaaagtgtaggaatgtgttgccttcctgctaaacagaaagttcctaagcttttatatatacaaaagttgtacaatttaatgtcctaaagtacaaaagatcatgtataaaattattttacactaagtactatgtattttatttttttactatgtagttcagccccctagacctgttttgtataatgacacacagatacctgtccctgatgtaggaagtctgtctcagatgcaaggtattttgatgcttgaactgacacagtagggtataaatggaaatcatccagtttgatagtcagtcctgcaaacattctgcaagattaacacaactaatttccatttctcttaactgcaatgatt

SEQ ID NO: 262132 - DNA, 373 bp, Homo Sapiens
  misc_feature (154)..(154): n is a, c, g, or t
  misc_feature (184)..(184): n is a, c, g, or t
ggaaggggccgcccgtgtgttcatgccctatacgataaacatgataccataatgaaaatgccttacctttaggagaaaggagagccctagagtagccaggatcaaggatgaaagctggacttcaaatatgccttgttagtgtaaatgtgactgntggaactgtatgagtattttaagattatgngagtaaagtaagttttaaaaagcagtccctaatcatcaaaagtaaaaaactcttgatgtagtcatataaccacactaagaactcttccaggtgacttcaaaacataggacagtacatctctagtagaatatgccctgagaatgaaaagaatgtaacagtgttagtattttgaataaacatgttattact

SEQ ID NO: 262133 - DNA, 279 bp, Homo Sapiens
gatcaaaatgaaccctcgtaaaaatatatgttggggtacacaaagtaagcctctttatgaaacaattgaggataatgatgtgaaaggttttaatgatgatgttctacttcagatagttcactttctactgaatagaccaaaagaagaaaaatcacagctgttggagaaactgaaaaagcatatttgattgagaactgtgggaatatttaaattttactgaaggaacaataatgatgagatttgtaactgtcaactattaaatacattgatttttgagac

SEQ ID NO: 262134 - DNA, 313 bp, Homo Sapiens
  misc_feature (45)..(45): n is a, c, g, or t
  misc_feature (54)..(54): n is a, c, g, or t
  misc_feature (69)..(69): n is a, c, g, or t
  misc_feature (151)..(151): n is a, c, g, or t
  misc_feature (186)..(186): n is a, c, g, or t
  misc_feature (279)..(280): n is a, c, g, or t
gatccagaatccacggggtctggagcataaggtttatctcaagtntcaattganctgcctcctcttgtnaggcagggacaactgggaggatgagccccaagagcctcaagaacccaacaaggtgcccctagaagacacagagacagatganctttgggcatccttggaggcagctgccaagcgganagctctcgggtttggagcagccccaaggagctctccaaacgagacggagaaagaagaagcggcctgggtccaccagcccctgacgcccctgtnnccactttgtaaataaacttgctgaacacccaaa

SEQ ID NO: 262135 - DNA, 468 bp, Homo Sapiens
gccaagaaagccatgtcctgccagcgcagccagctcctctggttccgccgcctctacattatcttctcccggtacatgagaatcaactcactgagcttcctctgaagccttgaagggttttcaggtccaaggaacaaaggggaaaatagacaaaggagtgcagaggacctggcctggcactggcttatttacctgagctcaaggagatcacccgctggagcagcctctgcaaaagggagcccatgtagtggccaggggctgtccaaactccagcttcttcccctgggaaaaaacccaaagaaccaaaaacaaaccaccccaaggataataatagctacactgctagcttctcaagttcttgtgaaaaacaatttacataatgacacagtagatgtggaaacacccacccagtgcctgggcaggtccctattatcataaatgaacataaaagtgctctaaaaacactcc

SEQ ID NO: 262136 - DNA, 471 bp, Homo Sapiens
  misc_feature (348)..(371): n is a, c, g, or t
gatcaccatttgagatacgcggcttaacgcacatgtgagtgtagcttgctacatgaaaatgctaggctctagggcatgtaaaacatgaatacagaatactagattgttctaagtaatgtcatttcggtttgtgaatttgatttttcccttcatttcatgtcatattgaaaatgcaaacaaactgctctcaagaacacccagaagctatctgtgttaccagatgtgttgtgaacactctactatttttcataggtgcttccttgaaatatatgtccattgtagtggtggagagggactggactctctcaggctctttacttgccagttgtctcccgcagttaatggaannnnnnnnnnnnnnnnnnnnnnnntttatttagaatataatttaaacatgaaggtctattctttgcctttttattaatatatatatagataatctttaaaaaaattaaaattcaagtccatttt

SEQ ID NO: 262137 - DNA, 468 bp, Homo Sapiens
  misc_feature (33)..(33): n is a, c, g, or t
  misc_feature (39)..(39): n is a, c, g, or t
  misc_feature (56)..(56): n is a, c, g, or t
  misc_feature (69)..(69): n is a, c, g, or t
  misc_feature (135)..(135): n is a, c, g, or t
tcccctcaagcccttcttggtaattttaaaggncatcgntccttaggactttggtngctccctaaaagntacctggtctggttggagaatttcaaggtctccttgtcaaccatcccttcacaccatggaccaacnaaaacccataatgcaataagtggcctttttgaacccaagactttgcaaactgatctctcccccgtgaaggagttgagcacattagcaacaatgtacattaattttggattttcattttcatgttttattttgtaaatattatctgatgtttggagcttgagtatacagactgtaaatatagttcttgtatttgtactaattctgattcttttcctgtatagccttagatgtgcaatgcagacactatctaactgtgtgtggtaaccttgcgtcacggagctgttagtgaacgaggtaaaaataataaaggtacagccagtgcatcaaaaaaaa

SEQ ID NO: 262138 - DNA, 255 bp, Homo Sapiens
  misc_feature (29)..(29): n is a, c, g, or t
  misc_feature (132)..(132): n is a, c, g, or t
gatcatatttaatgaattatagtataatncttgcaggcccagtacaagcatatatattgtgcctcttacagcctttggaacacattgtttccattttttaaatatcttctatatccatatagtattcaaatnattaatgctcatgtaccaaggttttgctataaaagttttgtctgtatgaataatgtggctttagtaaataatcatttttcaactgtaaacttattctgaaataaagtaaaattctaattgttt

SEQ ID NO: 262139 - DNA, 577 bp, Homo Sapiens
  misc_feature (167)..(167): n is a, c, g, or t
  misc_feature (172)..(172): n is a, c, g, or t
  misc_feature (398)..(407): n is a, c, g, or t
  misc_feature (449)..(535): n is a, c, g, or t
gatctgtctctgctgtttaacttcattggattaatcagctggtttcaactctactgcgaaacaaaaatagctccttaaaagtactgttctccttcagtggcatgtagttatctaatcaagacacctcattcaaacaaaacctgccttaggaaaatttaatatatttnaaatnattttaaaagaaatacaacatcttattctttagctttcttaatcggtgctttatggaggccagtgtaacggtacatgactcgttgagaaagttgaggaatttcctctaccacctttgttgcttgaagaaaaacatgtcttttcaaaatgagaggctttcattgaagaaaagaaaaaaacaacagttaaaagcttttggctctctgtttcatttttttccattaagnnnnnnnnnngtccccttttaaaacaagcagggctgggtgtgacggcacatnnnnnnnnnnnnnnnnnnnnnnnnnnnnnnnnnnnnnnnnnnnnnnnnnnnnnnnnnnnnnnnnnnnnnnnnnnnnnnnnnnnnnnntaagacccaatctttatttaaaaaataaataaataaatagcc

SEQ ID NO: 262140 - DNA, 350 bp, Homo Sapiens
  misc_feature (72)..(72): n is a, c, g, or t
cctccaaaccccctggcctttcagttcttaactatttccctcccggccagaaagttttctttgaggaagganaggagagggtggcaatgatgcctttgatctggaattggacatttctctgtcagagcacagaggaggctcatatcacctcttccctctcctacttggcccagctgcttggaggaccgaccccatggctgagaatatgacggcaagaggaacagagtttgctccaagtgggaaagggtcccaagcagtccagagaagatgtctgtgtggctttccctccctgcctcccccagctcccacactggcctttgtaaataaatggcgtggtctttgttgtgaaa

SEQ ID NO: 262141 - DNA, 519 bp, Homo Sapiens
tcatcctgctcaggtcttttcagcagtctcatcatcagcaaccatgactgatgactgggccctagcaggtggcaggtataacatggccatggacactcttcttttttaaattttatgtctagcttctgagtctagatgaaagacagtatgtttcagagaacattggatatcagtttttcccacagcagggactgtgagagacaaccagcagcatcctctttgtaatcacagggcagggatcagagtttgaaatgaaatgttgtcagggtgttggaaaaattttggtgagttctgcacatttcccctggttcaggctgggcatggaccagccttcagatggcagaagtggaagatgagcctacttgtgagcgatgtgactttaaggaaatgaagactggggaagaataattagtgtttataagacatttaagaggccctttttcatatactgactcactgatgaatcagcatttgcattttatggaaaaatataaatccaaagaaataatttatccctta

SEQ ID NO: 262142 - DNA, 382 bp, Homo Sapiens
  misc_feature (67)..(83): n is a, c, g, or t
ggagaggccgagtggcgaccaggccccaagcggaaggccattttccctgctcttcctcagttgtccnnnnnnnnnnnnnnnnntgctgcgaggaatggagaaaccaggccctttagaggatcccagagagggaagagaaccaggggcccttttctcttttagaattttcttttaatcagcccaccttttgactccccgcccgccccaatccattatttttttctgccttccgggtcccatccttagagctcgagtcgttccttcccctcctggattccgggtagcagaggcagcgccgcaggaggcgggtgcccgtttgtcccaggcctgggcgtggtggaggaaggggtgctggaacaataaacggcactatccaaatgtc

SEQ ID NO: 262143 - DNA, 492 bp, Homo Sapiens
cccctcccaatctgggggccaaggtttcccagccactccactaacggcctgggtttgcgctcgactgcaaacctgaagtggcagagttcacagtagctggtgtttgaggatgacagccagtgctccaggcagctccgatgaattgtccccaaggtccctgtacattcacatggagagagcaagtcctcttggctgctgccctcgtggcagatcctgcacatcggccggtcattgaaggggctctgggtggcaagagtccgcactactgttgacagcagctgcccgtccttggctgaaacttgcatgacaaactgcggctgcccattcactaggctgccacaatcctccaccgtcttcaccacgggtgcagctgagctggtgcagtctggcaggacttcgggcaggtgactgcagcggctgggtgtcatggtaacagacagcaattactctgctaatggcttccacagtcatacaggagttccatcatcctcg

SEQ ID NO: 262144 - DNA, 1632 bp, Homo Sapiens
  misc_feature (772)..(772): n is a, c, g, or t
  misc_feature (775)..(775): n is a, c, g, or t
  misc_feature (1128)..(1261): n is a, c, g, or t
  misc_feature (1270)..(1283): n is a, c, g, or t
  misc_feature (1321)..(1490): n is a, c, g, or t
  misc_feature (1502)..(1520): n is a, c, g, or t
agaaaacaaattcacatgccaacagattatgctgaagttacagtggactttcactgctggatgtgtgggaaaaactgcaacagtgagaagcagtggcagggccacatctcctccgagaagcacaaagagaaggttttccacaccgaggacgaccagtactgctggcagcaccgcttcccaacaggctatttcagtatttgtgataggtatatgaatggcacctgcccagaaggaaacagctgtaaatttgcacatggaaatgccgaacttcatgaatgggaagaaagaagagatgccctaaagatgaagctcaacaaagcacgaaaagatcacttaattggcccaaatgataatgactttggaaaatatagttttttgtttaaagatttaaactaatatgctggcttttatgtatgatacctaatcagagcattgaccagaaaaattgaaagtgttctgaggcacatagcagaggagctgcagatttcctgcttgtattggcgtatatcgttcctcctgagcagcaacccacagtaggtaggaaaatgggctgtttcacaggcctggccacgctctcacggaaccactggcatcagatggtgaagtgactgctacccggttgccatctgttgaacagacttttggatgaagtgtgttggggaagaggataaggttatatctaggacaactctttgagttggtccttcatataagaatcgtgacggtaagagaataaacacttgtactgggatcagaatacatgatggatganatnctttacatgttttagccagaatgaatttgtttaatataataaagtttgcctacttatcctgtatgtaggttgcctaaaaaggattttccttaactcagattttaagcccaaataacccatttaacactagtatttgttaaatggggtattttcctgtatttgtatgtttcactataataagggaattaaggataatgtgcattgagaatattttgaaaaataattgactcaaattttatttcttggtcttttgctgtttaaatgatgattttgaaagattaaacctgtactgttggtattgtgttagtgtatggaccaatactgcctgtaataaagattttatatatagatgnnnnnnnnnnnnnnnnnnnnnnnnnnnnnnnnnnnnnnnnnnnnnnnnnnnnnnnnnnnnnnnnnnnnnnnnnnnnnnnnnnnnnnnnnnnnnnnnnnnnnnnnnnnnnnnnnnnnnnnnnnnnnnnnnnnnnntttgggggnnnnnnnnnnnnnnaaaaaatttttaaaacctttttttgggggcggggcccnnnnnnnnnnnnnnnnnnnnnnnnnnnnnnnnnnnnnnnnnnnnnnnnnnnnnnnnnnnnnnnnnnnnnnnnnnnnnnnnnnnnnnnnnnnnnnnnnnnnnnnnnnnnnnnnnnnnnnnnnnnnnnnnnnnnnnnnnnnnnnnnnnnnnnnnnnnnnnnnnnnnnnnnnnaaatttaatttnnnnnnnnnnnnnnnnnnntccgaaaaatgggggaaattttttaaacttttggcccgagggggaaccccccccaaaggggttgtaaaacccgaattcccccgggggtttccccccctttggccccctttgg

SEQ ID NO: 262145 - DNA, 346 bp, Homo Sapiens
gccgccagctacaatcccatggtgctcattcaaaagaccgacaccggggtgtcgctccagacctatgatgacttgttagccaaagactgccactgcatatgagcagtcctggtccttccactgtgcacctgcgcgggggaggcgacctcagttgtcctgccctgtggaatgggctcaaggttcctgagacacccgattcctgcccaaacagctgtatttatataagtctgttatttattattaatttattggggtgaccttcttggggactcgggggctggtctgatggaactgtgtatttatttaaaactctggtgataaaaataaagctgtctgaactgttaaa

SEQ ID NO: 262146 - DNA, 158 bp, Homo Sapiens
cggttgattttggggggtggagtttcagtgagaataaacgtgtctgcctttgtgtgtgtgtatatatacagagaaatgtacatatgtgtgaaccaaattgtacgagaaagtatctatttttggctaaataaatgagctgctgccactttgactataaa

SEQ ID NO: 262147 - DNA, 339 bp, Homo Sapiens
gtccctcaacaccccaggagctgaagggattggaaaggtttggattcctttgtaaatgtcctgcttttctttctctctgtgtgtatctatttacatgccttagcacacgccctcccatcctgatccctttgccctgtcgccggaacaaccagaatgctggtcgctgccggcacagtacaagttgatgaaaccctaatcagttatcttgtgtgacaggggaagaagagaaactccatagtattccttgtagaatatacatacctgtaggatgctgtgtaatgggaaaccatagaattgggcttttgtcatttcaaagttggagaaatgtatgaataaaat

SEQ ID NO: 262148 - DNA, 596 bp, Homo Sapiens
  misc_feature (79)..(79): n is a, c, g, or t
  misc_feature (113)..(113): n is a, c, g, or t
  misc_feature (561)..(561): n is a, c, g, or t
gatcagccaggcacagaatctccagaacaacctagagagtgaatgctaatttgtagagcgaacttccatttggcccatnatttgtaactgtgtaactgctccaagtgccagantgcttacacgttaaagcagcacctttccatttgcccacatattcttcttgcacaccccttccattactgctgaataggacattgcatgggaagagtacagaggtggcagaatgaagctagagtgggaaggactaaagactgagccccagagtgctcccagcaaccgccacgtacaaggtctgaaatgacaagggcaagagtgagataggaaactgtgtgtgaaaggaaagcccttgcagtatttctgcctccctttctttctgcctttcaccccactaaatgtacgttattgaatgccagtacttctctagtgggatgcacacttgttaaatagtgttaaggagatgtgggagatgagatataccccttttgatgtaggaattatttcatttgggtttgttttcatactttcattataagggatccaagttaattttgatggactaantgtggggattattattttccaggtccaaaggcttt

SEQ ID NO: 262149 - DNA, 1188 bp, Homo Sapiens
  misc_feature (599)..(599): n is a, c, g, or t
  misc_feature (858)..(858): n is a, c, g, or t
tttgcccacatattcttcttgcacaccccttccattactgctgaatatgacattgcatgggaagagtacagaggtggcagaatgaagctagagtgggaaggactaaagactgagccccagagtgctcccagcaaccgccacgtacaaggtctgaaatgacaagggcaagagtgagataggaaactgtgtgtgaaaggaaagcccttgcagtatttctgcctccctttctttctgcctttcaccccactaaatgtacgttattgaatgccagtacttctctagtggatgcacacttgttaaatagtgttaagagatgtggagatgagatatacccctttgatgtagaattattcatttggtttgtttcatacttcattataggaatcaagtaatttgatgactaatgtggattatatttcagtcaaagctctgctttcaatttctctgatttgctcactaatgccttatgtgtgttttactaaccttttatatcttgccttcaagtgagaaggaacaaacaactcctcagtggttacctacttgcttttatatgctggctgtgaaggttaaaagaaagaatggtctgtacccattttttnctgctttgctgcccttttattgtacccccaggcctcctagaggactcctgcagattctattgttgggtgggaaatagtgttggaatgtgtttgcacagtcttatgatttcagtctcagtctgctataggtattggttattcttggatactacacacctgctcagactgagtaaacatttgtggtgctgtcaacctgatttcttgactctccaaatgatttttgtatttccaatatgaatttgtgtgttatgaatttccngatttccccaagtagtatatgccacctatataaatttgtattaataaatgacagtcttgttggttttttgtttgttttcctatgttctttttagattatatctcttatgaatatagacattgccattaagatgccaaaattcattctaaatttgaagcggtcttctggagaaaacccttctaatgagggtgaatctgagacactcattaactgtgttcagagtaagatgctgaataaattatatgtttccagattatcataggtcttctttggcaatcagttgaaattctgagacaaagaggaataattaaaatttccatgtgccatata

SEQ ID NO: 262150 - DNA, 465 bp, Homo Sapiens
  misc_feature (95)..(132): n is a, c, g, or t
caccgtctttgattcaccgggatgtacagtttacagttgaagagcaaacagaaaggttttctcttggtgggatatgcagaacttgggatgtgtgnnnnnnnnnnnnnnnnnnnnnnnnnnnnnnnnnnnnnnctgacttaaaaaatcaaatcccccgacatacgttttttttaatctgtgccaaaaatgtgttttcagaggaaatcttattttcatattcagactttgtattgcccactcatttgtataagtgcgcttcggtacagcacgggtcctgctcccgcgatgtggaagtgtcacacggcacctgtacaaaaagactggctaacccctcttcctattaccttgatctcttcccccaacttcctaacacttattaatttatgaaactgtttttctcagcgcagttttgttttgtgtgtccattggattacaaactttattaaaaaatataaaacacaccaa

SEQ ID NO: 262151 - DNA, 274 bp, Homo Sapiens
ccataggatgttcaaccatgttttcagaggccgcactgcatgaatgcgggaaaatgttgatgatcactaatcaataatctgatatttaacaaaatatggacaggccacttatgctcagttttaccttagttattccttggtatccacaggcccaagtccctttaaataaaataccctcatatttccatataatctacatacattctcccatatactttaaatcatctctagattacttataatgtctaatacaaaataaatgctatgtaaatgt

SEQ ID NO: 262152 - DNA, 1051 bp, Homo Sapiens
  misc_feature (867)..(867): n is a, c, g, or t
  misc_feature (870)..(870): n is a, c, g, or t
  misc_feature (873)..(875): n is a, c, g, or t
  misc_feature (878)..(879): n is a, c, g, or t
  misc_feature (881)..(882): n is a, c, g, or t
  misc_feature (885)..(886): n is a, c, g, or t
  misc_feature (888)..(893): n is a, c, g, or t
gggagtcccaagatggcggccaccatgaagaaggcggctgcagaagatgtcaatgttactttcgaagatcaacaaaagataaacaaatttgcacggaatacaagtagaatcacagagctgaaggaagaaatagaagtaaaaaagaaacaactccaaaacctagaagatgcttgtgatgacatcatgcttgcagatgatgattgcttaatgataccttatcaaattggtgatgtcttcattagccattctcaagaagaaacgcaagaaatgttagaagaagcaaagaaaaatttgcaagaagaaattgacgccttagaatccagagtggaatcaattcagcgagtgttagcagatttgaaagttcagttgtatgcaaaattcgggagcaacataaaccttgaagctgatgaaagttaaacattttataatactttttttatttgtttaataaacttgaatattgtttaaaatgataattttccttcttcaaatgacatggaaagcaaaactttcttttttaaaaattttcatttatttaatggaaacttgcccattttcacatgtctgcttatttattttatatttttaaaagaagacagtattcacctatgtattttgcataacgattatatcaagtctaggggcttcatgtcatgttattaaaatcagttaagcaatcttttatgtttctatattatttagaatatttgttgttgcaattttcacataagaaaatttaacagttgtgtcatgttgtttctgtttgattttaattgctgtctaatgacggggaaagcacgacgaaaagatgtacaatcctgcatccttgcttatttcacaactaaagctttgtcatagacttctaanaanaannnccnncnnccnnannnnnncctggtcggccgcccccggcccctcgaaaagctttcataaaccatttccttgggcgcgccgggcccaggagaggaaagtggaaccgggccataactgggtccccaaaggaaacccctgggcttgggacataagggcgtggcaatccccccaccccaaa

SEQ ID NO: 262153 - DNA, 267 bp, Homo Sapiens
  misc_feature (45)..(45): n is a, c, g, or t
gtgtgagctgctaccatgcctagccccagcttctacttgcttganggctctctttggcatctccacacatcatccttagcagcccagactgcatttctgtagcagcctcttccctggtctcttctttcagtctctctgcctctaatccagtggctttaagaattttttggctgtgacttccagtaagaaatacaatttacattgtgacctagtaaatatgtgtgtaagatttattaactgaaataaaaatgttatgatttaattttt

SEQ ID NO: 262154 - DNA, 815 bp, Homo Sapiens
  misc_feature (42)..(42): n is a, c, g, or t
  misc_feature (124)..(124): n is a, c, g, or t
  misc_feature (340)..(340): n is a, c, g, or t
  misc_feature (579)..(579): n is a, c, g, or t
  misc_feature (599)..(599): n is a, c, g, or t
  misc_feature (632)..(632): n is a, c, g, or t
aactgctgctggcatgaagtggcttcctctgcctccactcantcgcagagtgcgtccttggatggtcctgatacaacaatggctaaaagaactaaggagaggagataaccaagtttcagcctcnaaaaagatgacccaccagcattcaacctcttccctatgtggagggcgctaggtccaagtgagaccacggcacattcgatgctgtttatcaacacccgacgctggtgacttctgatgccatccttgaagacacagtgttctggctgatggaggctctgctggcttctcagagccacaagaaacggggcaatcttcttggctgtgatctgaaaaaacnccacatacgttctgtacggaaacagactgtttaatagtgggagggaaaacccaacatgaaatataaaacaagtaatcatgcgccttgtgagttttggtttctgttgtttctttctgggtgtatgtgttttgatggcaacgtcggtctgaacagcctgctccagcatttctcggggaagaagctgaggatgcggttggtcccagggatcgaaaggcctgctgacacgccctcagcttcgncagccaccaaaaccctgggncagacgagttatttgacccaaagctgaaccctnctgtgcctgatccaaaaccagagaatccgctactctgggtcccaaaaccagaagtctgttgggacagtgatccgaaagtggggggcattctgactcgcgagcgtgccgaaggatgtgggtgttgctggctgctcccaaacccgaatcctccagcgttggcgctgcagtgccctttccgacatt

SEQ ID NO: 262155 - DNA, 1323 bp, Homo Sapiens
gccctggtccgcgggcgagctcgagcagccaaccccgggcgcgtcggggccatggacggcctgaggcagcgcgtggagcacttcctggagcaaaggaacctggtcaccgaaggcctgggtggcgaattcggcacgaggccggggtggagaagcggtatctggctgcaggagccgtcactctgctaagcctgtatctgctgttcggctacggagcgtctctgctgtgcaatctcatcggatttgtgtaccccgcatatgcctcaatcaaagctatcgagagcccaagcaaggacgacgacactgtgtggctcacctactgggtggtgtacgccctgtttgggctggccgagttcttcagcgatctactcctgtcctggttccctttctactacgtgggcaagtgcgccttcctgttgttctgcatggctcccaggccctggaacggggctctcatgctgtatcagcgcgtcgtgcgtccgctgttcctaaggcaccacggggccgtagacagaatcatgaacgacctcagcgggcgagccctggacgcggcggccggaataaccaggaacgtcaagccaagccagaccccgcagccgaaggacaagtgaagcagccccctgagcctcacaaggacctcctggctggtgaggagggggccgcgccaggctcccaggcctccacagagtcttcagcgcatcccccaacagcagcccctgccagtccctcgggtccaggcaaggccctgggggtctccttaaatgccacctcgggcaagtcccagtcccagtcctcggccacccccagctctggatcccagggccagctgccctctggctctggctgtggctcccgcctgtccggcagggcccagggccagcgtcgggcacagggcagctcccactggtctcggcaacacacccagccgcctggtacttcctccggcccctcccagtcagccctcccgtcctcggggcccctgcagccacccaacgtcacctccagcccggtctcacccatggtccagtctcccagcagcagcaacatccccacgcagccccccagcaagtcctctggcaagccggaggacgcagcccccaagaccagcggacagcgccagaaggaatcgtcgaaacagcctgccagcagcgcctcagtgcccgagctggtcccctgccattccgggacctctctggagtacacttcggagtccaccaccgagatcacctgcagctggccacaccacaggcccccgtgcctgcagcactactggtgcctgaaacacctggcctgctaggaggctccaataaagctaacccggaccag

SEQ ID NO: 262156 - DNA, 857 bp, Homo Sapiens
  misc_feature (35)..(35): n is a, c, g, or t
  misc_feature (40)..(40): n is a, c, g, or t
  misc_feature (400)..(408): n is a, c, g, or t
gcggccgcctactcggtgcgtcaggtctacgactngctgntggtttttttggaggctcttaaggggaggggcccaatttcctgccacctatttagtccagaaatggaaaatccattatggccagttaacctttatattatataaaaatccaatttcttttcccttggtagaagaaaaaccccaaaataatttttacaaactaccatttaaccttagaaatataaaagaactgactagtgtaaaattttgaaaatctaccactttattttgaaggaaagtacacatccttcaaaaccccgctaacaattcctagttcagttttctattatacaaatcaaaaagttaaattccttgtggcactaaccaaaacttaaaaattaacagaagactgaattaattnnnnnnnnngcatactaactaatcaaaacaatccactgtgcaatgaatatttgaacaatgaaaaaaacctaccaagcatcctaatcaattatatagttcttgcttccatattttaattctggactttcaggatggtaaattattaaacaggtcgatttcatggactgtctaaaccttgtagtatttcaaaatattaccctttctaaaccaaatctgtggtcctaatcaactttttttccaagaaaaagaaacgatatgtgtttaaaatacattccgtagcagtagaaacatcttagtgtctcaaaatactatttacaaagaaccctgctgatcctgtgcatttcgctgaggtgctacttgcacccagacttcatcatctggaaaaagaacttgaacttcctgactcagagtccagctcactggaatccatctaagtcccattcagtactagactcact

SEQ ID NO: 262157 - DNA, 657 bp, Homo Sapiens
  misc_feature (97)..(150): n is a, c, g, or t
ggcacacaggccagggcacattcttggattttccattccttggtcatgctggaatctctcaatgtgacatacttatgtaaatattgttactattatnnnnnnnnnnnnnnnnnnnnnnnnnnnnnnnnnnnnnnnnnnnnnnnnnnnnnnaaaccaagcatctatagaaaccaagaaagtcagcatgtaagcgtcactggaaaaactggtttaagcaaatagagccgtctgggatttgtaactgaggtgcaactgtcatgaggcccaggcagctctgtaacatcttctatagatgcccctggctaccctgttgttttcatctacctcagacccctatcatggggctctaccctgtgacaagagccaaacccattctccatggcctatggaagcctcactggagtttggggcctgctgcaatggggatgagatggttttttgtagaattatacttacgttccttggatgatctctagttgattttttaagttctgagttgatgctgttaaggtacccggggtagccattggttcttggatctgtgttagaatgagtgctttcccttcctactgatgtgattgtggattaggaattcgtgaccgagtgatttttggccagtggttgggtttaaaattctattaaaatttgtagtttggg

SEQ ID NO: 262158 - DNA, 232 bp, Homo Sapiens
gccaatgtactcactcagtacaaatagcaaaatagtataccatttcctaaatacaaaatatagctttccaaaaaaatgaaacacacattagatataaaccatccaaaacttgaacgattgaaaactgtattcaaaattaaatgacccagagtaggtctctttctgaaaagttcccttcatatcggcaagaagcctgtactactgaaaacgtaattcaatgcctctcaatcag

SEQ ID NO: 262159 - DNA, 665 bp, Homo Sapiens
  misc_feature (24)..(24): n is a, c, g, or t
  misc_feature (138)..(138): n is a, c, g, or t
gtcatgaggaggccccccaggcangacagtcctgaacccctctgacacttggaaactgaatataagtaaaatgtccaggtggactctgagtatttcctgtggatcctgggaaagtactgttgcacaaaggctgcaaantggactcaggaatgtcctccaaccagcagcgctgacctaagagctccctgtgccgtctatccagaccagacttcggtagatgcctttgttagatctatcacatgtaaacgagcttgtatctccttccctgtgccacgagagagattggctttttattccaagtctaggcagagacagaagaatgttgaataagagcacgattagagtcctgtctggttatctgttgcccaagaaaagaactctgctgtccaggcactgcttggcttactatcccagcaaagactgcagttttgtggacttttgaccaccttgggctggcactcttagcacacctgagacagatttaagcctccctaagagactgaagagaggaacaggtgtcagatactcataggcactgagatctacaaatgggaagcttgtgagtggcccatctttgttggcctacgaactttggtttgatgccagtcaggtgccacatgagaacctttgctgagatgcaaataaagtaagagaatgttttcctg

SEQ ID NO: 262160 - DNA, 847 bp, Homo Sapiens
  misc_feature (561)..(590): n is a, c, g, or t
tattaatttggggaaaggggtgttagcattagtgccatgatatctactggattttaagtagggagactttatttttaaaggtaggttgaaatttgggagatttctcggcaggaagggctgaaatccaggcccctgtctcaacttggagagaggtgacagacggcagatcttccaaatcaaattcctttccagttcttcccctggctgcctttttgggggtccctgccttagccccacacaaggctttctgaactgccaagaggggatctggcttctcaactgctcggcctcttgggcaaggctgtgccaagccaagccctgggagaactgggtagcaggtggctgacttctttaaagcacctttctaaataccagcagaaagaggctcccgcctctgttagcatgatcagtactattgtgacattaaaacaacaacaataagatcttcctatctggagggtacagaggtgaatggctttggttttcatttctcttcttcactgccttttctcggtgtggtatttgacaagattttagctcaaagcctcaccatgaattgannnnnnnnnnnnnnnnnnnnnnnnnnnnnngggacaattttagatacctgagtgcactttttcagttagccctaacttttaaaagaaggaaaaaccaagagacatatctggtgtacgtgttgcagtatgaactctgggttgaaattccctccccctcccacactggccccccatttgagtaccgccgcacaagtcaaaacgctaggaaagtttgaaataaaaccaattttttctaacctggttggctcatttgggtgggaactcccataaagccaaggacctaaccc

SEQ ID NO: 262161 - DNA, 442 bp, Homo Sapiens
  misc_feature (113)..(113): n is a, c, g, or t
gatccgtcactcttccttgtggtaatccctagactgggagctcaggtactcttttagtcatctttgtatgtctttagcagagttcttgacatgtggtaggtgcttaataaatntttgttgtttatcaaattttatggtagggagagtaagtcagcatcggtataaaatcgcttactccacgtaactcttcttctgatagggtttgattttctattagaagctcaattttagttttttttcatattataactaaatatgtttcctgagagataagagaaataatgttcctacaatagttgtatgtatctaagataagacatatagatgcttaagacattttgtttcacttgctattcactagtgtacttgaaacatggtcatttttagcccttttccttaggaaccatgtctttattttctcaataaagaaattactttcaaa

SEQ ID NO: 262162 - DNA, 1368 bp, Homo Sapiens
ggcctgggtggcgaattcggcacgaggcggacttcgcctacgactcagatgtcaccgggtgcgcatcaatgtacctccacacagagggcttctctgggccctctccaggtgacggggccatgggctatggctatgagaaacctctgcgaccattcccagatgatgtctgtgttgtccctgagaaatttgaaggagacatcaagcaggaaggggtcggtgcatttcgagaggggccgccctaccagcgccggggtgccctgcagctgtggcaatttctggtggccttgctggatgacccaacaaatgcccatttcattgcctggacgggccggggaatggagttcaagctcattgagcctgaggaggtcgccaggctctggggcatccagaagaaccggccagccatgaattacgacaagctgagccgctcgctccgatactattatgagaaaggcatcatgcagaaggtggctggtgagcgttacgtgtacaagtttgtgtgtgagcccgaggccctcttctctttggccttcccggacaatcagcgtccagctctcaaggctgagtttgaccggcctgtcagtgaggaggacacagtccctttgtcccacttggatgagagccccgcctacctcccagagctggctggccccgcccagccatttggccccaagggtggctactcttactagcccccagcggctgttccccctgccgcaggtgggtgctgccctgtgtacatataaatgaatctggtgttggggaaaccttcatctgaaacccacagatgtctctggggcagatccccactgtcctaccagttgccctagcccagactctgagctgctcaccggagtcattgggaaggaaaagtggagaaatggcaagtctagagtctcagaaactcccctgggggtttcacctgggccctggaggaattcagctcagcttcttcctaggtccaagccccccacaccttttccccaaccacagagaacaagagtttgttctgttctgggggacagagaaggcgcttcccaacttcatactggcaggagggtgaggaggttcactgagctccccagatctcccactgcggggagacagaagcctggactctgccccacgctgtggccctggagggtcccggtttgtcagttcttggtgctctgtgttcccagaggcaggcggaggttgaagaaaggaacctgggatgaggggtgctgggtataagcagagagggatgggttcctgctccaagggaccctttgcctttcttctgccctttcctaggcccaggcctgggtttgtacttccacctccaccacatctgccagaccttaataaaggcccccacttctcccttta

SEQ ID NO: 262163 - DNA, 393 bp, Homo Sapiens
cccccccgggcccaaagggaagttggtattagggcctgggacacccttggtgatgcctgtttaaccctgggtttgaccattgggagatacgcctagtaacctgtgatccccatacctataaaacagaagaattttcctgctactaaaaactgcctttttacaaaatgactgtaaatatttgtaaaataaaataacactaaactttaagcccaaaaggagagatagagccatgtgttcagttgtggacctgtccgtggggcacagtgccaccccatcacagtgttgctgtcatcaggcaaaagtgaatgtttgtttatggcaaattcgtcttttgcgaatggcttaattctgacactacctttctgggaaatgttaataaatttttaatattca

SEQ ID NO: 262164 - DNA, 403 bp, Homo Sapiens
aaaaaaaagatacagatcttttcccctggccaaagggaagttgtattagtctgtgacatcttgtagatgctgtttatcttggtttgacattggagatacgctagtaactgtgataccatactataaaacagaagaattttctgctactaaaaactgcctttttacaaaatgactgtaaatatttgtaaaataaaataacactaaactttaagcccaaaaggagagatagagccatgtgttcagttgtggacctgtccgtggggcacagtgccaccccatcacagtgttgctgtcatcaggcaaaagtgaatgtttgtttatggcaaattcgtcttttgcgaatggcttaattctgacactacctttctgggaaatgttaataaatttttaatattcattaaaa

SEQ ID NO: 262165 - DNA, 970 bp, Homo Sapiens
atgaactgttaaaaagcaggtggtacggtcggaatctcgggatatcgtcgacccacgcgtcgttctactcatacttagggtttaggaaacactaccactagttatcatttaatcaacttcaatggtctactgaaacaaaaatggtaacttttcattagtggattatttagagttatagtagttgtttccagaaaacacttcctcacaattgtacttcccaatcaaatcatgtgatcatacagttattcccatgaaaggcagaatgttgtttcaaaattaatctagttttctgtacatttaaatttgagaaggtgacaactggctcttttccagtcttccttcatgtcagttttctgatagaccactatggcaaacagtatctgtcaactaccaaatgtgtaaaattttctgtatttcacttgtcttatttgtaaatagtgaactaaaactttggcagatcagcaacatttgctgagcctgttttttaagctaatgtgtattcttactaatgttcctatcaagaatggatttgtaatatatgctgtctatttctaatgtccacattcatattttaaggttctatcttattttaatagagaacagacttctcaaaaaatcttcagaagcagcttattattgaaatatcgaaatattgaaataaacccggtggggttagattactcatctgtccaccaagtgggacatttgcatggactgggggcttaaaggaccttagaagagactgtaagtaaatcctgaaatgagccatccccacttgaatgttactggagtaaaccactttacaacccaattaaggaccgaggcgataaccaatggctgctaaattctttcctcattggtggccaattcaatggtgtgtcccgtgccggccctggggtaaaattgctctctggtgggttaatttggccaaagagggtgatttcgagcgcatggaattgcgaaaatagaa

SEQ ID NO: 262166 - DNA, 549 bp, Homo Sapiens
  misc_feature (19)..(19): n is a, c, g, or t
  misc_feature (56)..(56): n is a, c, g, or t
  misc_feature (59)..(59): n is a, c, g, or t
  misc_feature (85)..(85): n is a, c, g, or t
  misc_feature (134)..(134): n is a, c, g, or t
ttgccttatcagttctttncaatctgcctgtggttatcagcacttaaagcacaatnttnaaggggaaaaaaatgataatcacctnagtcccaaagaaataattctgtcaaactgccttattagtattaaaacangacacactgaatgaagtagcatgatacgcatatatcctactcagtatcattggccttttatcaaatggggaaactatacttttgtattacatagttttagaaatcgaaagttagagactctttataagtaatgtcaaggaacagtaatttaaaaacaaagttctaacaaatatattgtttgcttaatcacaatgccctcaacttgtatttgaataactaaataggacatgtcttccttggagctgtgggcattagttcagaagctctacctgcatcttaattttcaaaacttaagttttattagcaaatcctcttctctgtaagacttagctatgaagtggtatattttttccaaatatttttctgaaaacatttgttgttgtaactgcacaataaaagtccagttgcaattaaa

SEQ ID NO: 262167 - DNA, 1042 bp, Homo Sapiens
  misc_feature (422)..(422): n is a, c, g, or t
  misc_feature (992)..(992): n is a, c, g, or t
aggaaaaataatactacgcacagacaacccgcccctccttttttaccacattttgctccccccctccttttgcggcaatctttacattctcctccctgttccaatatcctgtgtttatgatccccccccttttctaatctcccacatagagtgaccaccgtcgctttccgagaacaatttagaatggctcgaccccggaattatttagagagttcccaactatcaagatcaatgcagcaaagatccgggaagaagttagaaaacaaagcagtcacagagtaacccgcaactgcccttagtcctatacacctgaaatcaaatccataccaatggtgaggaagaccacatcagaggttactgcatgacagcacagctgggtcctaatctccctgccaggggtctcaactgtaactcgcgctccnaaaatgtctgcagtcagggtgcccctggattgcttcacagccctggattgaacacagagtaggcgctcttctctccctctttcttctcttcagggcctcgtgtcccgacgtacatccaatagaacaaggacaggacaaaatatgccaggccaaattccagttccacaaacagtcccagcaggaccaaccagagaagaaccttcaagaaggtgatattggtcaggaaagactggtcccagcacgacggcagaggaatggctgtgttccatggtgtctctgatgtgctgccctggggctgagcccgcttccagcatttttgtcctaatgtggaagaagctcgtcacagaattatttcaggaaactgcttttctccaagcaaaatctggtagtgggaaggaggatgtagatacttcctcatcaatgactgctgaaaagatgcagcggcattgtcagtcacagcgaggcccgggtcggggcagaggcatcattgcagtcagagcttggcccaaatggaggccgcagtggctttgttgctccaaatgacatggtttagttattttgatggccaanagagtattctttgtgcatatacattacagtttcttgatcccttcatctgt

SEQ ID NO: 262168 - DNA, 669 bp, Homo Sapiens
  misc_feature (21)..(21): n is a, c, g, or t
  misc_feature (59)..(59): n is a, c, g, or t
  misc_feature (76)..(76): n is a, c, g, or t
  misc_feature (87)..(87): n is a, c, g, or t
  misc_feature (167)..(167): n is a, c, g, or t
  misc_feature (499)..(499): n is a, c, g, or t
  misc_feature (531)..(540): n is a, c, g, or t
gcccctactctgtgttcaaancccccagctgtgaaagcccatcccccaggcacccctgnatccagagcagttgganccgcgagttancagttgaagacccccctggcagggagataggacccccagctgtgctgtcatgcagctaacctctgatgtggtcttcctcncccattggctatggatttgatttcaggtgtataggactaagggcagcttgcgggttagctctgtgactgcatagtttttctaccttctttccctgatcttttgctgccatttgatctttgatagttttggtgaaactctctaaaatacattcactgtgggtccgacgcaatttataaaaattatgtactcaagaagggagacctgtttgtttcatttctcatctgtttgggagatgattttagagcactagaaaggcactggggagattctcagcttaaaacatccagcagtttgaagtatgattaggtacatcagggctgcattgtcaatnttctctttaagtcttttaacatttatagcaannnnnnnnnncccggagagtttaggttgcaagttttgggtttcttgtttgtttttgttttgcttcctgctttaattctttaattttcagtcattactggtattgaaaaataaaatatctttaaaacatctcctcttcag

SEQ ID NO: 262169 - DNA, 671 bp, Homo Sapiens
  misc_feature (520)..(520): n is a, c, g, or t
  misc_feature (594)..(594): n is a, c, g, or t
  misc_feature (610)..(610): n is a, c, g, or t
  misc_feature (613)..(613): n is a, c, g, or t
  misc_feature (615)..(615): n is a, c, g, or t
  misc_feature (639)..(639): n is a, c, g, or t
  misc_feature (651)..(651): n is a, c, g, or t
tgccgagtgccgagcactgttctaaaagactggccttggctgaaaagtctaaggaagcattgacagaagaaatgaaacttgccagtcagaacatcagcagacttcaggatgagctgacaactaccaagaggagttacgaggatcagttaagtatgatgagtgaccacctgtgcagcatgaatgagacattatctaaacagagagaagagattgacacactaaagatgtccagtaaggggaattctaaaaagaacaagagtcgatagttttgaaatagctggttggcgactgttctttccagacctgctcctgctgcacagagccgcagggctgagaccacgtccatgctggctgccttcaggaagctaaagtattgttggacctagtaaactagtcagtgttggaaacggccttgaaatatttaaaacatatttgtaaccagtgaggcaaatacagaagttgatgtccggcagtaaatgggaaaccaatacgtatgtcatggatattgtaggttttcctnatgctgtttttactgtgcactttttaaaattaggttttttaatttccagtatgtaaggaccaaattattttgtntactttcaaactccanttntnatggtaatccgtttttgggatctntggataggtatntggttctggggaacccaatg

SEQ ID NO: 262170 - DNA, 433 bp, Homo Sapiens
  misc_feature (100)..(100): n is a, c, g, or t
tatgacttgcaatgatagaaaactccttccaattaaatggcattttataatattatgtgtgtacttcacagtgttaaaaataccctcatacgttattgcnatttgatcttcacagaaagtgcattttaaccagtactctgggtgcaataaataatatgtagaaatttaagtcctccaattccagcatatccagtgagttttgacagtgtgtttatgtggaatgtttaaggatatacaattgtactttatataaattggttcttgttcttcttaaatgtgacatgaaataattgtgctgctacattatactggaaattaacaggggaaaagggaagagctcttggctcccttgaggttctgctagtggtgttaggagtggttacaactgagcttttagtaaccatttaaccgtatgtaaacttggtttctaatt

SEQ ID NO: 262171 - DNA, 683 bp, Homo Sapiens
cggtcctaaggtagcgaggcctgggtggcgaattcggcacgaggcatggttgctgagtacccagagttgcgaggagttttttaactgatttagccaggtggcaatcatgagtgaatggatgaagaaaggccccttagaatggcaagattacatttacaaagaggtccgagtgacagccagtgagaagaatgagtataaaggatgggttttaactacagacccagtctctgccaatattgtccttgtgaacttccttgaagatggcagcatgtctgtgaccggaattatgggacatgctgtgcagactgttgaaactatgaatgaaggggaccatagagtgagggagaagctgatgcatttgttcacgtctggagactgcaaagcatacagcccagaggatctggaagagagaaagaacagcctaaagaaatggcttgagaagaaccacatccccatcactgaacagggagacgctccaaggactctctgtgtggctggggtcctgactatagacccaccatatgatccagaaaattgcagcagctctaatgagattattctgtcgcgtgttcaggatcttattgaaggacatcttacagcttcccaatgagaggccaggaagtgtggacatactgatagaaaaagactatattttatccctcataaaatgttttaaatgtaaa

SEQ ID NO: 262172 - DNA, 677 bp, Homo Sapiens
gggggtctccgctcaacgatccttcctcaaagcatggttgctgagtacccagagttgcgaggagttttttaactgatttagccaggtggcaatcatgagtgaatggatgaagaaaggccccttagaatggcaagattacatttacaaagaggtccgagtgacagccagtgagaagaatgagtataaaggatgggttttaactacagacccagtctctgccaatattgtccttgtgaacttccttgaagatggcagcatgtctgtgaccggaattatgggacatgctgtgcagactgttgaaactatgaatgaaggggaccatagagtgagggagaagctgatgcatttgttcacgtctggagactgcaaagcatacagcccagaggatctggaagagagaaagaacagcctaaagaaatggcttgagaagaaccacatccccatcactgaacagggagacgctccaaggactctctgtgtggctggggtcctgactatagacccaccatatggtccagaaaattgcagcagctctaatgagattattctgtcgcgtgttcaggatcttattgaaggacatcttacagcttcccaatgagaagccaggaagtgtgaacatactgatagaaaaagactatattttatcccctcataaaaatggttttaaatggaaaaaa

SEQ ID NO: 262173 - DNA, 400 bp, Homo Sapiens
  misc_feature (193)..(193): n is a, c, g, or t
  misc_feature (226)..(226): n is a, c, g, or t
  misc_feature (267)..(267): n is a, c, g, or t
  misc_feature (328)..(328): n is a, c, g, or t
  misc_feature (348)..(348): n is a, c, g, or t
  misc_feature (355)..(355): n is a, c, g, or t
  misc_feature (357)..(357): n is a, c, g, or t
gatcaaggtataatggaaaaatatacctattcttgaagtagtttattatagttttcaaattgatttataccattattaacctgatgtggtctgcttaaaaaatgaatatatcagtatttagaaataaattgcaaaggtgggaatatatacttaaataatttgtcttaagtaaattagcatttggtagtctganatggtgacagattacttgttaaaattgtgaaanctctgttgtgtcctctcttcctacatttgtccctgagagtnctccacgattactaggttcttgattcccttatatggcaatcaggcagaggcgttccttaangcattagaggagttcctgangcttaangnttttgttttggggttggatggagggccttagggaccagtttga

SEQ ID NO: 262174 - DNA, 903 bp, Homo Sapiens
  misc_feature (601)..(601): n is a, c, g, or t
  misc_feature (607)..(607): n is a, c, g, or t
  misc_feature (620)..(620): n is a, c, g, or t
  misc_feature (622)..(622): n is a, c, g, or t
  misc_feature (731)..(731): n is a, c, g, or t
  misc_feature (791)..(799): n is a, c, g, or t
gggagactggggcctcgctcgctcccgacccggttgcaagtgttgcggtgggagaaagtcgcgtccgcatcggaggggaagcgccgtcatgcctaagtattatgaggacaagccgcagggcgccgcgtgcgcgggcctgaaggaggacctgggcgcgtgtctgctgcagtcggactgtgtggtccaggaaggaaaatcacctcggcagtgtttgaaggaaggatactgcaactctttgaagtacgcattttttgagtgtaaaagatcagtgttggataacagggcaagattcagaggaagaaaaggatattgatgcattatgttgaagccaacatgggaaaacaacaaatattttccctgggtcattaacacaaagaagccaaaacagggaaacatactttttacttacatctgtttggttgggaccagatttcccctccgtgggaacactgaagaaagtggatgagttgttttcgaatatgtataaagtaaatgattctcttgatccaagttatttttagaagaaaaacctaattgaaccggtatgggttggggagcataataaatgtgttctggagaattgttctaaagcccccgcgancccccngcgggggtgagancnccccgtggtcggccgccctcggccccctcaagaagctttccttaaaccatttcgtttgtggggccgcgggcccccaggtagggtaaaggggaccactgggctcattagncgtcggttctccaagcgagacaccgcggggctctctgacctaaggcggcctgggcgctgnnnnnnnnnacaaataaaacccgccgccgcgcggggaaacgcagaggacggccctgtgacacacgcgccctagctgggagcagggttctgcggcccggccgcccccgctttct

SEQ ID NO: 262175 - DNA, 525 bp, Homo Sapiens
ttttttgacgagtatcatagtggtcatattgatagagcttttaatatcattgagcgcttgaagctggtgcccctgaatcaggaaagtgtggaagagagagtggctgccttcagaaatttcagtgatgaaatcaggcacaacctctcagaagtgcttcttgccaccatgaacatcttgttcacacagtttaagaggctcaaggggacaagtccatcctcgtcatccaggccccagcgagtcatcgaggaccgcgactctcaactccgaagtcaagcccgcactctgattacctttgctggaatgataccataccgaacgtctggggacaccaatgcgaggctggtgcagatggaggtcctcatgaattaagtgccatgctttgtgggagtctgggtcggcacactgtcagtacatcaggcacatgggcccactaggctggggtttctggttttgtttctgttgtgttttgttttggtttctgtattatgtatttttgtcaacgccaataaatttctttgatttgcc

SEQ ID NO: 262176 - DNA, 1160 bp, Homo Sapiens
  misc_feature (110)..(122): n is a, c, g, or t
  misc_feature (497)..(514): n is a, c, g, or t
  misc_feature (523)..(559): n is a, c, g, or t
  misc_feature (740)..(750): n is a, c, g, or t
  misc_feature (761)..(761): n is a, c, g, or t
  misc_feature (788)..(798): n is a, c, g, or t
  misc_feature (864)..(864): n is a, c, g, or t
  misc_feature (1065)..(1065): n is a, c, g, or t
agggagagggaagcggggcgccccattcgtctgcacacactatcccaagcaccgcggcctgggtggcgcatgagtcgccttcaaaactctcgtgtagggttgacaatgtnnnnnnnnnnnnnatccagcttattcttttattttcaagtccattcttggggctggtggggaggcaggagaatacccctccctaagcccttagtgtgtgccgagcttgctttgtgatgttggcaggggaggggagacctgggtggtgactgagttccctttatcaaacccttcaatgggcacaaaattgagtgcttgattttaggttttatttttttatgaatgtccaaatctgtgtttccccctgccctcccagactgtgtggccagttgaaagtgtctggtttgtgttcatctctccctcatttctggagcagggcctgagaccctgccacatctcctatgctctgcatccacgcctcttttggacattaaaggttgattgatgcnnnnnnnnnnnnnnnnnnctcgaggcnnnnnnnnnnnnnnnnnnnnnnnnnnnnnnnnnnnnngacatggtcatagctgtttccctgacccagctttcttggacaaagggggtaggatctgcccgggcctccctatagggggagcgtattaattttcgataagccagggttaacctgcattaaatggaatccgggtggcagtaaccccgggaaattttaaccccggccttaatgaaccgggccnnnnnnnnnnnggggatccaanagggaccctttcctttgaaaattcccnnnnnnnnnnnctaacaaaactaattcctggggtgggtgggccaaaccgaaaaaacaaaccgacccgcttaccaaancggcgttgactcttacgttgcgaccgcgtactcggcgaagtttaccgcccctctttctttccccaaggggtacactggggcttcgatgagggggcccaacaaatctgccaacaaacccggcgctccctccccacgggggacccccgtaaacctaaggggcccacctcctttttacaaacaacctgtgggtagaccccccgncagtacaaatatcttgcggacgcctggcatacgcgcctggccttcaccagagcgattggatgtcgccgacggggcccgcaacggatcctgcggca

SEQ ID NO: 262177 - DNA, 232 bp, Homo Sapiens
gatcttcacttaatctaagtctgtgaattacttttatattattttgaaatactccttgcagtatattggcatgatacagtaaaagcattttccacagattgttatcaccttctttaaaagaagtcaaaatttaaaaaatacaatagcacgttgttggtgtcatattcaataacatttccaatgctacatataattttatagacataataaagaaggtattgaaaaaactaaa

SEQ ID NO: 262178 - DNA, 1137 bp, Homo Sapiens
  misc_feature (32)..(32): n is a, c, g, or t
  misc_feature (330)..(501): n is a, c, g, or t
  misc_feature (701)..(713): n is a, c, g, or t
  misc_feature (739)..(739): n is a, c, g, or t
gatcaggtctgtaaatgtgtactaaaaaaatnagagtttatttataaacaaaatagtttatttaaagagaaggtctcttccttattgatatcatggtatgcattaattccatttgttactattgtgcacaaaagccctgttcacaggggaatggtgtaaacatttatactgttttgttcactgtatttagtagacataactgttgaatagttactgaatcatgatgtaaagaatatgtgaccatcttcaggtatgggatttctgaacgtttcaaatttcaatcaatgagcactgtcaacacccacaggagagaataaaattacctgtgcnnnnnnnnnnnnnnnnnnnnnnnnnnnnnnnnnnnnnnnnnnnnnnnnnnnnnnnnnnnnnnnnnnnnnnnnnnnnnnnnnnnnnnnnnnnnnnnnnnnnnnnnnnnnnnnnnnnnnnnnnnnnnnnnnnnnnnnnnnnnnnnnnnnnnnnnnnnnnnnnnnnnnnnnnnnngcagaccaaagaaaacggggggggagccccccgggaagaaaaacacccgggggagaaccccgcccgggcagaaaaacagggcgaaaaggaaaaacagggggggcggaccgcgggaaggaaaaaaagggggacccgaccaaacgcgggcccaaagaaaacacccccagccgaaggaacgcgcgcggccagtgccgcccacnnnnnnnnnnnnngccgggaggggccccacaagaaatancggaccaaaacgcggagggcgggcgaaaccggggaaaggaggggggcggcgaacacacccaaaagggccccccgcgcccgaattgaaattcctctcgataaagacaatttgcgcccatgtgaaaataaaccggggggcgcgtaaaagaaaccctgctcccaaaatttggggcccggcggttaaaaccccccacccctggggagaaagggggggcggggagggaataaagcccttgtctccctaaaaaacaccactttacttccgaaaaaacgcggggcggagaggaaaacacacccgcaaggggtgtttagaacgcggtaagcacaaaaacaattttttgtcccacacaaatccctgtggcaacaaaacaagagccgggagtttcctctcccccccca

SEQ ID NO: 262179 - DNA, 934 bp, Homo Sapiens
  misc_feature (44)..(287): n is a, c, g, or t
  misc_feature (476)..(527): n is a, c, g, or t
tgtacggtccggaatcctcgggatatcgtcgacccacgcgtcgnnnnnnnnnnnnnnnnnnnnnnnnnnnnnnnnnnnnnnnnnnnnnnnnnnnnnnnnnnnnnnnnnnnnnnnnnnnnnnnnnnnnnnnnnnnnnnnnnnnnnnnnnnnnnnnnnnnnnnnnnnnnnnnnnnnnnnnnnnnnnnnnnnnnnnnnnnnnnnnnnnnnnnnnnnnnnnnnnnnnnnnnnnnnnnnnnnnnnnnnnnnnnnnnnnnnnnnnnnnnnnnnnnnnnnnnnnnnnnnnnnnngcacgtgaccttatgaggctctcgctgtattgttattttaaggactataaagagtttgatttaaaattatgcagggcccctatgtgggattttttaaaaagcaaactggtgtgtattctcatgtggtttgcacagcccagcctcacagcactattgtaaaccctgctctttctgtctcgctagacagannnnnnnnnnnnnnnnnnnnnnnnnnnnnnnnnnnnnnnnnnnnnnnnnnnnacagctgaaaccaaccagcaagcccttgatgaccaagaggcgtttctttcaaagctatagggcacaaacgaattgaccatagatgactccgtttgcattcttctgcagaattatttccttcagggacagattttccaacctaagaaactacctaccgtgtgtattctcttgacggggagagatgaacccttcagctgctaagatccaagaaaacgcctcactgccttaaccttaactgttcttcctggcgctaaaaagagctgtattttttaaagtgctggggcaaacaaagcaaccccaaaagagttgatgtgtgttttaaaagaaaaaacccaatgaggaacaattggagatttttatgcagaaactaaataatccttaataaataaatctctattttggaatcc

SEQ ID NO: 262180 - DNA, 992 bp, Homo Sapiens
ggggcctgccgtgtagtcgccgccgtcgctgccgctgccgctgccgccgtcgttgttgttgtgctcggtgcgctgagctccgcggctccgcgagccggttccgtccccttcccgccgccgccatgaagtggatgttcaaggaggaccactcgctggaacacagatgcgtggagtccgcgaagattcgagcgaaatatcccgacagggttccggtgattgtggaaaaggtctcaggctctcagattgttgacattgacaaacggaagtacttggttccatctgatatcactgtggctcagttcatgtggatcatcaggaaaaggatccagcttccttctgaaaaggcgatcttcctgtttgtggataagacagtcccacagtccagcctaactatgggacagctttacgagaaggaaaaagatgaagatggattcttatatgtggcctacagcggagagaacacttttggcttctgagggccattgctgggctaggtgcaccgtaactgcttgtgtatcttgtaaatagccagccattttcagttattataccagaacctcttcacatagacctattagtgcatttgtaactggatttatttcttaatatattggaaggttttgtttccttagactagtaaattatcatacagagttttattttgagtttttctttttgtgcattgtcctcatgccctgtattctccaggaaacttgtccttctggaaatcatattgaatgatatttctatatcgaagtgaggtaggtgcggtattaaagtgaaagggaaggtgatgcatttattctgggttatgcttgaagtgttagatggctaagtattaaaattatccaaattaaatccttagcagtcagaacacttgcttcactagaatatgccaactgccaatcatgttggactgagctaatttgttcctctttctgaaactattaaggtaaataattaacaataaaaaattctcttgataaagggca

SEQ ID NO: 262181 - DNA, 245 bp, Homo Sapiens
gtaaaaatggtatacatgaaccaatacaaaatgcgaatgggaacatatggatatggagtttcttacactgtaacattgtccatgtacaccttaaaaacagaactggcctaaagggaaaaataagacgtcggtgtgactaaagaacaagcttatttggcatcaattatacatccttcattattttatattcctttaaaaaacacaaaaaacaagtttgttctttcttcactctaaaaaaagtgatc

SEQ ID NO: 262182 - DNA, 845 bp, Homo Sapiens
gtgatctactagcagaattgggcccaaagagaaagaatttctgaggctgggtttcttctgggagggtagcaggttggtcttggccagtgctctgtttcccaccagtgttgttcccttttccagcttgcctggcccggctctgtcttccagggtcctgctccagacccctctgcctggggtctcccctccatccagggggttctgggcatcacagctccttttttttcctttctcctcttccagatccagtttcagctggtttgcttcttccagcaggcacccttaggcccaggagcagctcccctgagagaatttgagtcactcatttccttgaacagcacccccctttatactagcagccatttgtgccattgcctgtgccctagggtttgtggggagagagcgagggatcactgagcagttttcccagagctccatgggaaggcaagctctccctcccaatgggagccccactgtcactaactgtaaactcaggctcaggcttcaactgcctacccccatcctcatatttctgtctgtcccagcacctcaggagcattctcattgtggccggctaactccgcctggatgtgaacaggcaagcacagtgggaaatgagtcacgtacttgtattgcacagtggacacctctagaggtccattggtttaaagggatagggaaggaggagggatgagaccatcaccccctcccagaagtaaatctagtatctgagttttctttatgcccttgagtcaaactaataactgtctagtacggaggtgtttgctggttttcttcggtgttttttctaatgcaataaactcatttctgcctgctgcaaaaaa

SEQ ID NO: 262183 - DNA, 1252 bp, Homo Sapiens
  misc_feature (643)..(643): n is a, c, g, or t
  misc_feature (971)..(980): n is a, c, g, or t
  misc_feature (983)..(983): n is a, c, g, or t
  misc_feature (985)..(986): n is a, c, g, or t
  misc_feature (1029)..(1029): n is a, c, g, or t
  misc_feature (1032)..(1032): n is a, c, g, or t
  misc_feature (1038)..(1048): n is a, c, g, or t
  misc_feature (1059)..(1059): n is a, c, g, or t
  misc_feature (1062)..(1062): n is a, c, g, or t
  misc_feature (1073)..(1073): n is a, c, g, or t
  misc_feature (1088)..(1088): n is a, c, g, or t
  misc_feature (1090)..(1090): n is a, c, g, or t
  misc_feature (1099)..(1099): n is a, c, g, or t
  misc_feature (1108)..(1108): n is a, c, g, or t
  misc_feature (1123)..(1123): n is a, c, g, or t
  misc_feature (1143)..(1143): n is a, c, g, or t
  misc_feature (1177)..(1177): n is a, c, g, or t
  misc_feature (1181)..(1181): n is a, c, g, or t
  misc_feature (1212)..(1212): n is a, c, g, or t
ggggctgccattgtcaaagagaagggaaccgtatacttcaagggaggcaaatacatgcaggcggtgattcagtatgggaagatagtgtcctggttagagatggaatatggtttatcagaaaaggaatcgaaagcttctgaatcatttctccttgctgcctttctgaacctggccatgtgctacctgaagcttagagaatacaccaaagctgttgaatgctgtgacaaggcccttggactggacagtgccaatgagaaaggcttgtataggaggggtgaagcccagctgctcatgaacgagtttgagtcagccaagggtgactttgagaaagtgctggaagtaaacccccagaataaggctgcaagactgcagatctccatgtgccagaaaaaggccaaggagcacaacgagcgggaccgcaggatatacgccaacatgttcaagaagtttgcagagcaggatgccaaggaagaggccaataaagcaatgggcaagaagacttcagaaggggtcactaatgaaaaaggaacagacagtcaagcaatggaagaagagaaacctgagggccacgtatgacgccacgccaaggagggaagagtcccagtgaactcggccccctccccacatgggctttcccccaacntcaggacagaacagtggtttaatggtaaagtttggttaatagtctatgtggattctggaaggcaaatgggcaaaacaagtagcttccccaaaaacagcccccctgctgctgcccggagggttcactgaggggtggcacgggaccactccaggtggaacaaacagaaatgactgtggtgtggagggagtgagccagcagcttaagtccagctcatttcagtttctatcaaccttcaagtatccaattcagggtccctggagatcatcctaacaatgtggggctgttaggttttacctttgaaactttcatagcactgcagaaacctttnnnnnnnnnntgntnnatgaatttttcctttcctacagttgggtagggtaggggaaggnggntaagcnnnnnnnnnnnaaatgactgangtnctataaatgtngtctgttgcattttnanccaacagancccacagtngaggggtctcatgtntccccagttccacagcagtntcacagacgtgaaagccagaccctcagaggccanttgnttgctgacttagcctcctcccaaagtccccnttcctaaggccagccttccttttggggagtgggttttttt

SEQ ID NO: 262184 - DNA, 988 bp, Homo Sapiens
  misc_feature (978)..(978): n is a, c, g, or t
ataacccctagtctggaatctttgtgaagcatagggttattgcaaggcaaatgggaactaacacatcttgccatttgaatcagggtctccagtttctagaaaaggcagacactggttgggaccaaagtctccatggcacatgactgaagactggtggtcgtgtgtgtgcggagtccacggaagcctcggggaggtggagctgctccttccattccgtcagacagtgatctgaaaacatgtagagaagatgagttgaggacagcttttctaaggcaatgtgatgtctttgctttcttatttctctttctctgcgttgttagttttgaagagtggaggagctaggggctccagaaagaatcttacacatgtgttgaagacattgatgtcatagggagcggggagctgcattcccttctgggctgttactgctaaatctcagtatgaacagaccaggcggaaagcttggtggccaagcagtctgtgtgcttccccgctgatggagaacgttgcgttgttcacaataagggcctcatgggtgtagcccgcatgcagaccccattgctggcgcactgccttgtttgccgtctgtcttcaagaactgccgctctgttaaactgtccaatgtggtactaccctggttgtttttagaccagtaatgttttgttccaaattaggattcgtttccgagagttttgcaattgtaatgccacaaggcaattaagtctgtattaccaaaccggcgtggaccttgaccagttgatgtgatccttatcaggaggaaagtgctgctgtctttagagccgacagttgtaccctgcctaataagaagttccatctctgaaaaagagagattatgagcggcgtccccttggggatatccccggggaaagtgggaggagacttggccctcgggaaacggccccacgtggaaccccccaggcgcggagacggtttttcgcaagacggtccaagaggggngcgcttagcc

SEQ ID NO: 262185 - DNA, 1280 bp, Homo Sapiens
  misc_feature (452)..(454): n is a, c, g, or t
  misc_feature (457)..(458): n is a, c, g, or t
  misc_feature (460)..(460): n is a, c, g, or t
  misc_feature (467)..(574): n is a, c, g, or t
  misc_feature (576)..(576): n is a, c, g, or t
  misc_feature (592)..(592): n is a, c, g, or t
  misc_feature (639)..(641): n is a, c, g, or t
  misc_feature (656)..(670): n is a, c, g, or t
  misc_feature (709)..(718): n is a, c, g, or t
  misc_feature (721)..(729): n is a, c, g, or t
  misc_feature (822)..(822): n is a, c, g, or t
  misc_feature (971)..(971): n is a, c, g, or t
  misc_feature (1020)..(1020): n is a, c, g, or t
  misc_feature (1023)..(1023): n is a, c, g, or t
  misc_feature (1158)..(1158): n is a, c, g, or t
  misc_feature (1252)..(1252): n is a, c, g, or t
ggagattcttcagcttgatcctggaggtcttttctagtctgagcttctttagctaggctaaaacaccttggcttgttattgcctctactttgattctgataatgctcacttggtcctacctattatccttctacttgtccagttcaaataagaaataaggacaagcctaacttcatagaaacctctctatttttaatcagttgtttaataatttacaggttcttaggctccatcctgtttgtatgaaattataatctgtggattggcctttaagcctgcattcttaacaaactcttcagttaattcttagatacactaaaaatctgagaaactctacatgtaactatttcttcagagtttgtcatatactgcttgtcatctgcatgtctactcagcatttgattaacatttgtgtaatatgaaataaaattacacagtaagtcatttaaccnnnaannanaaacacnnnnnnnnnnnnnnnnnnnnnnnnnnnnnnnnnnnnnnnnnnnnnnnnnnnnnnnnnnnnnnnnnnnnnnnnnnnnnnnnnnnnnnnnnnnnnnnnnnnnnnnnnnnncnaaccccggaacagccncctctacggccaggccgcccacccacgcaggaacaagaagaaggagnnncttggggggggccgnnnnnnnnnnnnnnngacaaaaattttttataaaaccacccctccctgggtgcnnnnnnnnnncgnnnnnnnnngttggcacgatagaacaaccacgacggttgcctcgctctgtcctctccctccctcacagaagaaacaaccacccccgcgcgggagacacaaancaccgtggggcgcgggtgtgcgatacctcccaccacacccagatagaacaaaaaacacacacccgcccgcggcggcgcgaatcacaaccacgcatggaggtctcctctatagtacaacacacaccacgatagagaaggggcgcggcgtncgttgcggaggggaagccgcacaccggacggagggcgcctcaacactcnacnagaggaggaagcgcgtccgcactcgacgcgaccgcgtctcgctccccacataatacatatgatcgtctcctcgcgccgccgctggcactgggtctcataattagtggaggagaacaacgacgcgtgtaggagtgnttatatatataaataagacactctcacacgcctccgagccaagcgtgtggaaacatacactcatccacgcagaggcggcgggagacatgataantcgttgctaccgctgctccacccctcta

SEQ ID NO: 262186 - DNA, 1077 bp, Homo Sapiens
  misc_feature (797)..(846): n is a, c, g, or t
tcgtccccttgtgtaggacgactgtcccacgatggtgtccttctcaccagttgggcgtgggtcggctaatggaaaacctctgtgacgtgagaccatctcctagagggttcccgttcttcacgcctacttgtctttcgctcggaggcatcttctacgacgtaaacttcctccaatggtactaactctagaggctctatgggttctgtgtttcggctcatgaagctctagagatatatctagttggcatcccttcccctacttgccctcctagttgtaatacacatatgacaattctgtggataatgcgaaagctacttctccttggtgttttcttagatagatttatcgtcagcttttacccctaattctgtccccctaaggtcacacgtcgagtacgttatcacgagtcaaattagagcgatctccaacggcactgtggatccaggccctgacttgccctatagtgtgaataggcaaatatggagactctggaatatgaagacatctcgagagagtctactagcaccctcgacaaggatgtctcgagacgtatagtgagtctgtcccttccagagttggcacgagtcaaccacttcatgcgtcacatagagtaccctcctacttggcaaaggacccaaggtgcgtccttcctacgatttttgtcatgcagcattaaagaaatgtccactattaaaacaatagagacaaagccattattaccgaagtacggatatatgcaaactaaatgtctattaacatatttgacaggaggactatagtgtaaagaagatagatannnnnnnnnnnnnnnnnnnnnnnnnnnnnnnnnnnnnnnnnnnnnnnnnnaataagtcgacataaagtctttaattattgagcaccttacccaaacataacaataatcccattatcctatttggcaacacccacaaagatcgcatctgttaaacaggtacaagttgacatgaggttagtttaattgtacaccatgatattggtggtatttatgctgttaagtccaaacctttatctgtctgtaattcttaatgttgaataaactttgaatttttccctttc

SEQ ID NO: 262187 - DNA, 533 bp, Homo Sapiens
  misc_feature (172)..(180): n is a, c, g, or t
tgtttaaaaggaagatatagaaatatggaatgcttatacagtattatttcatagtttttttaaatgtcatgtttctaatgtttagataatcttgaaagaaattctcctcacttaccctttatcctccatctttcatcaaaggaaaaaaaatcaaagcagtacaagtactccnnnnnnnnncccccaattaatccaagttccttagaaatgttgctgtttgggtgagaattctactgattatcccgacttcacagccagcaatgacactttcagcagaaagttttcttggcataaactctttagttctcagactgcttactcataagttcttcttgagaacttgtcagcgacgcaatctgttttgtcttgaagagcacaagactcagacggttgtcactttggggagagcacatagcatctcaaacagcaggttagccgccagcagggctgtgttcccagaaagatcatacggtggtgaaacttcgacaagatcacagcccatcacgttcaggccttgacaacccctgatgatc

SEQ ID NO: 262188 - DNA, 311 bp, Homo Sapiens
gcaggaagtgcattctctggtccttccctattttctgttctggatgtcagtgcagtgcactgctactgttttatccacttggccacagactttttctaacagctgcgtattatttctatatactaattgcattggcagcattgtgtctttgaccttgtatactagcttgacatagtgctgtctctgatttctaggctagttacttgagatatgaattttccatagaatatgcactgatacaacattaccattcttctatggaaagaaaacttttgatgatgaaacaataaagattttaaatatctattttt

SEQ ID NO: 262189 - DNA, 123 bp, Homo Sapiens
gatctgaaaaagaacactgtgcgagattgtattcctgcttatcctttccaagttagtaggcagattggaactatagaatttatccgtgataataataaagtccgcataacttttgtcctgaaa

SEQ ID NO: 262190 - DNA, 1332 bp, Homo Sapiens
  misc_feature (33)..(33): n is a, c, g, or t
attcggcacagcgaatcccggcggccgaggcgntaagagcgtcgcctcctcccggggaaccgcgtgtgaccttccagcccgcggaccgatgctgccggcggcgctcgccccctgtggctctggccttgggcttcgggccgctgcgttccgccttgccaggcgacaggtgccatgtgtctgtgccgtgcgacatatgaggagcagcggccatcagaggtgtgaggccctcgctggtgcacccctggataacgcccccaaggagtacccccccaagatacagcagctggtccaggacatcgccagcctcactctcttggaaatctcagacctcaacgagctcctgaagaaaacgttgaagatccaggatgtcgggcttgtgccgatgggtggtgtgatgtctggggctgtccctgctgcagcagcccaggaggcggtggaagaagatatccccatagcgaaagaacggacacatttcaccgtccgcctgaccgaggcgaagcccgtggacaaagtgaagctgatcaaggaaatcaagaactacatccaaggcatcaacctcgtccaggcaaagaagctggtggagtccctgccccacgaaatcaaagccaatgtcgccaaagctgaggcggagaagatcaaggcggccctggaggcggtgggcggcaccgtggttctggagtagcctccagctcggaggacttgtgttcaggggtcctgggccccggggcgaggtcccgccctcccgtggtcactggctccgcccccagcaccaggcgcccagtggagccgtttgggagaattgcctgcgccacgcagcggggccggacaggccgcacagacctactgtggcgggagggaggggcggctgctgcctggtgacggcaccaggatgcccaccaggacgcgccaccggtgaatgtgcctctggtggctgctgagaaaaaacactgggcagctcaaaaaagcctttgaacttcaacttgccaattcagataacaaccccctgggaaaggcaagaaatcaacaacagggggggctgccctaagaatatcctctcgggagggccccaaccttaacccggtacctaggctttcttgttaaaaaaggagggccccattaaggaagtctatattattaaactaagacacttggccggccgacatttcacccctttgtggaacggggaaaaacccgcctaacctggggaaacgtttcggagaaggaaaccactaactcctggcgccggggcgaaaacatttgggccgaaccttaccgctaaacaaagatttaacaccgccctagggacgaaatgatcacaaatcgtctcgtaag

SEQ ID NO: 262191 - DNA, 545 bp, Homo Sapiens
  misc_feature (306)..(320): n is a, c, g, or t
agaaagagttgtgcattatatctggtatatctgttgtttaaaagaccttcgattcgatctaaagagacacttagagactcttggggacctcagatttccacccctccacagcattctgcctacacagttcccctcatttttcctagttactcggaagagcgctggacttgaaatcaaaataattgcgttatgtctttggttatgtcgcttcatcatagcactttctaaaactatttgacaaacatgtattgcatacctactgcattccagttcttgtacaagtaattaaatgctcgactaacgtcnnnnnnnnnnnnnnngacctctgcatctcctttaaaagaaaccccactctctgaattaaaaaactgtcctccccaacttcctaactcaaggccaaatattgtttgtggcccccccggccccctaaaaattttttaaaaccatttctttgggcgccgggccccttagggaaattaaccagggacatagcttgtttcccagggaaaccctggcaattaacaaagggtttggatttcctcccc

SEQ ID NO: 262192 - DNA, 1143 bp, Homo Sapiens; identical to SEQ ID NO: 13799
  misc_feature (260)..(318): n is a, c, g, or t
  misc_feature (918)..(918): n is a, c, g, or t
  misc_feature (920)..(1037): n is a, c, g, or t
  misc_feature (1039)..(1069): n is a, c, g, or t
  misc_feature (1078)..(1078): n is a, c, g, or t
  misc_feature (1082)..(1082): n is a, c, g, or t
  misc_feature (1092)..(1092): n is a, c, g, or t

SEQ ID NO: 262193 - DNA, 379 bp, Homo Sapiens
  misc_feature (21)..(21): n is a, c, g, or t
acctccactccaatgatgaantttggcttggtgataatcataccccacagaaactagatggctgtagttctccaacatcacatccccgtatgctatcttctcatcagggtccagttgctgccactcctcctgggtgaaatccacagccacatctttgaatgacactggcccctgcaatgtgttcattttctgctgctcttggaaacttgcagagactgtggctgatagacctagaggggcagaagcaggtcactgaagtcatgagggctccggcctgcaaaggcagaaatcacctgcataagaaccgcaaaagaaagctcaataggctaacaccctgtgaacactcaacctgcaaacactcagaagggtctaaaagagt

SEQ ID NO: 262194 - DNA, 861 bp, Homo Sapiens
  misc_feature (367)..(367): n is a, c, g, or t
  misc_feature (373)..(373): n is a, c, g, or t
  misc_feature (840)..(840): n is a, c, g, or t
tgtttgaagttgttacttttgtttacagcaaagtttgatgtagtgtgcagtagtgagctctagactgatctttttctaaatcagaaagtgattaaagtatgcacaaccaaaggcaggtttttctttttcatttattcagcaactatttattaagcatcaactctgtgccaggcacgttactagctgctacatactgtctgaacatgacatacggttaagtaactttacaattattatcaaatacttcaatgtagatatttcttaagttgaaatagcattaactaggataatgctttcatgttattttatttgtcttgtgatagaaattcaactttgtaccatcttaaaactaggttgctataaaaantagganggatgaagtcaataaagtttatgccagtttaaaaactggaaggaaaaggtaagagctctccattataaaatagttgcattcggttaatttttacacattagtgcattgcgtatatcaactggccctcaatgaagcatttaagtgcttggaattttactaaactgacttttttgcaactttgggagatttttgaggggagtgttgaaaattgccaaacactcacctcttactcaaaacttcaaataaaatacacattttcaagagggagcaccttttatatttgataagttttcattataaaccttataataccagtcacaaagaggttgtctgtctatggtttagcaaacatttgcttttctttttggaagtgtgattgcaattgcagaacagaaagtgagaaaacactgccagcggtgattgctactttgagtagttttttacaactaccattttcccctccatgnaaatatgtgaaaaattatttc

SEQ ID NO: 262195 - DNA, 360 bp, Homo Sapiens
ggtttacatgcatgactccctttaatcttcacaattaccttcaaagttaccatgatgccagttttacagatgaggaaactgatggtcacagagattgtctcttagaatgccaagtcgaagcctttcacttggaagctgaggaacctcaggcccaaagcgctcaggggtcttgaactagtcgacagagctagcctcgttaccggcccacttaggatgtttccagttctgcttttggctgaaggcacactcattgtacaaagtgaggaggcaagacaggtgcacagagcatagctttgtcccatctcaggagccctggggttccatcccagctcctgatcccaagagatacgtttcccggga

SEQ ID NO: 262196 - DNA, 512 bp, Homo Sapiens
agtaacagtgtatgggacttcacatcagttctccttattgattgttagttggatccctctggttctttggttgtaaacattttctataattaggaaatgcccatttaagagtgagagaggtatatatctatgagccattgtgtttggtgttttacaagaactttaccatactggtgtgtagtccattctgtacagtttaaaagtgattcacgatttgcaggctttttatcagatcacaaaaaaatcagtctttaagcatttgcttggtaaggtttcttaagattaggtttataatacaaccatctgtaatgtatctctcgtttgagcttgtgggccatacaattcattaactagatgaatacattgtggacagcatcctcactacccctctctactcactcacaaagaaccatgatacactggaatgtttttctctggaatcctctttctactcttgtattaaaatttttccccacttcatgattatattcaaaataaacaactacatcatt

SEQ ID NO: 262197 - DNA, 523 bp, Homo Sapiens
  misc_feature (12)..(12): n is a, c, g, or t
  misc_feature (48)..(48): n is a, c, g, or t
  misc_feature (77)..(77): n is a, c, g, or t
agaatgtgtttnaatatagtatggtatatcccttaattacaattattntataatcccttacagaaaacatacaaatnaaaagtccttaaaagaataaacctcatttaaatgtaaagcatcatactattctagatgtctgccagtgtatactacattactaatcaaccactacttactctgaaattgaggtaacacagcctgaggcaacaaaatgctctgacaattactgaaacggtttatctcctttcacaaagcaaatcaaaagcaatgacattacacaacaaaataagcaatttaagttttaagaaaagcggtacatgatacagaaatagactgccaaaaatgaaattgccagtaatataaatttctctcactttgttatattgtatataaaaaaggacactaagcggcaaaattatccaactgtagatgtcaaatatttaatgaggtctaaacttcagagtgacaaaaacacccacccaactctacatctctatcaaaacaaatatattatgtaagaaag

SEQ ID NO: 262198 - DNA, 773 bp, Homo Sapiens
caggtgcggggacagggtgggccgcactcatcaaacacgaagccacgctccagggggcagcctaccacacacagcgtggggcctcgccaggtaggtgtcactcctgcctggcgacagtgactggcgtaggcttccagggcatcacagaggcaggcatcagcggaggagccagggccacaggcacacaggtcatacacacaggcggcaaagaagggctccggtggcaccacagcatggcagcgactgaatggggaggacttcagcaccccacaccgggcattggcctcacgcctggcacggtaacctgctgcccggcacggatccacctctcggcctgcagaacagggccggccaggccacagcccctctgagacctgccagctattcccaaacgcagcctccgagggcaggagcagcccctcagggccctgcagatcgtcctgggcaaagccattgaagttcccacagagcccacaagtccggccctggtaggagccaggtacgctcacctccacctgggactgcccatcccacagcacctggagcccgggctgggcgtgcaggatcacagtgtgtcctcgcagctccacatacagcagcggctcctgcaggaagggcaaggccaccgggtgcccatccaccgtgactgccccgtcctgcagcagccgcacggccatgtctcacagcagcaccgccacctcctgggtccaggccacaccgctccggccccggtcatcattggtcacgtgcacactgaagcccccgctgtggca

SEQ ID NO: 262199 - DNA, 694 bp, Homo Sapiens
  misc_feature (45)..(45): n is a, c, g, or t
  misc_feature (83)..(83): n is a, c, g, or t
  misc_feature (98)..(117): n is a, c, g, or t
  misc_feature (138)..(138): n is a, c, g, or t
ttcgaccaaagaggttagaaaagattgggtctaggatatggtggntggaccaggggcccccgggactttggaggggttggtcntcttgccttcctggnnnnnnnnnnnnnnnnnnnntgccagtgaaagacaaactgncaaatcagccatgtgctgccgtgcctgtggaatctggagtgaggggtaaaagctgatctggtttgactccgctggaggtgggcccctggagcaggccttgcgctgttgcgtaactggctgtgttctggtgaggccttgctcccaaccccacacgctcctccctctgaggctgtaggactcgcagtcaggggcagctgaccatggaagattgagagcccaaggtttaaacttctctgaagggaggtggggatgagaagaggggtttttttgtactttgtacaaagaccacacatttgtgtaaacagtgttttggaataaaatatttttttcataaatttgctgctatggctcctggttggggcgttggtggcctccctgggtgatgggaacccctgggagctggttgttctgttccttcccgcgtgcatgcctgatgctgtcatttttagtcttaaattttaactctgcccgctttgctgtggttttcagggtgctggccacccctggaatactgtcaatgcttctcaagaagggtaaggagcccagtttaaggggg

SEQ ID NO: 262200 - DNA, 494 bp, Homo Sapiens
  misc_feature (145)..(145): n is a, c, g, or t
  misc_feature (193)..(193): n is a, c, g, or t
  misc_feature (437)..(437): n is a, c, g, or t
  misc_feature (451)..(451): n is a, c, g, or t
atactatcttaaaaactgggaacaaatactccctcaccctgggtctctgtgtgcataaagaggcaaaggcacgtactgtttctctacatacggggtcaacattccactaataatagcaaatctccctttattatagatattaganctctattgccacttgggcaagtcaatcaagagggcttagacgacagcngggcaaattttaatgtgtttatttctacaatttctttttattaaaagtcttgtgaaaaaacggaatcctataaatagtaaaaagggagaaacagtgctccatggcctgaagcaaatggtgtcaatacatgtgtaaacaaggtaagactgctcggactattaaaagcacaaaaataaaactagtcacagatagcaagacttcatttcaggagttgggagtgggaagtaggaagtgtttaatcccnagttttggtgcccnaaaatggctagtagtatagttaattctcaattctctagctgtg

SEQ ID NO: 262201 - DNA, 770 bp, Homo Sapiens
gggactgcggatccagacagtgaaatagctacaaccagcctaagggtttctctactatgtccacttggtaaaatgcggctgacaattccgtgtcgggcccttacatgttctcatctacaatgttttgacgcaactctttacattcagatgaatgagaaaaaaccaacctgggtttgtcctgtctgtaataagaaggctccatatgaacaccttattattgatggcttgtttatggaaatcctaaagtactgtacagactgtgaatgaaatacaatttaaggaggatggcacttgggcaccgatgagatcaaaaaaggaagtacaggaagtttctgcctcttacaatggagtcgatggatgcttgagctccacattggagcatcaggtagcgtctcaccaccagtcctcaaataaaaacaagaaagtagaagtgattgacctaaccatagacagttcatctgatgaagaggaagaagagcccatctgccaagaggaccctgtccttccctatctcccacatcaccactaaataataaaggcattttaagtcttccacatcaagcatctccagaatcccgcaccccaagccttcctgctgtagacacaagctacatttaataccctccctcctcccagaactataggccatcctttttccacatgaaccccccatggcctttacggactttaacaaggaatttagaatttccctttccctttcccttaatccagggagaaccaatcccgcaatttacaaaccaaccttcccc

SEQ ID NO: 262202 - DNA, 302 bp, Homo Sapiens
tgatactctcaacaacctagatggacctcaaaataattcggtttaatgaatgaagccaaacttaagaagagtacattgtatgtacttggagaactaacttcttgcaatagatttttaagcactattaggagcatatgacttaaacagtttttaaaagtcagggagtaagtatgcttaaataaaatacaatctgtgaaacaaatctctgaattattatcacttcactggacactctaacttgaccatatttctgactttaaatgtaactcactcttattcccgtagtcacatgtttgctttgc

SEQ ID NO: 262203 - DNA, 454 bp, Homo Sapiens
tgctgtagctccacattcctgtgcattgaggggttaacattaggctgggaagatgacaaaacttgaagagcatctggagggaattgtcaatatcttccaccaatactcagttcggaaggggcattttgacaccctctctaagggtgagctgaagcagctgcttacaaaggagcttgcaaacaccatcaagaatatcaaagataaagctgtcattgatgaaatattccaaggcctggatgctaatcaagatgaacaggtcgactttcaagaattcatatccctggtagccattgcgctgaaggctgcccattaccacacccacaaagagtaggtagctctctgaaggctttttacccagcaatgtcctcaatgagggtcttttctttccctcaccaaaacccagccttgcccgtggggagtaagagttaataaacacactcaccaaaagttaaaa

SEQ ID NO: 262204 - DNA, 871 bp, Homo Sapiens
  misc_feature (507)..(521): n is a, c, g, or t
  misc_feature (641)..(641): n is a, c, g, or t
aaaaaatcatctattttgatgcagcatttgataatgataaaacacctcacacctcactctttatagtgcacaaaatgaatgaggtctgggctaggtagaaaaagggtcaatgctatttttgtttttagaatcattacccttttacccagcttttaaccatctgatatctatagtagacacactatcatagttaacatagttaagttcagcacttgtctcattttaatgtaaagatttgcttccattttcctacaggcagtctctctcttcctcacagtcccactgtgcaggtgctattgttactcttacgaatattttcagtaatgttattttcttctaagtgaaatttctagcctgcactttgatgtcatgtgttccctttgtctttcaaactccaaggttcccctgtggccctctcccttaccctgggaaggcctcttggagaccttacccctggctgtttggactttgtatactttaaataatttaactacccttaattacttnnnnnnnnnnnnnnngctttatggattttcataaacttatttgcctgattttaatgggattggttaaatttcccgccctggcaggttttaatttttatggtttaagaatagggggcttggggcccagggaaaatnctcaggaacgtgccccccgcagcgcagagagtacattggggcggtcccgaccctccgccccctccaagaaaagccttctcttaaaaaccatttccctttggggggcgcgcggggccccccccataccgttaaacggaaacacgtgggcccaaggccgtggttttccccagaggaaagaaccccggggcgcctggaacccagaggccgtgggggattctcccccaccacac

SEQ ID NO: 262205 - DNA, 1096 bp, Homo Sapiens; identical to SEQ ID NO: 77548

SEQ ID NO: 262206 - DNA, 1575 bp, Homo Sapiens
  misc_feature (1472)..(1472): n is a, c, g, or t
caggacgcccggggcatggtggagttccaggagggcgtggagctggtggacgtacgggtgcccctctttatccggcctgaggatgacgacgagaagcagctgctggtggaggccatcgacgtgcccgcaggcactgccaccctcggccgccgcctggtaaacatcaccatcatcaaggagcaagccagagacgtggtgtcctttgagcagcctgagttctcggtcagccgcggggaccaggtggcccgcatccctgtcatccggcgtgtcctggacggcgggaagtcccaggtctcctaccgcacacaggatggcaccgcgcagggcaaccgggactacatccccgtggagggtgagctgctgttccagcctggggaggcctggaaagagctgcaggtgaagctcctggagctgcaagaagttgactccctcctgcggggccgccaggtccgccgtttccacgtccagctcagcaaccctaagtttggggcccacctgggccagccccactccaccaccatcatcatcagggacccagatgaactggaccggagcttcacgagtcagatgttgtcatcacagccaccccctcacggcgacctgggcgccccgcagaaccccaatgctaaggccgctgggtccaggaagatccatttcaactggctgcccccttctggcaagccaatggggtacagggtaaagtactggattcagggtgactccgaatccgaagcccacctgctcgacagcaaggtgccctcagtggagctcaccaacctgtacccgtattgcgactatgagatgaaggtgtgcgcctacggggctcagggcgagggaccctacagctccctggtgtcctgccgcacccaccaggaagtgcccagcgagccagggcgtctggccttcaatgtcgtctcctccacggtgacccagctgagctgggctgagccggctgagaccaacggtgagatcacagcctacgaggtctgctatggcctggtcaacgatgacaaccgacctattgggcccatgaagaaagtgctggttgacaaccctaagaaccggatgctgcttattgagaaccttcgggagtcccagccctaccgctacacggtgaaggcgcgcaacggggccggctgggggcctgagcgggaggccatcatcaacctggccacccagcccaagaggcccatgtccatccccatcatccctgacatccctatcgtggacgcccagagcggggaggactacgacagcttccttatgtacagcgatgacgttctacgctctccatcgggcagccagaggcccagcgtctccgatgacactgagcacctggtgaatggccggatggacttttgccttcccgggcagcaccaacttccctgcacaggatgaccacgaccagtgctgctgcctatggcacccacctgagcccacacgtgcccccaccgcccgtgctaagcacatcncctccacccctcacacggggacttacaaactcacctggaaccccgctcagaaaacacttcacaacttcggaccaacaactggcccccagggggaacttacctc

SEQ ID NO: 262207 - DNA, 2464 bp, Homo Sapiens
  misc_feature (2250)..(2250): n is a, c, g, or t
  misc_feature (2366)..(2366): n is a, c, g, or t
aacgagacgtgttggcaatactacggcaccgccaacacctcaggcaacctcagcctgacctggcatgtcaagtcgctgcccacgcagaccatcaccatcgaactgtggggctacaaagagacaggaatgccctactcacaggagtggactgcaaagtggtcgtacctgtaccccctggccacacacatccccaactccggctctttcactttcaccccaaaacctgctcctcccagctaccagagatggcgagtgggtgcacttcggatcatcgacagcaaaaattacgcagggcagaaggacgtgcaggcgctctggaccaacgaccacgcactggcctggcacctgagcgatgacttccgagaggaccctgtggcctgggcacgaactcagtgccaggcctgggaggagctggaggatcagctgcccaacttcctggaggagctgccggactgcccctgcaccctgacccaggcccgggctgactccggccgcttcttcacggactacggctgtgacatggagcagggcagcgtgtgcacctaccaccccggggccgtgcactgtgtgcgttctgtgcaggccagcctccggtacggctcaggtcagcagtgctgctacacagcggacgggacgcagctcctgacagctgactccagcggcggcagcactcccgaccgcggccatgactggggcgcacccccgttccgcacgccaccccgagtgcccagcatgtcccactggctctacgatgtcctcagcttctattactgctgcctctgggcacccgactgcccccgctacatgcaacggcggccctccaatgactgccgcaactaccggcccccaagactggcctccgccttcggagacccacactttgtgaccttcgacggcaccaacttcacattcaatgggcgcggagagtacgtgctgctggaggcagcgctgaccgacctgagggtgcaggcgcgggcccagcccgggacgatgtccaacggcacggagacccgtggcactgggctgaccgcagtggccgtccaggagggcaactcagatgtggtggaagtcaggctggccaacaggaccggaggtctggaggtgctgctgaaccaggaggtgctgagcttcaccgagcagagctggatggacctgaaaggaatgttcctgtcggtggctgccggggacagggtctccatcatgctggcatcaggggccggcctggaggtcagcgtgcagggcccgttcctgagtgtgtccgtcctgctgcctgagaagttcctcacccacacccacggcctcctcgggacactcaacaacgaccccaccgacgacttcaccctgcacagcgggcgcgtcctgcccccaggcaccagtccccaggagctgttcctgtttggggccaactggaccgtgcacaatgcgtcctccctgctcacctacgattcctggttcctggtccacaacttcctgtaccaacccaagcacgaccccaccttcgagcccctcttccccagtgagaccaccctcaaccccagcctggcacaagaggcagccaaactatgtggggacgatcatttctgcaactttgatgtggcagccactgggagcctgagcacgggcactgccactcgggtggcccaccagctgcaccagcgtcgcatgcagagcctgcagccagtggtgtcctgtggctggctggccccacctcccaacggacaaaaggagggcaacaggtacctggcgggttccaccatctacttccactgtgacaacggctacagcctggccggggcagagaccagcacctgccaggctgacggcacctggtcctcacccaccccgaagtgccagccaggacgcagctacgcggtgctgttgggcatcatctttgggggcctcgcggtggtggcggcggttgcgctcgtctatgtgctgctgcgccgcaggaagggcaacacgcacgtctggggtgcacagccctgatgggagcagcttggctgtgagcaccaggccaagactcctgagaacaggcagcccagtcctgcgactcccgcatccccaggaccagacacctggggacctggatacttgatacctgggcatttaaccccctactctgtcatctcagaccccaggcaggaggcccagtgtttcaacacccaagccccgtggctagcaagcgctccgtgctcttcccccaaatactcacgggctctaattccccaaacctgaaacttcataccctgngattctaatacctatgtcctgagccctgacactcccacacctgagcctcagattccaatagctcactccctagaaccctgacgccggggccccctgacccctgagcctcagattcncatacctcactccccagaagccctgatgcccgggggccccttgacccctggatctacgggaggcccttgctccccggaaccggtggcggggcaaccaa

SEQ ID NO: 262208 - DNA, 968 bp, Homo Sapiens
aaagagcgaggcctgggtggcgaattcggcacgagggagaactttgacctgaagggctctctgcggcagcaggccaaccacccctactgggccgacacggtgaagcggttgttagcagaaggtatcaaccgcccgcggaaaggccatgacgccggcgaccatccccccatcacccccatgaagtctgccacagaggccgaattagggggtgacgcgtggcggctctatgagtacatcaccagacacttcatcgccacggtcagccatgactgcaagtacctgcagagcaccatctccttcagaattgggcccgagctcttcacctgctccgggaagaccgtcctctcaccaggcttcacggaggtcatgccctggcagagcgtgcccctggaggagagcctgcccacttgccagcggggtgatgccttccctgtgggcgaggtgaagatgctggagaagcagacgaacccacccgactacctgacggaggccgagctcatcacgctcatggagaagcatggcatcggcacggatgccagcatccctgtgcatatcaacaacatctgccagcgcaactatgtcacggttggagagcgggcgccggctcaagcccaccaacctcggcatcgtcctggtgcacggctactataagattgatgcagagctggtgctccccaccatccgcagtgcagtggagaaacagctgaacctgatcgcccagggcaaggccgactaacgccaggtcctggggccacaccctggacgtgtttcaaaagaagttccactactttgtccaccccattgctggcatggatgagttgatgggaaggggcttttctcccccctggcggcccacaggcagccccttctccgctggggggaaaggcccaccgcttcatgaagtacatcccagcccaagccaaaccccctggcacggctccccctgggaagaaaaccctaaaccctcc

SEQ ID NO: 262209 - DNA, 2549 bp, Homo Sapiens
  misc_feature (2214)..(2214): n is a, c, g, or t
  misc_feature (2264)..(2264): n is a, c, g, or t
  misc_feature (2306)..(2306): n is a, c, g, or t
  misc_feature (2318)..(2319): n is a, c, g, or t
gctgggtggcgaattcggcacgaggggaagtacggcaggtgtctaagcatgccttcagcctcaagcagttggacaaccctgctcgaatccctccctgtggctggaagtgctccaagtgtgacatgagagagaacctgtggctcaacctgactgatggctccatcctctgtgggcgacgctacttcgatggcagtgggggcaacaaccacgctgtggagcactaccgagagacaggctacccgttagctgtcaagctgggcaccatcacccctgatggagctgacgtgtactcatatgatgaggatgacatggtcctggaccccagcctggctgagcacctgtcccacttcggcatcgacatgctgaagatgcagaagacagacaagacgatgactgagttggagatagacatgaaccagcggattggtgaatgggagctgatccaggagtcaggtgtgccactcaagcccctgtttgggcctggctacacaggcatccggaacctgggtaacagctgctacctcaactctgtggtccaggtgctcttcagcatccctgacttccagaggaagtatgtggataagctggagaagatcttccagaatgccccgacggaccctacccaggatttcagcacccaggtggccaagctgggccatggccttctctccggggagtattccaagccagtaccggagtcgggcgatggggagcgggtgccaaaacagaaggaagttcaagatggcattgcccctcggatgttcaaggccctcatcggcaagggccaccctgaattctccacaaaccggcagcaggatgcccaggagttcttcccttcaccttatcaacatggtggagaggaattgccggagctctgaaaatcctaatgaagtgttccgcttcttggtggaggaaaaagatcaagtgcctggccacagagaaggtgaagtacacccagcgagttgactacatcatgcagctgcctgtgcccatggatgcagcccttaacaaagaggagcttctggagtacgaggagaagaagcggcaagccgaagaggagaagatggcactgccagaactggttcgggcccaggtgcccttcagctcttgcctggaggcctacggggcccctgagcaggtcgatgacttctggagcacggccctgcaggccaagtcagtagctgtcaagaccacacgatttgcctcattccctgactacctggtcatccagatcaagaagttcaccttcggcttagactgggtgcccaagaaactggatgtgtccatcgagatgccagaggagctcgacatctcccagttgaggggcacagggctgcagcccggagaggaggagctgccagacattgccccaaccctggtcactccggatgagcccaaagcgcccatgcttggatgaatcagtcatcatccagctggtggagatgggattccctatggacgcctgccgcaaagctgtctactacacgggcaacagcggggctgaggaccgccatgaactggggtcatgtcacacattggatgatccagattttgcaaacaccctcatcctgcctggctctagtgggccgggctccacaagcgcagcagccgacccccctcctgaggactgtgtgaccaccattgtctccatgggcttctcccgggaccaggccttgaaagcgctgcgggccacgaacaatagtttagaacgggctgtggactggatcttcagtcacattgacgacctggatgctgaagctgccatggacatctcagagggccgctcagctgccgactccatctctgagtctgtgccagtgggacctaaagtccgggatggtcctggaaagtatcagctctttgccttcattagtcacatgggcacctctaccatgtgtggtcactacgtctgccacatcaagaaagaaggcagatgggtgatctacaatgaccagaaagtgtgtgcctccgagaagccgcccaaggacctgggctacatctacttctaccagagagtggccagctaagagcctgcctcaccccttaccaatgagggcaggggaagaccacctggcatgagggagaggggctgagggatggacttcagcccctctgctctgtaccctttttccttttgtccccggcagcagggaagaagctggaggccgtgggagaatggctgggcagagcagaggggcagcgatagactctggngatggagcaggacggggaacggggaaggggccggccaccctgtctgtaanggagacttttgttgctttccccctgccccccggaatccacangtgctctggctnntctctgtgtcgccccgcccagcccccctggtggtggggagggaggggttctcgttttgtgccgcgtgggtgtaagctttgtgcattcctctcccagtgggagcgatcacctggtgccctcccctcccccctttgttttgcccccttgtgtggtttggtccagggaagggatgttgagggaaattagggaaccccccccgactttgcccttccctgccctcagttcttttt

SEQ ID NO: 262210 - DNA, 2114 bp, Homo Sapiens
tggcctgcgggacgctggtggccgccttgctgggcgccgctcaccgcctggggctcttctatcagctgctgcacaaggtggacaaggcaagcgtccggcatggcggagagaacgtggccgctgtgctgagggcccatggtgtgcggttcatcttcacgctggtcggtgggcacatttccccgctgctggtggcctgtgagaaactgggcatccgtgtggtggacacacgccatgaggtcacggccgtctttgctgctgatgctatggcccgcctgtccgggacggtgggcgtggcggcagtgacagcaggccctggcttcaccaacacggtgactgcggtgaagaatgctcagatggctcagtccccaatcctgcttctgggtggggctgccagcactctgctgcagaaccggggtgcgctccaggctgttgatcagctgtcccttttccggccactctgtaagttttgtgtgtctgtgcggagggtgcgggacattgtgcccaccctgagggccgcgatggctgccgcccagtcgggcaccccaggtccggtgtttgtggagctgcccgttgacgtgctgtacccctacttcatggtccagaaggagatggtgccagccaagccacccaagggcctcgtggggccgagtggtctcctggtatttagagaattacctggccaacctctttgcaggagccctgggagcctcagcccgagggaccgctgcccctggacatcccccagggcttccccgcagcaggttcagcgctgtgtggagatcctgagccgggccaagaggcctctgatggtgctggggagtcaggccctgctcaccccaacgtctgccgacaagcttcgggctgccgtggagaccttgggtgttccctgcttccttggagggatggcacgggggctgttaggccgcaaccaccccctccacatccgggagaaccgcagtgcggccctgaagaaggcggatgtcattgtcctagcaggaactgtgtgtgacttccgcctatcctatggccgtgtcctcagccacagcagcaagatcatcatcgtcaatcgtaatcgggaagagatgttgctcaactcagacatcttctggaagccccaggaggctgtgcagggagatgtgggttccttcgtgctgaagttagtggagggccttcagggccagacctgggccccagactgggtggaggagctgcgggaagccgaccggcagaaggagcagacctttcgggagaaggcagcgatgcctgtggcccagcacctgaacccagtgcaggtgctgcagctggtggaggaaacgctacctgacaactcaattctggtggtgggatggtggggaacttcgtgggcactgctgcccatctggtacagccccgcggccccctgcgctggcttgatcctggggcctttgggactctgggagttggtgcaggatttgcacttggggccaagctgtgccggccagatgctgaagtctggtgcctgtttggggacggagcttttggctacagcctcatcgaatttgatacattcgtcagacacaagatcccagtgatggccttggtagggaatgatgctggctggacacagatttctcgggagcaggtgccctctctgggcagcaacgtggcctgtggcctggcctacactgattatcacaaggcagccatgggtctgggggcccggggcttgctgctctcacgggagaacgaggatcaggtggtcaaggtgctgcacgatgcccagcagcagtgccgagacggccacccggttgtggtcaacatcctcattgggaggacggacttccgcgatggctccattgctgtatagggccttgtgggtcaggacgcttggctgccttcctgcccctggactgtgtccagctggtttggagtctcatcattgcttgccctgggcctatcccatgaggcccagtgactccacaacctccctgaggaggggatggaggggtcaaatctcagagaggctctcttgtgagctcttggaccctcctcttcacggacccaactgtgccgtttgtcccctctcttatggagactgaataaaccacctctggcccatgtaggcccaagtactc

SEQ ID NO: 262211 - DNA, 1362 bp, Homo Sapiens
tgagacaggtgtgcaccgctgcggtgagggccaagtgtgccacaacctccctggctcctaccgctgtgactgcaaagccggctttcagcgggatgccttcggccggggctgcatcgacgtgaatgagtgctgggcctcgccaggccgcctgtgccagcacacgtgtgagaacacactcggctcctaccgctgttcctgcgcctccgggttcctgctagcagcggacggcaagcgctgtgaagacgtgaatgagtgtgaggcccagcgctgcagccaggagtgtgccaacatctatggctcctaccagtgctactgccgccagggctaccagctggctgaggatgggcacacctgcacagacatcgacgagtgtgctcaaggcgccggcatcctctgcaccttccgctgtctcaacgtgccagggagctaccagtgtgcatgccctgagcagggctacaccatgacggccaacgggaggtcctgcaaggacgtggatgagtgtgcactgggtacccacaactgttccgaggctgagacctgccacaacatccagggtagcttccgctgcctgcgcttcgagtgtcctcccaactatgtccaagtctccaaaacgaagtgcgagcgcaccacgtgccatgacttcctggagtgccagaactcgccagcgcgcatcacgcactaccagctcaacttccagacgggcctcctggtgcctgcgcatatcttccgcattggccccgcgccagccttcacaggggacaccatcgccctgaacatcatcaagggcaatgaggagggctactttggcacgcgcaggctcaatgcctacacgggtgtggtctacctgcagcgggccgtgctggagccccgggactttgccctggatgtggagatgaagctctggaggcagggctccgtcaccaccttcctggccaagatgcacatcttcttcaccacctttgccctgtgaggtgccagcacgggccacctgcgggtgtggcgcagcccagggctcacactgcgtgggagggactgggtcactattgtggtttttactataactttgtaaattaacttaattttgctgacttgactcctgtggcttctggacccctcctctgccccgcaggaggaagttccacggcaggtggtgcgttcccacgcaggcaccaagtggaacctttgcacggtgggccacgggcccgtggcgggtgcccctgtggggtgaggcctggggtgatgacctgaggacccagagacacgccaaccatgttggggggctcttaggacttcctctgggatgacccccgtcccccaaaggttggaccatttccattttccttgtttcccaactggggaata

SEQ ID NO: 262212 - DNA, 891 bp, Homo Sapiens
  misc_feature (620)..(620): n is a, c, g, or t
  misc_feature (632)..(633): n is a, c, g, or t
catcctggcgtcaggcctccttcctgccttacccaggacagcccagttgcagctgggttggtcccacagtcccacacacacacagcccgagtgtggtgcctcacgtgggctgccccgtgcctacccacagccacagaccccgcacctggaggaggacttgaaggaggtgctgcgttctgaggctggcatcgaactcatcatcgaggacgacatcaggcccgagaagcagaagaggaagcctgggctgcggcggacccattcaagaaagtccggaagtctctggctcttgacattgtggatgaggatgtgaagctgatgatgtccacactgcccaagtctctatccttgccgacaactgccccttcaaactcttccagcctcaccctgtcaggtatcaaagaagacaacagcttgctcaaccagggcttcttgcaggccaagcccgagaaggcagcagtggcccagaagccccgaagccacttcacgacacctgcccctatgtccagtgcctgggaagacggtggcctgcggggggaccaggggaccagcttttcatgcaggagaaagcccggcagctcctggggccgcttgaagcccagccacacatctcggaccctcantcttgtcctganngtgttgagggtgtcacgagcccattctcatgtttacaggggttgtggggggcagaagggggtctgttgaaatctgagagtcattcagggtgaccctcctgcaggggagcccttctgccaccagcccctccccaatttttttaggggtggaaggcaaccaggggccatggtgcctgcccctggttgcccgaagcccccagctggtggggccgggcctccctgggtggcttaaacaacaaaaggtttccaccttttccac

SEQ ID NO: 262213 - DNA, 2569 bp, Homo Sapiens
acctgctgacacgctgacgccttcgagcgcggcccggggcccggagcggccggagcagcccgggtcctgaccccggcccggctcccgctccgggctctgccggcgggcgggcgagcgcggcgcggtccgggccggggggatgtctcggcggacgcgctgcgaggatctggatgagctgcactaccaggacacagattcagatgtgccggagcagagggatagcaagtgcaaggtcaaatggacccatgaggaggacgagcagctgagggccctggtgaggcagtttggacagcaggactggaagttcctggccagccacttccctaaccgcactgaccagcaatgccagtacaggtggctgagagttttgaatccagaccttgtcaaggggccatggaccaaagaggaagaccaaaaagtcatcgagctggttaagaagtatggcacaaagcagtggacactgattgccaagcacctgaagggccggctggggaagcagtgccgtgaacgctggcacaaccacctcaaccctgaggtgaagaagtcttgctggaccgaggaggaggaccgcatcatctgcgaggcccacaaggtgctgggcaaccgctgggccgagatcgccaagatgttgccagggaggacagacaatgctgtgaagaatcactggaactctaccatcaaaaggaaggtggacacaggaggcttcttgagcgagtccaaagactgcaagcccccagtgtacttgctgctggagctcgaggacaaggacggcctccagagtgcccagcccacggaaggccagggaagtcttctgaccaactggccctccgtccctcctaccataaaggaggaggaaaacagtgaggaggaacttgcagcagccaccacatcgaaggaacaggagcccatcggtacagatctggacgcagtgcgaacaccagagccccttggaggaattcccgaagcgtgaggaccaggaaggctccccaccagaaacgagcctgccttacaagtggggtggtggaagcaactaaactcctcatccccgctgtgggttctagcctctctgaagccctggacttgatcgagtcggaccctgatgcttggtgtgacctgagtaaatttgacctccctgaggaaccatctgcagaggacagtatcaacaacagcctagtgcagctgcaagcgtcacatcagcagcaagtcctgccaccccgccagccttccgccctggtgcccagtgtgaccgagtaccgcctggatggccacaccatctcagacctgagccggagcagccggggcgagctgatccccatctcccccagcactgaagtcgggggctctggcattggcacaccgccctctgtgctcaagcggcagaggaagaggcgtgtggctctgtcccctgtcactgagaatagcaccagtctgtccttcctggattcctgtaacagcctcacgcccaagagcacacctgttaagaccctgcccttctcgccctcccagtttctgaacttctggaacaaacaggacacattggagctggagagcccctcgctgacatccaccccagtgtgcagccagaaggtggtggtcaccacaccactgcaccgggacaagacacccctgcaccagaaacatgctgcgtttgtaaccccagatcagaagtactccatggacaacactccccacacgccaaccccgttcaagaacgccctggagaagtacggacccctgaagcccctgccacagaccccgcacctggaggaggacttgaaggaggtgctgcgttctgaggctggcatcgaactcatcatcgaggacgacatcaggcccgagaagcagaagaggaagcctgggctgcggcggacccaatcaagaaagtccggaagtctctggctcttgacattgtggatgaggatgtgaagctgatgatgtccacactgcccaagtctctatccttgccgacaactgccccttcaaactcttccagcctcaccctgtcaggtatcaaagaagacaacagcttgctcaaccagggcttcttgcaggccaagcccgagaaggcagcagtggcccagaagccccgaagccacttcacgacacctgcccctatgtccagtgcctggaagacggtgggcctgcggggggaccagggaccagcttttcatgcaggagaaagcccggcagctcctgggccgcctgaagcccagccacacatctcggaccctcatcttgtcctgaaggtgttgagggtgtcacgagcccattctcatgtttacaggggttgtggggggcaaaagggggtctgtgaatctgagagtcattcaggtgacctcctgcagggagccttctgccaccagccccctccccaaactcttcgggtgggaggccacaggggcccatgtgcctgcccctgtttgccccagccccacgctgtgggggcgggctccttggtggctaacaaacaaaagttccccccttcccagggtcttgggcctgggatcccctccccccaagggcccacagaggggaagcttcccggttccagctttctctcccccccagc

SEQ ID NO: 262214 - DNA, 568 bp, Homo Sapiens
  misc_feature (50)..(50): n is a, c, g, or t
  misc_feature (77)..(77): n is a, c, g, or t
aagccccgaagccaattaaggacacttcccccctatgttccagtgcctgnaagacgttggcctgcgggggaccaggnaccagcttttcatgcaggagaaagcccggcagctcctgggccgcctgaaacccagccaaacatctcggaccctcatcttgtcctgaggtgttgagggtgtcacgagcccattctcatgtttacaggggttgtgggggcaaaagggggtctgtgaatctgagagtcattcaggtgacctcctgcagggagccttctgccaccagcccctccccagactctcaggtggaagcaacagggccatgtgctgccctgttgccggagcccagctgtgggcggctcctggtgctaacaacaaagttccacttcccaggtctgcctggttccctccccaaggccacagggagctccgtcagcttctcccaagcccacgtcaggcctggcctcatctcagaccctgcttaggatgggggatgtggccaggggtgctcctgtgctcaccctctcttggtgcatttttttggaagaataaaattgcctctctcttaaaaaat

SEQ ID NO: 262215 - DNA, 973 bp, Homo Sapiens
ccctccgcaggcggaccgggggcaaaggaggtggcatgtcggtcaggcacagcagggtcctgtgtccgcgctgagccgcgctctccctgctccagcaaggaccatgagggcgctggaggggccaggcctgtcgctgctgtgcctggtgttggcgctgcctgccctgctgccggtgccggctgtacgcggagtggcagaaacacccacctacccctggcgggacgcagagacaggggagcggctggtgtgtgcccagtgccccccaggcacctttgtgcagcggccgtgccgccgagacagccccacgacgtgtggcccgtgtccaccgcgccactacacgcagttctggaactacctggagcgctgccgctactgcaacgtcctctgcggggagcgtgaggaggaggcacgggcttgccacgccacccacaaccgcgcctgccgctgccgcaccggcttcttcgcgcacgctggtttctgcttggagcacgcatcgtgtccacctggtgccggcgtgattgccccgggcacccccagccagaacacgcagtgccagccgtgccccccaggcaccttctcagccagcagttccagctcagagcagtgccagccccacccgcaactgcacggccctgggcctgggccctcaatgttgccaggctcttcctcccaatgacacgctgtggcaccagctgcactggcttccccctcagcaccagggtaccaggaacctgagaatgtgaacgtgccgtcatcgactttgtggcttttccaggacatcttcctcaagaagctgcaaacggctgctgcaggcccctccaaggcccccggagggcttgggggtcccaacaccaagggccgggccgcgccggccttggcagcatgaaaccctccccctgcggcccccctggaacttcctggggggctgcaggaccccgcccccctgtttgggtcgggcccgattgcaaacggg

SEQ ID NO: 262216 - DNA, 879 bp, Homo Sapiens
  misc_feature (631)..(631): n is a, c, g, or t
tcctccaaaagcccagggggctcctcagggggtgaaggggccctcatcgggtctggaggctcccccctgggcttaggcactgatatcggaggcagcatccgcttcccctcctccttctgcggcatctgcggcctcaagcccacagggaaccgcctcagcaagagtggcctgaagggctgtgtctatggacaggaggcagtgcgtctctccgtgggccccatggcccgggacgtggagagcctggcactgtgcctgcgagccctgctgtgcgaggacatgttccgcttggaccccactgtgcctcccttgcccttcagagaagaggtctacaccagctctcagcccctgcgtgtggggtactatgagactgacaactataccatgccctccccggccatgaggcgggccgtgctggagaccaaacagagccttgaggctgcggggcacacgctggttcccttcttgccaagcaacataccccatgctctggagaccctgtcaacaggtgggctcttcagtgatggtggccacaacttcctacagaacttcaaaggtgatttcgtgggacccctgcctggggggacctgggtcttcaattctgaagcttccccaatggcttaaaggactgctnggccttcctgggtgaagcctctgcttgccaaggctgtcagctttcctcagcaacatgaagtctcgttcggctggaaaactctgggaactgcagcacgagatcgaggtgtaccgcaaaaccgtgattgcccagtggagggcgctggacctggatgtggtgctgacccccatgctggccccctgctctggacttgaatgccccaggcagggcccccagggggccggtcactacactatgctgtacaactg

SEQ ID NO: 262217 - DNA, 1028 bp, Homo Sapiens
cactgtgtggggctggcggccggcgggagaggcggccggcctggactggcccgagagggatcccggttcccagaacagacctaggaggcggcctcgagggcggacggcagggagggccagcatgccccgactgctgcaccccgccctgccgctgctcctgggcgccagcgctgaccttccgggcgctccggcgcgcgctctgtcgcctgcccctacccgtgcacgtgcgcgccgaccccctgcgcacctggcgctggcacaacctgctcgtctccttcgctcactccattgtgtcggggatctgggcactgctgtgtgtatggcagactcctgacatgttagtggagattgagacggcgtggtcactttctggctatttgctcgtttgcttctctgcggggtatttcatccacgatacggtggacatcgtggctagcggacagacgcgagcctcttgggaataccttgtccatcacgtcatggccatgggtgccttcttctccggcatcttttggagcagctttgtcggtgggggtgtcttaacactactggtggaagtcagcaacatcttcctcaccattcgcatgatgatgaaaatcagtaatgcccaggatcatctcctctaccgggttaacaagtatgtgaacctggtcatgtactttctcttccgcctggcccctcaggcctacctcacccatttcttcttgcgttatgggaaacagaagaccctgggcaccttccctgctgggtatcctgctcatgctggacgtgatgatcataatctacttttcccggcctcctccgctctgacttctgccctgagcatgtccccaagaagcaacacaaagacaagttcttgactgagtgaggggcacagagcctgggacaacaaaaacggacaaggccagaaacagcttcatatggacactgggacttagccccaagcctgggtgtcctctgaggccagcctctccaccttctgagcctgcgcccacactattgaaaacactaatgaaagtactcctctg

SEQ ID NO: 262218 - DNA, 994 bp, Homo Sapiens
gataaaacatgattctctgggctccagatgaagagtcaggagtttggctagaacaggttcgagtaggtgaagtaggtgggaatactttgggattttatgattgccagttcaatgaagatggctccatgatcattgctcatgctttccacggagcgttgcacctttggaaacagaatacagttaacccaagagagtggactccagagattgtcatttcaggacactttgatggtgtccaagacctagtctgggatccagaaggagaatttattatcactgttggtactgatcagacaactagactttttgctccatggaagagaaaagaccaatcacaggtgacttggcatgaaattgcaaggcctcagatacatgggtatgacctgaaatgtttggcaatgattaatcggtttcagtttgtatctggagcagatgaaaaagttcttcgggttttttctgcacctcggaattttgtggaaaatttttgtgccattacaggacaatcactgaatcatgtgctctgtaatcaagatagtgatcttccagaaggagccactgtccctgcattgggattatcaaataaagctgtctttcagggagatatagcttctcagccttctgatgaagaggagctgttaactagtactggttttgagtatcagcaggtggcctttcagccctccatacttactgagcctcccactgaggatcatcttctgcagaatactttgtggcctgaagttcaaaaactatatgggcacggttatgaaatattttgtgttacttgtaacagttcaaagactctgcttgcctcagcttgtaaggcagctaagaaagagcatgcagctatcattctttggaacactacatcttggaaacaggtgcagaatttagttttccacagtttgacagtcacgcagatggccttctcacctaatgagaagttctttactaggctgttttccagaggattcgaacctgggtcattgtggga

SEQ ID NO: 262219 - DNA, 1994 bp, Homo Sapiens
  misc_feature (1371)..(1414): n is a, c, g, or t
atattttcaggttgcccgatgttatcgagatgaaggttcaagaccagacagacagcctgagtttactcagattgacatagagatgtcatttgtagaccagactgggatccagagtttaattgagggtttgctccagtattcctggcccaatgacaaagatcctgtggttgttccttttcctactatgacttttgctgaggtgctggccacctatggaactgataaacctgacactcgctttggaatgaagattatagatatcagtgatgtgtttagaaacacagagattggatttcttcaagatgcacttagtaagccccatggaactgtgaaagccatatgtatccctgaaggagcaaaatacttaaaaaggaaagacattgaatccattagaaactttgcagctgaccattttaatcaggaaatcttacctgtattccttaacgccaatagaaactggaattctccagttgctaatttcataatggagtcacaaagactggaattaatcagactaatggagacccaagaggaagatgtggtcctactaactgctggagagcacaataaagcatgctctttgttaggaaaattacgactggaatgtgctgaccttctagaaacaagaggagtggtgctccgtgaccccactctgttctctttcctttggggtggtagattttcccactcttcctgcccaagggaggaaaatcccagaagagctggaatcggcccaccacccatttactgctccccaccccagtgacatacatctcctgtacactggagcccaaaaaggcccgtagccaacactatgacctgggtttaaatggcaatgaaataggaggtggttcaattcgaattcacaatgcagagctgcagcgttatatcctggcaaccttactaaaggaggatgtgaaaatgctctcccatctgctccaggctttagattatggggcaccccctcatggaggaattgccttagggttagacagactgatatgccttgtcactggatctccaagcatcagagatgtcatagccttcccaaagtccttccggggacatgacctcatgagcaataccccagattctgtccctcctgaggaactgaagccctatcatatccgagtctccaagccaacagactccaaagcagaaagagctcattgaatcatgcataccatgcagaaagttgagcttttaggttttggtcctctttgcttccccaaggctaaagtcagatcctagagttctgccacaggtctaacaatcaagtctttagattggaaggaatccaggcaacattcttcaccacaaccgaagaaacagattaaaagatacccaattttgacttgatttcatgcatcnnnnnnnnnnnnnnnnnnnnnnnnnnnnnnnnnnnnnnnnnnnnacttaggtgtgaaagatggttctttgttgaaataatatagtggtttagtgttttcaaatcatgtttctcatacccagatagtagattattcacttaggacagaggtaatcaaattatgtgtgaaatgtaggaaaatgcttgcccctgtaaactagtgagttgatggagcatttgcttcatcatcctcatcaagagaatcatataaattaagctttataatgacatttcaaccatcaacataatatagtgaggagtagcataatattttttaataatgcagaaaacatcactgaaatgagagtcacaaatttttcttcagtgtttcagcctgagtaagttacataaacctcgcttagcctcccttcctgctaatgtgtaaaatacatacttgccctggctacctcaccgggctgttattgctggaatcagaggagataacatatatggaagataaagtgaataaaagtactttgaaaaactataaagcattccacaaatatgagatgatggtattatccatccataaataggtagatatatctctattttataggtttcagattaaacaaaactgatatcg

SEQ ID NO: 262220 - DNA, 1286 bp, Homo Sapiens
  misc_feature (745)..(745): n is a, c, g, or t
  misc_feature (1036)..(1036): n is a, c, g, or t
  misc_feature (1132)..(1141): n is a, c, g, or t
gagagtggctacctcatcgaggagatcggagacgtgctgctggcccggtttgatggtgctgatggctcctggttccagaaaatctcctcccgcttctgcagccgccagtcatttgccttagagcagctcagagccaagcaacgcaaggaccctcggttctgtgccttcgtgcaggaagctgagagccgcccgcggtgccgccgcctgcagctgaaggacatgatccccacggagatgcagcggctgaccaagtaccccctgctcctgcagagcatcgggcagaacacagaagagcccacagaacgggagaaagtggagctggcagccgagtgctgccgggaaattctacaccacgtcaaccaagccgtgcgtgacatggaggacctgctgaggctcaaggactatcagcggcgcctggacttgtcccaccttcggcagagcagcgaccctatgctgagcgagttcaagaacctggacatcaccaagaagaaattggtccacgagggcccactgacgtggcgggtgactaaggacaaggcagtggaggtgcatgtgctgctgctggacgacctgctgctgctgctccagcgccaggacgagcggctgctgctcaagtcccatagccggacactgacgcccacgcccgatggcaagaccatgctgcggcccgtgctgcggctcacctccgccaggacccgcgaggtggccaccgatcacaaagccttctacgtcctttttacctggngaccaggaggcccagatatacgagctggtggcacagactgtgtcggagcgggaaaaactggtgtgctctcatcactgaaactgccgggatccctgaaagtccctgcccctgcctcttcgccctaagccccggcccagcccgagcagcacccgagaacccctcctcagcagctctgagaacggcaatggtggccgagagacgtctccagctgatgcccggaccgagagaatcctcagtgacctcctgcccttctgcagaacaaggccccgagggccagctcgctgccacggncccttcggaaagtgctgtcccctgaacactttctgtttcccggcggagaaaaaaatggggccggggcctcctcgacaagggggatggcggtcccannnnnnnnnncccccttgagcctcgcccgggatccagcacatttcccggagacaccccgcctaaatttcgggaggaaaccactctcaacccccctgcaaggactcccgcccggatgatattcccgcccctccgggagaacatcttcttgcgcccc

SEQ ID NO: 262221 - DNA, 942 bp, Homo Sapiens
tggaccggtccggaacttcggaatcaccgttaagatggcggctttgctgcggaaacgcggccggtccggttccgcggcccaggcagagggactctgcaagcaatggctgcagcgcgcctggcaagagcggcgcctgctgctgcgggagccgcgctacacgctgctggtggccgcctgcctctgcctggcggaggtgggcatcaccttctgggtcattcacagggtggcatacacagagattgactggaaggcctacatggccgaggtagaaggcgtcatcaatggtacctatgactatacccaactgcagggtgacaccggaccacttgtgtacccagctggtttcgtgtacatctttatggggttgtactatgccaccagccgaggcactgacatccgcatggcccagaacatctttgctgtgctctacctggctaccttgctgcttgtcttcttgatctatcaccagacctgcaaggtacctcccttcgtctttttcttcatgtgctgcgcctcttaccgtgtccactccatctttgtgctgcggctcttcaatgaaccagtggccatggtgctgctcttcctcagtatcaacctcctgctggcccagcgctggggctggggttgctgctttttcagcctggcagtctctgtgaagatgaatgtgctgctcttcgcccctgggttactgtttcttctcctcacacagtttgggcttccgtggggccctccccaagctgggaatctgtgctggcctccaggtggtgctggggctgcccttcctgctggagaaccccagcggctacctgtcccgctcctttgactttggccgcccagttctgttccactggacagtggaactgggcgcttcctcccagaaggcgctccttcctgcaatcaaggccttccaccctggcccctggttgaactgccccaacctcc

SEQ ID NO: 262222 - DNA, 1187 bp, Homo Sapiens
ggttgggatgagcgctcccagcccacaaaacaacctgagagcaaggttgtttgaagccaagggttccaggcaatgggcccaccaaggagttaggggcaagtgtggggaaaattaccagacggtaggaactgggtaggggaggggaggcggctgaaaccagatgcccaatgaaattggaaggtgaaagaggggaagaaacgatctggttgggtttaagggggctgggggtggaacctttcctttgggagggatccctcagcagcggacaagatactttccccctgtcctgtgccacctgcagagggcaaacagcagggagcagggtgaggtgggcagtcaacagggccaggtggaaggctcgatgcaggaagagcgcctctggaaggaagcgccagttcactgtccagtggaacagaaactggcggccaaggtcaaaggagcgggacaggtagccgctggggttctccagcaggaagggcagccccagcaccacctgaaggccagcacagattcccagcttggggagggccccacggaagccaaactgtgtgaggagaagaaacagtaacccaggggcgaagagcagcacattcatcttcacagagactgccaggctgaaaaagcagcaaccccagccccagcgctgggccagcaggaggttgatactgaggaagagcagcaccatggccactgggtcattgaagagccgcagcacaaagatggagtggacacggtaagaggcgcagcacatgaagaaaaagacgaagggaggtaccttgcaggtctggtgatagatcaagaagacaagcagcaaggtagccaggtagagcacagcaaagatgttctgggccatgcggatgtcagtgcctcggctggtggcatagtacaaccccataaagatgtacacgaaaccagctgggtacacaagtggtccggtgtcaccctgcagttgggtatagtcataggtaccattgatgacgccttctacctcggccatgtaggccttccagtcaatctctgtgtctccgccaggcagaggcaggcggccaccagcagcgtgtagcgcggctcccgcagcagcaggcgccgctcttgccaggcgcgctgcagccattgcttgcagagtccctctgcctgggccgcggaaccggaccggccgcgtttccgcagcccagccgccatcttaa

SEQ ID NO: 262223 - DNA, 946 bp, Homo Sapiens
  misc_feature (31)..(31): n is a, c, g, or t
ttggggccacccctgaggaaggaccagcggncgcgtgcagtcaaggaggccattctcttgcacttctccaccgacccagtggccgcctccatcatgaagatctacacgttcaacaaagaccaggaccgggtgaagctgggtgtggacaccattgccaagtacctggacaacatccacctgcaccccgaggaggagaagtaccggaagatcaagctgcagaacaaggtgtttcaggagcgcattaactgcctggaagggacccacgagttttttgaggccattgggttccagaaggtgttgcttcccgcccaggatcaggaggaccccgaggagttctacgtgctgagcgagaccaccttggcccagccccagagcctggagaggcacaaggaacagctgctggctgcggagcccgtgcgcgccaagctggacaggcagcgccgcgtcttccagccctcgcccctggcctcgcagttcgaactgcctggggacttcttcaacctcacagcagaggagatcaagcgggagcagaggctcaggtccgaggcggtggagcggctgagcgtgctgcggaccaaggccatgcgggagaaggaggagcagcgggggctgcgcaagtacaactacacgctgctgcgcgtgcgcctccccgatggctgcctcctgcagggcactttctacgctcgggagcggctgggggcggtgtacgggtttcgtccgggaggccctgcagagcgactggctgccttttgagctgctggcctcgggagggcagaagctgtccgaggacgagaacctggccttgaacgagtgcgggctggtgccctctgcccctcctgaccttctcgtgggaacatggctgtgctggaagacattcaaggcccgcggggggcccgaaccgggactccatcctgaaaacccgaagctccctgtccgccatcgaaaa

SEQ ID NO: 262224 - DNA, 1132 bp, Homo Sapiens
tgcggaacgtgaacggggagctgctgagcggcgcctgctgtgacggcgacggccggacaacgcgcgcggggggctgcggccacgacgagtgcgacacgtacgtgcgcgtgtgccttaaggagtaccaggccaaggtgacgcccacggggccctgcagctacggccacggcgccacgcccgtgctgggcggcaactccttctacctgccgccggcgggcgctgcgggggaccgagcgcgggcgcgggcccgggccggcggcgaccaggacccgggcctcgtcgtcatccccttccagttcgcctggccgcgctcctttaccctcatcgtggaggcctgggactgggacaacgataccaccccgaatgaggagctgctgatcgagcgagtgtcgcatgccggcatgatcaacccggaggaccgctggaagagcctgcacttcagcggccacgtggcgcacctggagctgcagatccgcgtgcgctgcgacgagaactactacagcgccacttgcaacaagttctgccggccccgcaacgactttttcggccactacacctgcgaccagtacggcaacaaggccctgcatggacggctggatgggcaaggagtgcaaggaacctgtgtgtaaacaagggggtaaatttgctccacggggggatgcacccgtgcctggggagtgcaggtgcagctacggctggcaagggaggttctgcgatgagtgtgtcccctaccccggctgcgtgcatggcagttgtgtggagccctggcagtgcaactgtgagaccaactggggcggcctgctctgtgacaaagacctgaactactgtggcagccaccacccctgcaccaacggaggcacgtgcatcaacgccgagcctgaccagtaccgctgcacctgccctgacggctactcgggcaggaactgtgagaaagctgagcacgcctgcacctccaacccgtgtgccaacgggggctcttgccatgaggtgccgtccggcttcgaatgcactgcccatcggggctggagcggggcccacctgtgcccttgacatcgatgaatgtggcttcaaaccctggtgcgggccggtggccacctgtgtggaaccaagtgggaccgcttttaatggcatc

SEQ ID NO: 262225 - DNA, 1014 bp, Homo Sapiens; identical to SEQ ID NO: 78447

SEQ ID NO: 262226 - DNA, 1280 bp, Homo Sapiens
  misc_feature (946)..(946): n is a, c, g, or t
gggagattaaccatcccagtccttctgtcagtctccgatgccatcatgcagcctggttaggagcaaaggaaaggggaaaaagaaaaacgactaattcatcttttcctgatcgtcaggaccctaaagaatggccgagccttgggggaacgagttggcgtccgcagctgccaggggggacctagagcaacttactagtttgttgcaaaataatgtaaacgtcaatgcacaaaatggatttggaaggactgcgctgcaggttatgaaacttggaaatcccgagattgccaggagactgctacttagaggtgctaatcccgatttgaaagaccgaactggtttcgctgtcattcatgatgcggccagagcaggtttcctggacactttacagactttgctggagtttcaagctgatgttaacatcgaggataatgaagggaacctgcccttgcacttggctgccaaagaaggccacctccgggtggtggagttcctggtgaagcacacggccagcaatgtggggcatcggaaccataagggggacaccgcctgtgatttggccaggctctatgggaggaatgaggttgttagcctgatgcaggcaaacggggctgggggagccacaaatcttcaataaacgtggggagggctcccccacgttgcctctactttatcaattaactgagtagctctcctgacttttaatgtcatttgttaaaatacagttctgtcatatgttaagcagctaaattttctgaaactgcataagtgaaaatcttacaacaggcttatgaatatatttaagcaacatctttttaacctgcaaaatctgttctaacatgtaattgcagataactttgactttcttctgaatattttatctttccttggcttttcccttgcttccccttttgccaatctcaacacccaagttgaagacttgtttttnaaaatggtttgtcctgatgcttttgtctaattaaaacactttcaaaacaggagaacaaaacacaaaccaggaacaaaggaaggaggagaggagcaagagatgacccagaacagcgaccaagaaggggggcgggcgccaaaaacacacccggggggggcgcagtagagcgccccaccagtaggtggcaagggggcccagagagcggatatacaagaagagcggcgccctaaacagcccagaggacacgaccggcacgcaggaccacccgcgggggatagggacccaggagtggcgcgaaacgggtggccagctgcggcaggcgcctacatcggga

SEQ ID NO: 262227 - DNA, 1042 bp, Homo Sapiens
  misc_feature (674)..(674): n is a, c, g, or t
  misc_feature (719)..(719): n is a, c, g, or t
  misc_feature (754)..(754): n is a, c, g, or t
  misc_feature (760)..(760): n is a, c, g, or t
ggcccggcaggtgctgtccttattcccagcccagtcaagagctaccggggctggctagtcatgggggagcccagtagagaggagtataaaatccagtcctttgatgcagagacccagcagctgctgaagacagcactcaaagatccgggtgctgtggacttggagaaagtggccaatgtgattgtggaccattctctgcaggactgtgtgttcagcaaggaagcaggacgcatgtgctacgccatcattcaggcagagagtaaacaagcaggccagagtgtcttccgacgtggactcctcaaccggctgcagcaggagtaccaggctcgggagcagctgcgagcacgctccctgcagggctgggtctgctatgtcacctttatctgcaacatctttgactacctgagggtgaacaacatgcccatgatggccctggtgaaccctgtctatgactgcctcttccggctggcccagccagacagtttgagcaaggaggaggaggtggactgtttggtgctgcagctgcaccgggttggggagcagctggagaaaatgaatgggcagcgcatggatgagctctttgtgctgatccgggatggcttcctgctcccaactggcctcagctccctggcccagctgctggctgctggagatcattgaagttcccgggcggnccggctggaagacaacgccagctgcccacaagtattaccctacangcgaagtctccgactaggccctccaagatcagggncttccntcaccagcactggcctttcttctacccacctctaaaagctgggcagtggagtctctgcctcacccaaagacttttcccccccaaactttgagtgtcttcccttctagactttcccatctccctggtggagatgtttccaaccttatgccgtgggtcctgccctgagccccttttccccaccacaaccaccacgggccagggcagagaaagggcaactcccaagaagccactgcactggggtaaacattaatggcaactactacccttgggggcctcagttac

SEQ ID NO: 262228 - DNA, 890 bp, Homo Sapiens
  misc_feature (736)..(736): n is a, c, g, or t
aggctggaccggtccggattcccgggatcaaatccatccgcaagactcacagcactgcgtatcaaaaagactttgaccaaaattgataattccctcgacaaattgaaaactgactgttgacattttcatagtgtcaagaaggaagatttgacgttgttgtcattgtccagctgggacctaatgctggcctgactggttgtcagaatggaatccatctgtctccctccccaaatggctgctttgacaaggcagacgtcgtacccagccatgtgttggggagacatcaaaaccaccctaacctcgctcgatgactgtgaactgggcatttcacgaactgttcacactgcagagactaatgttggacagacactgttgcaaaggtagggactggaggaacacagagaaatcctaaaagagatctgggcattaagtcagtggctttgcatagctttcacaagtctcctagacactccccacgggaaactcaaggaggtggtgaatttttaatcagcaatattgcctgtgcttctcttctttattgcactaggaattctttgcattccttacttgcactgttactcttaattttaaagacccaacttgccaaaatgttggctgcgtactccactggtctgtctttggataataggaattcaatttggcaaaacaaaatgtaatgtcagactttgctgcattttacacatgtgctgatgtttacaatgatgccgaacattangaattgtttatacacaactttgcaaattatttattacttgtgcacttagtagtttttacaaaactggctttgtgcatagggttaaagcttaatttttatgtgggtcttatgatttttattacagaaatgtttttaacactatactctaaaatgg

SEQ ID NO: 262229 - DNA, 483 bp, Homo Sapiens
  misc_feature (42)..(42): n is a, c, g, or t
aaaaaatcaaccaacctccccttgaagttttccccgtggggnagtgtcctaggaaaacttgtgaaaagctaatgcaaagcccactgaacttaatgccccagatctcttttaggatttcctctgtgttcctcccagtccctacctttgcaacagtgtctgtccaacattagtctctgcagtgtgaacagttcgtgaaatgcccagttcacagtcatcgagcgaggttagggtggttttgatgtctccccaacacatggctgggtacgacgtctgccttgtcaaagcagccatttggggagggagacagatggattccattctgacaaccagtcaggccagcattaggtcccagctggaaaatgacaacaacgtcaaatcttccttcttgacactatgaaaatgtcaacagtcagttttcaatttgtcgagggaattatcaattttggtcaaagtctttttgatcacgcagtgctgtgagtcttg

SEQ ID NO: 262230 - DNA, 1233 bp, Homo Sapiens
  misc_feature (265)..(265): n is a, c, g, or t
  misc_feature (354)..(354): n is a, c, g, or t
  misc_feature (488)..(488): n is a, c, g, or t
  misc_feature (498)..(498): n is a, c, g, or t
  misc_feature (507)..(524): n is a, c, g, or t
ggcccaagaagaaggggtgaaaggcccccctggaaggggtccaggtccaagaacccagggaccctgggacccaagggggacccaaaggcccaatggacccccttcggaggggaccccccaggggggccaccaggggcttccccaggatggaataagccccccttccttctggaaaatggaggcaccccccaggggcaaccaacaagcccccgggggggctggttgtggtagcccaaacccctggtccagccaggctggccctccnttggggaccaaacccaccccccccttaacaatgcctatctattcttaccccagaccaaaatggaaaagcttctttctttaccccccatncttcccaagggcaccccccccaggccaaggggcttctgaaatttcttaaaaaccagcaaaaaaacatttcaaatggtttaccatatgaaaatgctgtccctgcatcttttctgtctcaaaagatagccaggttnccccttcccnccacagctnnnnnnnnnnnnnnnnnnaaacaatttctgtgccaagatgaagaggaggccccaggcccatggggggctcctggccatgaggggctgttgcagcggcgccagggcacagggtgggcgagacacagcagaggtcctggcagcgcggcccaggtccccggcatctcctcccacgggtcgcagttacttattcagggagagtgactgcattcgttttcctgacaatgtggcatcgtcttttgctttcctttcctcttccttcttccgggcagcctcctcccgctgtttccggatgatggccagccgggccaggtcagccttggcttgctctgtcttcccggccaagtgcattttcatgtaacgctcttttgccttctgcttctcaatctcttctcgttctctcctcgaaagctcctttggcccgtccagatccagttgtgtgacctttttggttgtctgtgccacccggttggggttctcgatgtcgatgagcccttcaacgcctttgcgcttttgctggtagtcatcttcttcatcctcactctcatctgagtctagagatttcttctcctttttggggtcacctgcagccccatctccaccttctttttgctcctcttcttccctggccttctgcttctcagcctgcagctgcgcgtcgatctcctcagggcttgtatactgcctcgcccggcctttgtggcctccctttcttcctcctttaggcatt

SEQ ID NO: 262231 - DNA, 1365 bp, Homo Sapiens
  misc_feature (1086)..(1139): n is a, c, g, or t
  misc_feature (1267)..(1279): n is a, c, g, or t
aggctggaccggtccggattcccgggattgagcagtgagctggagaccaccagcttctttgactcagatgaggatgactccaccagcaggttcagcagctccacagaacagagcagtgcctcacgcctgatgagaagacacaagcggcggcggcggaagcagaaggtttctcggattgagcggtcctcgtccttcagcagcatcacggactccaccatgtcactcaacatcatcacggtcactctcaacatggaaaaatataacttcttgggcatctccattgtgggccaaagcaacgagcgtggtgacggcggcatctacattggctctatcatgaagggtggggccgtggctgctgatggacgcatcgagccaggagatatgttgttacaggtaaacgagatcaactttgagaacatgagtaatgacgatgcagtccgggtactgcgggagattgtgcacaaaccggggcccatcaccctgactgtagccaagtgctgggacccaagtccacgtggttgcttcacattgcccaggagcgagcccatccggcccattgaccctgcggcctgggtctcccacactgcagccatgaccggcaccttccctgcatacggcatgagcccctccctgagcaccatcacctccaccagctcctccatcaccagttccatccctgacacagagcgcctagacgacttccacttgtccatccacagtgacatggctgccatcgtaaaagccatggcctcccctgaatcaagggttggaggtccgtgaccgcatgtggctcaagattaccatcccctaatgctttcatcggctcaaatgtggtgggactggcctgtaccacaatgtggaagggcttcacggaaccggaaggaaggcccgcaagtatgccaacaaacctgctgaaaagctggctttcatcgccattaccgtcaacaaaaatcaccctcctccgagacagtggtaactaaatcctttggggggaactcttgggggaaacatgggccaaacctggtttcttccccgaatcaccaatgggttcccagtggggcccctccttgaccaaggaaacacctnnnnnnnnnnnnnnnnnnnnnnnnnnnnnnnnnnnnnnnnnnnnnnnnnnnnnntgggggtttttctcccgtgaaacaaagaatcccggcgacaaccccccgggaaaccctatatataaacccgcgccaccccccgggggtttttctccgcggaaagatgggggggctaaaacactatatannnnnnnnnnnnnagaaacgccccccccaagttttatccacccacccgcaaaaaggggggatcctcgtgaggacaacatgggtcttccctaccccgcgg

SEQ ID NO: 262232 - DNA, 1094 bp, Homo Sapiens
  misc_feature (430)..(438): n is a, c, g, or t
tgatcctgtccgccccacaatgccaatcttctctttaggtttgatcgtgaaggatactttctttaggacgagagggaggttttctcgttacctcatctctggcgttctcaaaaggtcacctctcccttcctgggcccagtcaggggagggagccttgttcttaattctggcaggtgcttccaaggacagagtcttaatgtagtgattgatcctctccacccgaggtgaatcgagcttctgtctcagatgccagtctgaccgtaaactggaacagccccgttaactggacagcataagagatggcgagacccgcataggctgggggaatctgcccgtgcataagaacgatcatcagcccccgtggtggtgatgagggcgatgctgatgaggtccagccgcacagccagccaccgcatcgcacacgtaaacnnnnnnnnnggagcttggttgtcatccagcagctcctggtatctgtgcagaaactcctgccctttattgtaggcgtggatggtggcaaggccctgtatgctggacgtgatgtgggagaggaaaggtgactgcgtgatattgtccagacgcttcagctcccgaatcaggaccctggagacaatgtgcaggactgaaaagaggatgacaaggggccccactgccacaaggaaccacgggaagactcctgcgatcattcccacacagaagaacaccaggataacgttctggatgaacatctcggcctggaacggcagccgcacgtcaacttcatccatgtctttggaaaacctgttgagaatcctccctgtgggggtcgtgtcaaaaaacttcatagggcttcgaaggatccttcggaaaagctcgtcatgcagccgggaggaagctcgcagcgtgcccttgacaaagacaactcctcgaatggctttcaggatcagcatgactgccatggagagggcgtagatgctggcatagtactgcatatgaggattgtccttcatgctgtcactcaccgaggtctcgttccctcgagtcacagtggtgtttccgcttccttgcttgatccagtaactcaaccaccaggtgctgaaggcggtgctgcctacatt

SEQ ID NO: 262233 - DNA, 955 bp, Homo Sapiens
  misc_feature (843)..(859): n is a, c, g, or t
tgacattgctgattgttgtaacacagtcacatcttgttatcccaacctatttgaaggaatgatctggttcattgtccccatatcttgtgtgatctgtaatgacatcatggcctatatgtttggctttttctttggtcggaccccactcatcaagctgtccccgaagaagacctgggaaggcttcattgggggcttctttgctactgtggtgtttggccttctgctgtcctatgtgatgtccgggtacagatgctttgtctgccctgtggagtacaacaatgacaccaacagcttcactgtggactgtgagccctcggacctgtttcgcctgcaggagtacaacattcctggggtgatccagtcagtcattggctggaaaacggtccggatgtaccccttccagattcacagcatcgctctctccacctttgcctcgctcattggcccctttggaggattcttcgcaagtggattcaaacgagcctttaaaatcaaagactttgccaataccattcctggccatggaggcatcatggatcgctttgactgccagtatctgatggccacctttgtcaatgtatacatcgccagttttatcagaggccctaacccaagcaaactgattcagcagttcctgactttacggccagatcagcagctccacatcttcaacacgctgcggtctcatctgatcgacaaagggatgctgacatccaccacagaaggacgagtaggggccacccagggccaggagaacaggaacagaactgagcaggggcaggtctccaaggcaagccccagctggtgtgacttagacaatgacgaggcttcaactcactgtcnnnnnnnnnnnnnnnnnggagggtattttttatttgtgggttcaaaaaatctgtatatacagtctatgtgtttagaatttgtgttgtaagtaaactacagctttgagttcgaa

SEQ ID NO: 262234 - DNA, 2297 bp, Homo Sapiens
tggtaccggtccggaattacgggatatcgtcgacccacgcgtcgctgcctcaggcattggcaagctcaccaacctggaagagttcatggctgccaacaacaacctggagctggtccctgaaagtctctgcaggtgcccaaagctgaggaaacttgtcctgaacaagaaccacctggtgaccctcccagaagccatccatttcctgacggagatcgaggtcctggatgtgcgggagaaccccaacctggtcatgccgcccaagcccgcagaccgtgccgctgagtggtacaacatcgacttctcgctgcagaaccagctgcggctagcgggtgcctctcctgctaccgtggctgcagctgcagctgcagggagtgggcccaaggaccctatggctcgcaagatgcgactgcggaggcgcaaggattcagcccaggatgaccaggccaagcaggtgctgaagggcatgtcagatgttgcccaggagaagaacaaaaagcaggaggagagcgcagatgcccgggcccccagcgggaaaggtgcggcgttgggaccagggcctggagaagccccgccttgactactccgagttcttcacggaggacgtgggccagctgcccggactgaccatctggcagatagagaacttcgttgcctgtgctggtggacggaagccttccacggcaagttctacgaggctgactgctacattgtgctcaagacctttctggatgacagcggctccctcaactgggagatctactactggattggcggggaggccacactcgacaagaaagcttgctctgccatccacgctgtcaacttgcgcaactacctgggtgctgagtgccgcactgtccgggaggagatgggcgatgagagcgaggagttcctgcaggtgtttgacaacgacatctcctacattgagggtggaacagccagtggcttctacactgtggaagacacacactatgtcaccaggatgtatcgtgtgtatgggaaaaagaacatcaagttggagcctgtgcccctcaaggggacctctctggacccaaggtttgttttcctgctggaccgagggctagacatctacgtatggcggggggcccaggccacactgagcagcaccaccaaggccaggctctttgcagagaaaattaacaagaatgagcggaaagggaaggctgagatcacactgctggtgcagggccaggagctcccagagttctgggaggcactgggtggggagccctctgagatcaagaagcacgtgcctgaagacttctggccgccgcagcccaagctgtacaaggtgggcctgggcttgggctacctggagctgccacagatcaactacaagctctccgtggaacataagcagcgtcccaaggtggagctgatgccaagaatgcggctgctgcagagtctgctggacacgcgctgcgtgtacattctggactgttggtccgacgtgttcatctggctcggccgcaagtccccgcgcctggtgcgcgctgccgccctcaagctgggtcaggagctgtgcgggatgctgcaccggccacgccatgccacggtcagccgcagcctcgagggcaccgaggcgcaggtgttcaaggccaagttcaagaattgggacgatgtgttgacggtggactacacacgcaatgcggaggccgtgctgcagagcccgggtctctccgggaaggtgaaacgcgacgccgagaagaaagaccagatgaaggctgacctcactgcgcttttcctgccgcggcagccgccatgtcgctggccgaggcggagcagctgatggaggagtggaacgaagacctagacggcatggagggtttcgtgctggagggcaagaagtttgcgcggctgccggaagaggagttggcacttctacacgcaggactgctacgtcttctctgcaggtacctgggtgcctgtgcagtacgagccgcacgacaccaccgacgacccggggaacaacggcgggcggcacagaaggcgagaagacaaccgcggaggcagaggtaaaagccaggccagcggaaggcctccagggcatcgggtaccccgggagggacgggaaagccccaacagggcgggctccacttgacattacgccggaacaaaatctcgacccactccgggaacagagaaggctccactacacacaaggaaaccccagccgccactcaaaaaggtcaccccggcaaacaggagcaggcaaacacgattaaaaaacaagaaccgcgcgcgccaaaaccaccacccaccgtgccaacatcgac

SEQ ID NO: 262235 - DNA, 1116 bp, Homo Sapiens
  misc_feature (70)..(128): n is a, c, g, or t
aggctggaccggtccggattcccgggatgcaggaggaaacagtaccggctggaggccggtcttgcaggannnnnnnnnnnnnnnnnnnnnnnnnnnnnnnnnnnnnnnnnnnnnnnnnnnnnnnnnnntcagaggggtgggctttggagatcagagggtcgacgctgcttcgttgcctggactctggtttccgccctggagcaagccggggcctggtcggcagctgggccgccatggagtccacgctgggcgcgggcatcgtgatagccgaggcgctacagaaccagctagcctggctggagaacgtgtggctctggatcacctttctgggcgatcccaagatcctctttctgttctacttccccgcggcctactacgcctcccgccgtgtgggcatcgcggtgctctggatcagcctcatcaccgagtggctcaacctcatcttcaagtggtttctttttggagacaggcccttttggtgggtccatgagtctggttactacagccaggctccagcccaggttcaccagttcccctcttcttgtgagactggtccaggcagcccttctggacactgcatgatcacaggagcagccctctggcccataatgacggccctgtcttcgcaggtggccactcgggcccgcagccgctgggtaagggtgatgcctagcctggcttattgcaccttccttttggcggttggcttgtcgcgaatcttcatcttagcacatttccctcaccaggtgctggctggcctaataactggcgctgtcctgggctggctgatgactccccgagtgcctatggagcgggagctaagcttctatgggttgactgcactggccctcatgctaggcaccagcctcatctattggaccctctttacactgggcctgggatctttcttggtccatcagcctagcccttcaagtggtgtgagcggccctgaatggatacacgtgggatagcccggcccttttgcctccctgaaccggggactcagggggctgcccctggggcctggggcattgcccttgcactcctccctgctatgcccaaagtgccgtcgggcaacaagctgggggaaatgggcccaaaaagattaacctggcc

SEQ ID NO: 262236 - DNA, 1399 bp, Homo Sapiens
tggagcaagccggggcctggtcggcagctgggccgccatggagtccacgctgggcgcgggcatcgtgatagccgaggcgctacagaaccagctagcctggctggagaacgtgtggctctggatcacctttctgggcgatcccaagatcctctttctgttctacttccccgcggcctactacgcctcccgccgtgtgggcatcgcggtgctctggatcagcctcatcaccgagtggctcaacctcatcttcaagtggtttctttttggagacaggcccttttggtgggtccatgagtctggttactacagccaggctccagcccaggttcaccagttcccctcttcttgtgagactggtccaggcagcccttctggacactgcatgatcacaggagcagccctctggcccataatgacggccctgtcttcgcaggtggccactcgggcccgcagccgctgggtaagggtgatgcctagcctggcttattgcaccttccttttggcggttggcttgtcgcgaatcttcatcttagcacatttccctcaccaggtgctggctggcctaaaaactggcgctgtcctgggctggctgatgactccccgagtgcctatggagcgggagctaagcttctatgggttgactgcactggccctcatgctaggcaccagcctcatctattggaccctctttacactgggcctggatctttcttggtccatcagcctagccttcaagtggtgtgagcggcctgagtggatacacgtggatagccggccctttgcctccctgagccgtgactcaggggctgccctgggcctgggcattgccttgcactctccctgctatgcccaggtgcgtcgggcacagctgggaaatggccagaagatagcctgccttgtgctggccatggggctgctgggccccctggactggctgggccacccccctcagatcagcctcttctacattttcaatttcctcaagtacaccctctggccatgcctagtcctggccctcgtgccctgggcagtgcacatgttcagtgcccaggaagcaccgcccatccactcttcctgacttcttgtgtgcctccctttcctttccctcccacaaagccaacactctgtgaccaccacactccaggaggcagccccatccccttccagcccctaagtaggccctcccctccctaaatctgcttccgcaccacctggtcttagccccaaagatgggccttctctctcccagataagttggtcctccctctgcctttcctctcaagcccccaaagagcaaaggcaacagcaagaccagcgggttcttgcaacactgtgaggggccagccagggcggccccaataaagcccttgaatactttgaacaaaacacaaaaacaaac

SEQ ID NO: 262237 - DNA, 832 bp, Homo Sapiens
  misc_feature (676)..(676): n is a, c, g, or t
  misc_feature (683)..(683): n is a, c, g, or t
  misc_feature (751)..(751): n is a, c, g, or t
  misc_feature (763)..(763): n is a, c, g, or t
  misc_feature (772)..(772): n is a, c, g, or t
  misc_feature (785)..(785): n is a, c, g, or t
ccctggatggtcggtctcaaacctctggcctcaagcatcctcccatctcatccttcccaatagctgggattacaagtatgggccatcatgcctgagtaaattcttaataaatgctttctgaatggatggacggaagtatgaatgaatggcgaagtgaatgaaggaatcaacttctttctccttagtgggtgtgtgtgggcacagcaggctgaccctcgcctgtcagcgaacccaccccctcctccccggcacaaggagctacagctctgtgtgtctctcttcaggctcctcgagctcctggatcttttggggcagcgccttcttccagaactggagcctgtgggccttcagagcccggcccaccgcagcctgtaggttcagctgcaggtattgctcctcctggtcgaacagcggccagtgtggcagaccctcgccattggggttcccatttctcgcaaagttggcccagtacttcatcatcttcctgcttagctgctcctcttcctcagtgaatttaatgtagttgcccccaaagaaacttctgaaaacaaaaggaagctcatcaccatggtctgccttcatgtgcggtggcctgatgttcttgagccagctgggctgatgctggaactcgtagaagtacacaggggcccggggaacactgaaaatgtgctacttnggagtgncagggattcacaaacatgggagtccgccatcatctcctgggaactttcgctttggaagggtcttgggntttccccatttntccccaatntacttcttccctnagcaggttacccaaatttagggagggcaacattagcagcgtttaaca

SEQ ID NO: 262238 - DNA, 1074 bp, Homo Sapiens
ctgatctcatggggagcccccgggtcctcggatatgaccacgctactgcactggggaagtcaccctaccgccttcgatgtcagttatgcagcggcactgcccgcagcagccctgtggcacaaactcaggagcctctgggtgcccggcggtcagggcggctctggaaaccctgtgcgtcggcttctaggctgcctgggctcggagacgcgccgcctctcgctgttcctggtcctggtggtcctctcctctcttggggagatggccattccattctttacgggccgcctcactgactggattctacaagatggctcagccgataccttcactcgaaacttaactctcatgtccattctcaccatacccagtgcagtgctggagttcatgggtgacgggatctataacaacaccatgggccacgtgcacagccacttgcaaggagaggtgtttggggctgtcctgcgccaggagacggagtttttccaacagaaccagacaggtaacatcatgtctcgggtaacagaggacacgtccaccctgagtgattctctgagtgagaatctgagcttatttctgtggtacctggtgcgaggcctatgtctcttggggatcatgctctggggatcagtgtcccctcaccatggtcaccctgatcaccctgcctctgcttttccttctgcccaaaaaagcgggaaaatggcaccacttgctggaagtgcaggtgcgggaatctcctggcaaagtccagccaggtggccatttgaggtctgtcgggcatgccctacagttcgaagctttgcccaacagggaagggcgaagcccagaaagtttaaggaaaagctgggcaagaaataaaagaccctcaaccacaaaggaggctgtggccctattccagtcaacctcccgggaaccactaaataatttccgggaatgcttgctggaaaagggggaattccctctaccattgggggggcacgctgggtgaacccaccggggggctcggaaagcagctgggggaaaccttgggccacactttggtttccccacacccaatggccgtttcccccaccgggc

SEQ ID NO: 262239 - DNA, 920 bp, Homo Sapiens
  misc_feature (760)..(760): n is a, c, g, or t
gggagtgggcagggtcacagggcaaggtcccgcgggccgctgggtgcggcgacttccgtgctcccggcgagcgggcggagagcgggggccgcactggggagtgtgggctgggccgcagatgtcatgtggcctgtgttttggaccgtggttcgtacctatgctccttatgtcacattccctgttgccttcgtggtcggggctgtgggttaccacctggaatggttcatcaggggaaaggacccccagcccgtggaggaggaaaagagcatctcagagcgccgggaggatcgcaagctggatgagcttctaggcaaggaccacacgcaggtggtgagccttaaggacaagctagaatttgccccgaaagctgtgctgaacagaaaccgcccagagaagaattaatggaggacacagggccctatggtcctactgtgggtggtgacttgtcctgctaccatgttgacagagccccagaacccacatctaattggctttgttgcttattctggcccttcccacaccacacagccacacaaatactggctgctccttgatggccaggcagacccagcagcagccgaggggccagtgaagaggaaggccgcatctgttgtgtggtggccacaagcactcaggcatctgagtttactggtgcactgctgggaggagagttatgagatgaacattggctgtgcaatctctgtgggcaggcggtttggcctctagtgggaatggctggggatttgggcgttgcctttangagggatacctgcatgtctagttccagtctgcactggaaagaattcaaatatgcacctggctcccttcactattttgccctatcctttgggctcatttctactgaaatctgtcttgtcagctcaggaatggggattccccaagaaagaaaacacttttct

SEQ ID NO: 262240 - DNA, 1000 bp, Homo Sapiens
  misc_feature (642)..(642): n is a, c, g, or t
gtagcgaggcctgggtggcgaattcggcacgagggagccgttgagcagctgaacagaggccatgccggggcactccgaggcctgagacgaccacgcctgtgccgctgaggaccttcatcagggctccgtccacttggcccgcttggctgtccaatcacactccagtgtcaaccactggcacccagcagccaagagaggtgtggcgtggccctggggacgcatggctgaggcaggaacaggtgagccgtcccccagcgtggagggcgaacacgggacggagtatgacacgctgccttccgacacagtctccctcagtgactcggactctgacctcagcttgcccggtggtgctgaagtggaagcactgtccccgatggggctgcctggggaggaggattcaggtcctgatgagccgccctcacccccgtcaggcctcctcccagccacggtgcagccattccatctgagaggcatgagctccaccttctcccagcgcagccgtgacatctttgactgcctggagggggcggccagacgggctccatcctctgtggcccacaccagcatgagtgacaacggaggcttcaagcggcccctagcgccctcaggccggtctccagtggaaggggcctgggcagggcnccatcggagccctgcctcaccaagggggcctccgggccccgactacgtggcacaccccgagcgctggaacaaatacagcctgaaagatgtgaccgaggtcaccgagcagagcaatcaggccaccgcccctggccttcctgggctccccagagcctggctgcccccactgactgcgtgtccctccttcaacaggatccctccagctgtggggaaggggaagggtcatcttccccaaaccagtcccgaagggtcgaagtcacaacctaaaaggagaagggtccctgggggaaagggggaaaacccagccgggggcgggccttgggaaatcctgcccacaaaacggggtcgaagggtcccg

SEQ ID NO: 262241 - DNA, 1139 bp, Homo Sapiens
gccaacgggcaccgcaccgcctcggacgccggcttccccgttggctcccacgtccagtaccgctgcctgccagggtacagcctcgagggggcagccatgctcacctgctacagccgggacacaggcacacccaagtggagcgatagggtccccaaatgcgccttgaagtacgagccgtgcctgaacccgggggttcccgagaatggctaccagacgctgtacaagcaccactaccaggcgggcgagtctctgcgcttcttctgctatgagggctttgagcttatcggcgaggtcaccatcacctgtgtgcccggccacccctcccagtggaccagccagcccccactctgcaaagtgacccagaccacagatccatcacggcagctggaaggggggaacctggccctggccatcctgctgcctctaggcttggtcattgtcctcggcagtggcgtttacatctactacaccaagcttcagggaaagtcccttttcggcttctcgggctcccactcctacagccccatcaccgtggagtcggacttcagcaacccgctgtatgaagctggggatacgcgggagtatgaagtttccatctgaaccccaagactacagctgcaggacccaggacgcccctcccctcctcattcgggcagagggaaatacgggacccggtctctgcctcctggctgccctcctccctggctgtgtaaatagtctccctatccccacgagggggctttgatgggccctggagatcctacagtaaataaaccagcatcctgccgcccaaagccgcctcttctcagttgccaaacgaggggcctgccccccgccctaccggcttttggattctgggaggggaactctgcctcccctgcaaatcttgcagcccctcctgcccagggcacccctcaaggactgcccccgatagctctactgttcccttggccacgaaggtgcccccctcccagatgcccctggccctaggcctgactccggccaggagggtcagaagaaggacaaaggggagagctgggacaagccttgcccccttcctgccatctccccaacccacagtctctccacctttgcttctgaattcttgtttttgagcaataaacagaaaatcaccactt

SEQ ID NO: 262242 - DNA, 803 bp, Homo Sapiens
  misc_feature (253)..(253): n is a, c, g, or t
tccctctgcccgaatgaggaagggaaggggcgtcctgggtcctgcagctgtaatcttggggttcaagatggaaacttccatactcccgcgtatccccagcttcatacagcggggttgctgaagtccgactcccacggtgatggggctgtaggagtgggagcccgagaagccgaaaagggactttccctgaagcttggtgtagtagatgtaaacgccactgccgaggacaatgaccaaacctagaggcagcagngatggccagggccaggttccccccttccagctgccgtgatggatctgtggtctgggtcacttccagttttcggttgtccaggagctcctcataggcaacttagcagagtgggggctggctggtccactgggaggggtggccgggcacacaggtgatggtgacctcgccgataagctcaaagccctcatagcagaagaagcgcagagactcgcccgcctggtagtggtgcttgtaaagcgtctggtagccattctcgggaacccccgggttcaaggcacggctcgtacttcaaggcgcatttggggaccctatcgctccacttgggtgtgcctgtgtcccggctgtagcaggtgaagcatggctgccccctcgaggctgtaccctggcaggcagcggtactggacgtgggagccaacggggaagccggcgtccgaggcggtgcggtgcccgttggcaatctcgccagggtcagcacaagtcaggatcttttggcaggcgggcggcgcggcgctccaagacaggtcccactggcaagtgagaatgtcggagc

SEQ ID NO: 262243 - DNA, 943 bp, Homo Sapiens; identical to SEQ ID NO: 99413

SEQ ID NO: 262244 - DNA, 1187 bp, Homo Sapiens; identical to SEQ ID NO: 99414
  misc_feature (835)..(835): n is a, c, g, or t
  misc_feature (1070)..(1078): n is a, c, g, or t
  misc_feature (1086)..(1087): n is a, c, g, or t
  misc_feature (1092)..(1092): n is a, c, g, or t
  misc_feature (1094)..(1094): n is a, c, g, or t

SEQ ID NO: 262245 - DNA, 913 bp, Homo Sapiens; identical to SEQ ID NO: 99415

SEQ ID NO: 262246 - DNA, 948 bp, Homo Sapiens; identical to SEQ ID NO: 99416

SEQ ID NO: 262247 - DNA, 905 bp, Homo Sapiens
agggtcccagttcctttgcagaggggaggttccaacgaggacattcctggtagacaggtcggtgggacaaagggccaggcccatctgcaggatgctttccccgtggctcctcacagagcccactttccaggactactctctgactagacacttcctctccaagggcactagggagccatggaggaccatcggcagggcgggcatggtcagttcggtgatcagaatgacccacgagcaggtgcttttgccccctgtccagcgtccagcacacagcatgaacttggtcaccttctgagggtgaacttgcgcacacacgtcattggaaataacatggaggtccacacactgaagtttctttggggtcaagaactcctctggttcaatgctgccccagcctgaggcgtagcaggtggtccccagtgctggctcctgggtgggcaggtccatgaccttcacagcatccgtgagctcggcaggctctgacaggcggagcagcatgaggtcgtggctggagtcatcacctggcctgaggaatcgattcttcaggaggctcatatcgtagagcgggtgtgggaagctgtggctgacctgaaatacctggcctgtgtcttcaggatgaaacaggctgtgccgacccagcaagatcacgcttttgttcctgatgcagtgggcagctgtgaggacccactgggggtgcaccagaacaccgccgcagactgccctgccacgagaggccacaagcacctgccagggttgggaatgcttctcgcactcccagcctcccacaatccgagacaggatgaggggtgcagcaccaatccacgtcacggacagggtgaggaagacaaccgggacccacatggtgacacagctctccgggtgcaggtggtaagcttggggctccc

SEQ ID NO: 262248 - DNA, 905 bp, Homo Sapiens; identical to SEQ ID NO: 99417

SEQ ID NO: 262249 - DNA, 865 bp, Homo Sapiens; identical to SEQ ID NO: 99418

SEQ ID NO: 262250 - DNA, 1307 bp, Homo Sapiens
  misc_feature (661)..(661): n is a, c, g, or t
aggctggaccggtccggattcccgggatgaaacagcctggactcactggtgtttgagtccttgattcccaagcccatcctgcagcgctacgtctccctcctgatagagcaccgtcggatcattctctctggccccagcggcactgggaaaacctacctggccaaccggctgtctgagtatatagtgcttcgagagggacgggagttgacagacggggttatcgccacctttaacgtggaccataagtccagcaaggaattgcgccagtacctgtccaaccttgctgaccagtgcaacagtgagaacaatgctgtggacatgcccctcgtcatcatcctggacaacctacaccacgtgagctctctgggcgagatcttcaatgggctgctcaactgcaagtaccacaaatgcccttacataattggcacaatgaaccaggctacctcttcgactcccaacctgcagcttcaccataacttcagatgggtgctttgtgccaaccacacggagcctgtgaagggtttccttggccgattcctgaggaggaagctcatggaaacagagatcagtgggcgggtgcgcaatatggagctggtaaaaatcattgactggattcccaaggtctggcatcacctcaaccgcttcctggaggctcacagtntcctcgtgacgtcaccatcggcccccggctcttcctgtcatgccccatcgatgtggacggctccgagagtgtggttcaccgacttgtggaactattccattatcccctatctcctggaagccgtcagagaaggactccacctctatggaaggcgcgcccccctgggaagatcctgccaagtgggtgatggacaacatatccatgggcagccagcccacaacagcacgagtggacctcccctgctgcagttacggcctgaggatagtcaggcctctcggaccgcgctactccatgcctacgggagggatcgacaagcaagcagatgccccccagtgatgctgcaggtgacccgctgactgaaccatgctgacgaggctgcaggaggcacgcaactactccagcccccagagctaagcacagcgactcccaacagccaaccagcgcatcaccgaagaccatctgggaactaacacagccaagggacgtccagctcagcgcacagggcgacccggaagaccaagcgccccctcatcacacaaccctaaacggcatgaacaccctgcactaccaccaagatcaacccagaacccacgaccgcccaggacgacagccaccaagccacaagacaaagagccggcaggaaaac

SEQ ID NO: 262251 - DNA, 1896 bp, Homo Sapiens
  misc_feature (130)..(138): n is a, c, g, or t
  misc_feature (158)..(158): n is a, c, g, or t
  misc_feature (241)..(241): n is a, c, g, or t
  misc_feature (1053)..(1053): n is a, c, g, or t
  misc_feature (1069)..(1069): n is a, c, g, or t
gccagtttagtccataagggtgggccaacaaggcctgaaggaaaattgagggtggagaccagtgacccaaaaccctttattctcggtggatttatccatccctggatccatttgttaaaacaaagaaggnnnnnnnnntccaaaaccagaaatacacntgaataaacaggtcagagagttcctgttggagggaactttcttagcactgaagaaaaagcaacccacaaaaaaaactcatccncccacagaactggaataagatgacgaaaaacgcaagattatctacaggccctcccgccccccacgcagccccaggatccaggaacactgtgccaggagttacattccaaacgagcaggagttattttattttgcgtgcctgcagtcccccacgcagggtggcttcctgtccgaggacggagcaggcttggccgtggtccactccaatcagtctatcttcacagcagcatagatcttgcgaacaaacatgtaggctgcatagaagccgatggtacccgttagcagccagaaggacaagaccatgagggccgtgtagccaaagtagaggagagaggggatgaactccacgatgtccagcttgttaacgaaataaaagatggcataaaccaggacgtagaatgcagagcccccggagactaggaaatttctccaccaccagcggtaatcctctgcacacagctggaagtacaccatgacgatgctgatttgtgaacaggataccaccaggatgatgaaaacaaggaacaggaagccaaagaggtaatagaactgattctcccagatagcactgaagatgaagaagagctcgatgaacatggcgccgaagggcaagatcccagccatgaggatgcccacaaatcggttcatgtaccaccgctgctcggggatctgccggggaatctggttggtgcgcacagggttgtcatatggctgctttcggaagccgaagtagtagcccaagtagacgaggggcagggagatcccgaaccacatgcacagcagagccaccatggtgggaaagggcaccgctcntgatgagtgctttccncaaatgaagcaattcaatacgaagcagatgccaaaaaccacaccagggtacagagttgccgtacagaaggctcctttcttccaccgatggccttttaaagtgcgggtacagacggccagcagaaaattccgccaaacacccccatgaacatgaagaggaagcaggctgtggtcatgagagctcccccgccggaggggcgacagcatccccaagcatggctacaaagatgacgatgaggatcatacagaacagctgaatgcctgagcccagcagggagctgaggatcatggggtactgggggggcctgaagacgtcgccgtgcaccaacttccacccagactcctccatggtgtcttcaatgtcatcctccttgttgtagttggcaatgtccttccggagggtccgaatgataatcatgctcaggatacctcgaagcggacgacacggtacgtgtgctcctggtcctcttccatgtcctcccgatgatagtaaaggatgaatgagaggtggttgtgcaggtagatcttgttgacatctgtgaagccgagccggtagccgtgttcaaactgcacatctttttccttcttcttgtcatcgctgtctcggttggagtagagctccagccgggtggccacaggcaggttgtcagcaatgaggtggacgtagtagtcttctgtgatccgctcggccacgagtcggctctgctccactgtcagggtcactggcttgttggactggctgcacagaacttcacacttcttctcgctgttcatgagaacctggaaaggggtgttgacaatccggtcccctctcagcacctctccccc

SEQ ID NO: 262252 - DNA, 789 bp, Homo Sapiens
  misc_feature (21)..(21): n is a, c, g, or t
  misc_feature (767)..(767): n is a, c, g, or t
tgtagttttgttctgacaagnattgggagcactttgtacagtgttgttttttcccttcttttcttcacataatgtgccacatgtaatctcttcattttgacctcttcatctcttcacgttctcagtccactccttcctgttcctcccctacttcctccctggatggtgagctcctctgggatgctgaggtgccttcttcactgggagtccagatcagggctggggtcagcctcaagagattctggccagggagccctgtggtgggggcagggagtgtgcttctgctggcacaagtcgcctctccttctgtgggagcccagaaggtcccctcccccttggcgcagcccccattcccgggcatcagggcctcgtgggggcctcatggtgccatgtctacaggtgccctttcccaccatggtggctctgctgtgcatgtggttcgggatctccctgcccctcgtctacttgggctactacttcggcttccgaaagcagccatatgacaaccctgtgcgcaccaaccagattccccggcagatccccgagcagcggtggtacatgaaccgatttgtggggtgagtcctccagcagaggcaagagcaggggaacgtggaagagggtacgcccccctccgccaccagaagggtgcggcaaccagagttcctgccgcttcagccggctctaatagagtttatgaaagcttaacttcactccaagatcaaggtgaccaggttgtaggcagacttggtgtcatcctaggaaccagnacaaggaaggggaaggatggaa

SEQ ID NO: 262253 - DNA, 881 bp, Homo Sapiens
tggccacggccgacctagacctcatgaagagtcaccggtttgaggacgttcctggggtgcggcggcacttggtgcggaagaatgccaaaggttccacacagagtggccgagaagggcgggagcctggccccacacctcgggcccgaacccgggccccccacaagccccatgaggtgtttgtggagctgaatgagttgctcctggacaaaaaccaggagccccagtggcgggagacagctcgctggatcaaatttgaagaggacgtggaggaggagaccgagcgctgggggaagccccacgtggcctccctctccttccgcagtctcctggagctccgcaggaccctggcccatggggctgtgctcttggatctggaccagcagaccctgcccggagtggcccaccaggtggtggagcagatggtcatctctgaccagatcaaggccgaggacagggccaacgtgctgcgggctctgctgttgaaacacagccacccaagtgatgagaaggacttctccttcccccgcaacatctcagctggctccctgggctccctgctggggcatcaccatggtcagggggctgagagtgacccccacgtcaccgagcctctcatggcgaggtgttcctgagacccggctggaagtggagcgagagcgtgagctgccgcctccagcaccaccagctggcatcacccgctccaagtccaagcacgagctgaaacttgctggagaagattcctgagaatgccgaaggccacggtgggtccttgggggctgcgtggaattccctcttcccgccccaccatgggcctttttgggcggctccggggaggtttgtgaaatttgaaacccaatgttttgaaggtgcccggtgccctg

SEQ ID NO: 262254 - DNA, 975 bp, Homo Sapiens
tgggggacaggccggcgcggctgggagcgggtgggcggccgggaggccggagcagcacggccgcaggacctgaagctccggctgcgtcttcccgcagcgctacccgccatgcgcctgccgcgccgggccgcgctggggctcctgccgcttctgctgctgctgccgcccgcgccggaggccgccaagaagccgacgccctgccaccggtgccgggggctggtggacaagtttaaccaggggatggtggacaccgcaaagaagaactttggcggcgggaacacggcttgggaggaaaagacgctgtccaagtacgagtccagcgagattcgcctgctggagatcctggaggggctgtgcgagagcagcgacttcgaatgcaatcagatgctagaggcgcaggaggagcacctggaggcctggtggctgcagctgaagagcgaatatcctgacttattcgagtggttttgtgtgaagacactgaaagtgtgctgctctccaggaacctacggtcccgactgtctcgcatgccagggcggatcccagaggccctgcagcgggaatggccactgcagcggagatgggagcagacagggcgacgggtcctgccggtgccacatggggtaccagggcccgctgtgcactgactgcatggacggctacttcagctcgctccggaacgagacccacagcatctgcacagcctgtgacgagtcctgcaagacgtgctcgggccctgaccaacagaaactgcggcgagtgtgaagtgggctgggtgctggacgaaggcgcctgtgtggatgtggaacaaatgtgccggcccaaccgcctccctgcaacgctgcccagttctgtaagaaaccccaacgggttcctacacgtgcgaaagagtgtgactcccacctcaagggggcttccacaggggaaagccccaggaaactggaaagcagggttatctcggggctagcccaggaaacc

SEQ ID NO: 262255 - DNA, 1020 bp, Homo Sapiens
gtgagctgcatcggctcaacatccccaaccctgcccagacctcggtggtggtggaagacctcctgcccaaccactcctacgtgttccgcgtgcgggcccagagccaggaaggctggggccgagagcgtgagggtgtcatcaccattgaatcccaggtgcacccgcagagcccactgtgtcccctgccaggctccgccttcactttgagcactcccagtgccccaggcccgctggtgttcactgccctgagcccagactcgctgcagctgagctgggagcggccacggaggcccaatggggatatcgtcggctacctggtgacctgtgagatggcccaaggaggagggccagccaccgcattccgggtggatggagacagccccgagagccggctgaccgtgccgggcctcagcgagaacgtgccctacaagttcaaggtgcaggccaggaccactgagggcttcgggccagagcgcgagggcatcatcaccatagagtcccaggatggaggacccttcccgcagctgggcagccgtgccgggctcttccagcacccgctgcaaagcgagtacagcagcatcaccaccacccacaccagcgccaccgagcccttcctagtggatgggccgaccctgggggcccagcacctggaggcaggcggctccctcacccggcatgtgacccaggagtttgtgagccggacactgaccaccagcggaacccttagcacccacatggaccaacagttcttccaaacttgaccgcaccctgccccacccccgccatgtcccactaggcgtcctcccgactcctctcccggagcctcctcagctactccatccttgcacccctggggggcccagcccacccgcatgcacagagcaggggctaggtgtctcctgggaggcatgaagggggcaaggtccgtcctctgtgggcccaaacctatttgtaaccaaagagctgggagcagcacaaggacccagcctttgttctgcacttaataaatggttttgctac

SEQ ID NO: 262256 - DNA, 909 bp, Homo Sapiens
gcgttgtgggaggtctcatctcggggccatgctgatctgggctctgagagctggtgtccgctgctcctcccctcccatttctcaacaggaggccccgagttcctgaagacgcccctggggggcagcttcctggtgtacgagtccttcctctaccggcgggagaaggcggccggggagaaggtgtattggacctgccgggaccaggcccgcatgggctgccgcagccgcgccatcacccagggccggcgggtcatggtcatgcgcaggcactgccacccaccggacctgggcggcctggaggccctgcggcagcgggagcacttccccaacctggcgcagtgggacagcccagatcctctccggcccctggagttcctgaggacttccctggggggcaggttcctggtgcacgagtccttcctctacaggaaggagaaggcggctggggagaaggtgtacgtggatgtgccgggaccaggctcggactgggctgccgcagccgcgccataacccagggccaccgcatcatggtcatgcgcaagccactgccatcagcctgacctggcaggcctggaggccttgaggcaacgggagcggctccccaccacggccccagcaggaggacccagaaaaagattcaagttcagctgtgcttcaagacgtgtttctcctgaaagccagcagatttatgggggacatccaaagacgtcagactggatggcggagtcccagtgaggcgatgtggggcagaggagctccgagcggcacccaagtgggtttccactccacacaggcacttccaatcacctaggttggttagcaggaattttttcattctccaagcattcggggcttcgcggttctcagggccccaggagcattgggtggggcccagggcgggaagggtcc

SEQ ID NO: 262257 - DNA, 993 bp, Homo Sapiens
  misc_feature (75)..(136): n is a, c, g, or t
  misc_feature (139)..(151): n is a, c, g, or t
ggcacctcccggggcgcgggaaagaactcgggctcgtccccctcgcccccagagtggggaaagggttccccgttnnnnnnnnnnnnnnnnnnnnnnnnnnnnnnnnnnnnnnnnnnnnnnnnnnnnnnnnnnnnnntgnnnnnnnnnnnnntggtgatggcgcggctggggcaccccatgcgggcctgttccgggcaggtccaatacaccttttccccggccgccttctcccgccggtagaggaaggactcgtacaccaggaagctgccccccaggggcgtcttcaggaactcggggctcctggggtcccccgctgcgccgtgttggggcgtttctcccactgcctcaggggcctccaggcctcccaggtcgggcgggtggcagtgaccacgcatgacagtcacccgtcggccctgggtgatggcgcggctgcggcagcccatgcgggcctggtcccggcaggtccaatacaccttctcacccagccgccttctcccgccggtagaggaaggactcgtacaccaggaagctgccccccaggggcgtcttcaggaactcagggcctcccgggtctgcgtccatgtcctggtgctcgtctggggcctcgggctgggttggcagctcctggtcttcgacctttgctcgctttctgggccgaggcctggtgagagtcaggggacccggacccctgcggtagagcaaactatccacgcctcggagcagcgtgtccacttggctcccagggccgtcctgcccagcctgcagcgtctccacggccttctcctgctgccgccgggcttccaggccctccatatcgggctggtggcagtgcccacgcatcacagtcacccgctgtccctgggtgatggcccggctccggcagccgtgcagcgcgtggtcccggcaggtccaatacaccttgtccccgacagccttctcccgcttgtagaggaacgactcgtgtaccaggaagctgcccccgtagcgccacac

SEQ ID NO: 262258 - DNA, 1021 bp, Homo Sapiens
  misc_feature (894)..(894): n is a, c, g, or t
  misc_feature (922)..(922): n is a, c, g, or t
  misc_feature (933)..(933): n is a, c, g, or t
  misc_feature (953)..(973): n is a, c, g, or t
  misc_feature (977)..(977): n is a, c, g, or t
  misc_feature (988)..(988): n is a, c, g, or t
tgactgccattgaatcggcctggctgttggagctggctccacacttttatcaacaaggaacgcacctgtctctgaaagccaaaagggccaaggtccaggacccgtgagaggagcccacagctacagctgcagggactgctggcgtcctctcctccatgctgctgcccctggtcccaggtggggtgagctggcaccagctcctgtggaatgtttggttgctctgaagtgggctgcggcctgttcattagtcctttcttcccgctgcccacagcatttgcatccttgctgggatcctggaggactttgtgcatgggcaggcatccttctgtgctgcagcgggcagagtgggagttggctcactcagcacgctcactaacccagcatgccacttccagcaggcatgcagtcctggcccagctctatgggaaacaaggaggaaagttagccactgaaggccaaaacaccatgtggggtggacagagggtttgctgggctggctttgctttccctgctggggccacagctgtgttaaccaatgaggtctgctgccaggtgtgaacaagcatgtctctacgaatgaacgaaacattggggatctctgccgaaaccaccaaagggcactgtctgatgggcacagggtctcccaaacccagtggcttctgtctgtcctcagcccttgtccctgtttatctgcagccaggagacttgcaaggggattggtgattgacagagaggactcgtgcgctgttttgtgttaaccagaggatttgtgtttcacaggtaagcttaacgtcctctcagagtgtagtgccaggtcctgggtgccaccctaactgagcaacttcaggagagttcatcaacctcagatcccacagggcctcctgtttagcaggnattcacaacagtttggatgccctaaaanttctgtagctnaggaacatcactggtgttannnnnnnnnnnnnnnnnnnnncttngggttctttgncaagagcgcgtgggggacagttctttcagcagg

SEQ ID NO: 262259 - DNA, 1402 bp, Homo Sapiens
ccatttctgagttggggccagctccccacccgcaaaaggccccacattccgggccagcagcccagaaagtccctccccgcaggcggagacagccccaagaagtcgacgccccggtcccgccgcccggccactacccagagggctgccgccgcctctccaagttcttgtggcccccgcggtgcggagtatggggcgctgatggccatggagggctactggcgcttcctggcgctgctggggtcggcactgctcgtcggcttcctgtcggtgatcttcgccctcgtctgggtcctccactaccgagaggggcttggctgggatgggagcgcactagagtttaactggcacccagtgctcatggtcaccggcttcgtcttcatccagggcatcgccatcatcgtctacagactgccgtggacctggaaatgcagcaagctcctgatgaaatccatccatgcagggttaaatgcagttgctgccattcttgcaattatctctgtggtggccgtgtttgagaaccacaatgttaacaatatagccaatatgtacagtctgcacagctgggttggactgatagctgtcatatgctatttgttacagcttctttcaggtttttcagtctttctgcttccatgggctccgctttctctccgagcatttctcatgcccatacatgtttattctggaattgtcatctttgggaacagtgattgcaacagcacttatgggattgacagagaaactgattttttccctgagagatcctgcatacagtacattcccgccagaaggtgttttcgtaaatacgcttggccttctgatcctggtgttcggggccctcattttttggatagtcaccagaccgcaatggaaacgtcctaaggagccaaattctaccattcttcatccaaatggaggcactgaacagggagcaagaggttccatgccagcctactctggcaacaacatggacaaatcagattcagagttaaacagtgaagtagcagcaaggaaaagaaacttagctctggatgaggctgggcagagatctaccatgtaaaatgttgtagagatagagccatataacgtcacgtttcaaaactagctctacagttttgcttctcctattagccatatgataattgggctatgtagtatcaatatttactttaatcacaaaggatggtttcttgaaataatttgtattgattgaggcctatgaactgacctgaattggaaaggatgtgattaatataaataatagcagatataaattgtggttatgttacctttatcttgttgaggaccacaacattagcacggtgccttgtgcagaatagatactcaatatgtgaatatgtgtctactagtagttaattggataaactggcagcatccctga

SEQ ID NO: 262260 - DNA, 888 bp, Homo Sapiens
cgcgctgtgcgaccctcccggggccccagggccacctgggcctgccccggccacccacggtcccgcgcctctcagtgctcaggagctgtcccaggaaatcaaggcttttctgactggcgtagaccccattctgggccaccaactctcaacccgggaacatgctcgctgtggtcttctcctgctccggtctttgccacctgctcgggctgctgtgcttgaccacttgagaggtgtctttgatgagagtgtccgggcccacctggctgccctggatgaaacccctgtggctggtccacctcacctccgtccacctccaccctctcatgtccctgctggtggacctgatctacaggatgtggttcaggaagtgcaacacgtgctgtctgagtttatccgggccaacccaaaggcctgggcacctgtgattagagcatggtccattgacctcatggggcaactgagcagcacgtactcaggccagcaccagcgtgttccccacgctactggcgctcttaatgaactgctacagctgtggatgggttgtagggccacgcgtacattaatggacatctatgagcagtgcctctcggctctcattggtagctgcccagatgcgtgtgtggatgccttgctggatacctctgttcagcattctccacactttgactgggttgtggcacatattggctcctcttttcctggcaccatcatttcccgggttctctcctgtggccttaaagacttttgtgtccatgggggggcctggaggtggaagctgtcagaaatggggggaatctccttctcaaaaccccttatacaagaaccctttccttggaaatctcctggccattcctgcccaccaaaagttttggctccaaaatttgcctt

SEQ ID NO: 262261 - DNA, 916 bp, Homo Sapiens
  misc_feature (596)..(609): n is a, c, g, or t
gccctcaacagcgtctcggagaaccagtcgctgctgcggatgccgccctggatgaacccctggctgctggtggctgtggccatgtccatggccctgcacttcctcatcctgctcgtgccgcccctgcctctcattttccaggtgaccccactgagcgggcgccagtgggtggtggtgctccagatatctctgcctgtcatcctgctggatgaggccctcaagtacctgtcccggaaccacatgcacgaagaaatgagccagaagtgagcgctgggaacagggtggagtctccggtgtgtacctcagactgatggtgcccatgtgttcgcctccgccccccacccttgccaccacactcgcccacttgcccaccgggtcccgccggataaatgacaggcccgaggtcagaatggccatccccgggccccgtcctggggtctctgtccccacttccttctggcctgggaggtctgtaattcctgtctcctggactctcctgggaagttccctgctctgcagctctggcccaggagctgcaggctgggagggggcagccaagaagccggagctggcagcatacccagaagatccggggnnnnnnnnnnnnnnaaatcacgagtgcagctggagcttgctcccccttgttcggaagctggacgttcacttggtgactggtgcctctgcactgacggagagactctggggggtccttcttaccggctctgacctctctcttcgtgcctgggtctggggactgggtcagccctggggggatcagaaggggccatctgggcccagctgtgtacaagcgagggtggggcagcccccctccactccactctgctttcacaaaagtcgggctcccggagaagctcgaaggctggcttctggttaaatgttgccagggcccggggcc

SEQ ID NO: 262262 - DNA, 914 bp, Homo Sapiens
  misc_feature (48)..(48): n is a, c, g, or t
tcttgcagggtggggactggagggggcagggcggggcggtggcgggcnaacactcagcttctggggctcctggggagcccttggccccccccttttttccccgcggtgtcggccgtccacagttgtcaggttgtctcgcagcagctgcatgatgagggtgctgtctttgtaggagtcctcgctgagggtgtgcagatcagccatggcctcgtcgaaagtggtcttggccagagagatggcctcctcggggctgttggcgatctcgtagtggaagacggaaaagttcagggccaggcccaggcggatggggttggtgggcggcatctccttcttgctgatgtccatggcctcctggtaggctgaccgggctgagtcaatgatgcgcttcttgtcgtcaccggtggccacctcggccaggtagcggtagtagtcacccttcatcttcaggtagaagacccggctctcggcgtccccggcctccttgatgaggtggctgtccagcaggcccagcacggtgtcgcacacgccctggagctcagtctccaccttctcccggtactcacgcacctcgggccccttctcctccgagccctcctcgttgcttttctgctcaatactggacagcaccctccaggcagccctctggccgcccaccacgttcttataggctactgagagcaggtttcgctcttcgcaggagagctcctcgcccttctccacggcgcctttcatgaaggctgccatgtcctcatagcgttcggcctgctctgccagcttggccttctggatcagactggctctctccatggctctggggacacacaggcgggcggcgggctaactgctgcctgggaccaatgccggaccgacgcgtgggtcgacgatatcccggaattccggaccggaccagcctg

SEQ ID NO: 262263 - DNA, 902 bp, Homo Sapiens
  misc_feature (138)..(191): n is a, c, g, or t
ttagtgtccgagctgctggaggagacttggcctccgcagctgccctccggccccccacggctgccgggttccggggtgcaagtgaagcagcctccccgcggaggccgcagcgccccgaccaggcctctttaagcgcannnnnnnnnnnnnnnnnnnnnnnnnnnnnnnnnnnnnnnnnnnnnnnnnnnnnnatcatgatctgcctggtgctgaccatcttcgctaacctcttccccgcggcctgcaccggcgcacacgaacgcaccttcctggccgtgaagccggacggcgtgcagcggcggctggtgggcgagattgtgcggcgcttcgagaggaagggcttcaagttggtggcgctgaagctggtgcaggcctccgaggagctgctgcgtgagcactacgccgagctgcgtgaacgcccgttctacggccgccttgtcaagtatatggcctccgggccggtggtggccatggggctggacgtggtgcgcacctcgcgggcgctcatcggagccacgaacccggccgacgccccgcccggcaccatcccgcggggatttctgcatcgaggttggcaagaacctgattcacggcagcgactcgggtggagagtgcccgccgcgagatcgctctctggttccgcgcagacgagctcctctgctgggaggacagcgctggggcactgggctgtatgaataacccggcagatgcgcgtcacagaagctctcacactcccagcctcctccagggccccaagtggggcggggctttctgggcccccaccccacagacgctttgaagacatccccttttggagcggcctgcgttgaaacatccaccctggtcttggaaccttggcattggggggccgggggccccttttccctcgtcccaaatcccct

SEQ ID NO: 262264 - DNA, 1015 bp, Homo Sapiens
gagacttggcctccgcagctgccctccggccccccacggctgccgggttccggggtgcaagtgaagcagcctccccgcggaggccgcagcgccccgaccaggcctctttaagcgcaggccccgccccgggcgccaccgccccgccccgcggatcccgctcccgcaccgccatcatgatctgcctggtgctgaccatcttcgctaacctcttccccgcggcctgcaccggcgcacacgaacgcaccttcctggccgtgaagccggacggcgtgcagcggcggctggtgggcgagattgtgcggcgcttcgagaggaagggcttcaagttggtggcgctgaagctggtgcaggcctccgaggagctgctgcgtgagcactacgccgagctgcgtgaacgcccgttctacggccgccttgtcaagtatatggcctccgggccggtggtggccatggtatggcaggggctggacgtggtgcgcacctcgcgggcgctcatcggagccacgaacccggccgacgccccgcccggcaccatccgcggggatttctgcatcgaggttggcaagaacctgattcacggcagcgactcggtggagagtgcccgccgcgagatcgctctctggttccgcgcagacgagctcctctgctgggaggacagcgctgggcactggctgtatgagtagcccggcagatgcgcgtcacagaggctctcacactccagcctcctccagggcccaggtgggcgggcttctggccccaccccacagcgcttggagcatccctttggacgggctgctgaacatccacctgtctggacgttgcatggagggtggcgcaggcctctccaatccctggcgtacagggtttcctgcccgaggagctgctccaggagcctgcgcggctcgcctggaaacgtgccaggacactgtcctggtgcccagcccaacgtggtccaacgtttttttataataaagtcctcgttttcgtttcggtttgggcccaggaacaggcagct

SEQ ID NO: 262265 - DNA, 1120 bp, Homo Sapiens
  misc_feature (1037)..(1079): n is a, c, g, or t
aaggacacctgttctttgtgatggagttcctcaacgggggggacctgatgtaccacatccaggacaaaggccgctttgaactctaccgtgccacgttttatgccgctgagataatgtgtggactgcagtttctacacagcaagggcatcatttacagggacctcaaactggacaatgtgctgttggaccgggatggccacatcaagattgccgactttgggatgtgcaaagagaacatattcggggagagccgggccagcaccttctgcggcacccctgactatatcgcccctgagatcctacagggcctgaagtacacattctctgtggactggtggtctttcggggtccttctgtacgagatgctcattggccagtcccccttccatggtgatgatgaggatgaactcttcgagtccatccgtgtggacacgccacattatccccgctggatcaccaaggagtccaaggacatcctggagaagctctttgaaagggaaccaaccaagaggctgggagtgacgggaaacatcaaaatccaccccttcttcaagaccataaactggactctgcttggaaaagcggaggtttggagccaccctttcaggcccaaagtgaagtcacccagagactacagtaactttgaccaggagttcctgaacgagaaggcgcgcctctcctacagcgacaagaacctcatcgactccatggaccagtctgcattcgctggcttctcctttgtgaaccccaaattcgagcacctcctggaagattgaggttcctggacagatcaggctagccctgccctccacccacacctgcccgctccccacgataagcaccagtgggactgtggtgaacttctgctgctggccccgcccctgcccccagagcgtccttggctgccgtctggccgggctctcatggtacttcctctgtgaactgtgtgtgaatctgcttttcctctgccttcggagggaaattgtaaatcctgtgtttcattacttgaatgtagttatctattggaaatatatatnnnnnnnnnnnnnnnnnnnnnnnnnnnnnnnnnnnnnnnnnnntgctcagtagaggaaaaccatgggggactggtgatatgttg

SEQ ID NO: 262266 - DNA, 1636 bp, Homo Sapiens
  misc_feature (1404)..(1404): n is a, c, g, or t
  misc_feature (1406)..(1446): n is a, c, g, or t
ttcggagaagagcgagatccacctcttcctgcagcgctgccttgctcgcctccgtggctctgaccgccagctgccccaggtcctgcacatgtcagagctcctgaatcgcggcctgggtgtgcaccatagcggcatcctgcccatcctcaaggagatcgtggagatgctcttcagccgtggcctggtcaaggtcttgtttgccacagagacctttgccatgggagtaaacatgcctgctcgtacagtagtgtttgactccatgcgcaaacacgatggctccaccttccgggacctgctccctggggagtatgtgcagatggcaggccgggcagggcggaggggcctggaccccacaggcaccgttatcctgctctgcaagggccgagtgcccgagatggcagacctgcaccgcatgatgatggggaagccgtcccagctgcagtcccagttccgcctcacgtacactatgatcctcaacttgctgcgagtggatgccctcagggtggaggacatgatgaagaggagcttctctgagtttccctcccgcaaagacagcaaggcccatgaacaggccctggctgaactgaccaagaggctgggagctttggaggagcctgacatgactggccaactggtcgacctgcctgaatattacagctggggggaggaactgacagagacccagcacatgatccagcgacgcatcatggagtctgtgaacgggctgaagtctctctcagcaggaagggtggtggttgtgaagaatcaggagcatcacaacgcattgggagtgatcctacaggtctcctcgaactccaccagcagagtattcacaaccctggtcttgtgtgataagcccttgtcccaggacccacaggacagggggccagccactgcagaggtgccctatccagatgacctcgtgggattcaagctgttcctgcctgaagggccttgtgaccacaccgtggtcaagctccagccaggagatatggctgccatcaccaccaaggtgctccgggtgaatggggagaagatcttggaggacttcagcaagaggcagcagccaaaattcaagaaggatcctccccttgcagccgtgaccactgctgtccaggaactgctgcgtctggctcaggcccacccagccggacctcccaccctcgaccctgtcaatgacctgcagctcaaagatatgtcagttgtagagggtgggctccgggcccggaagctggaggagctgatccaggggggctcagtgtgtacacagccccccgttttcctgcccagtacctgaaagctgcggggagcgaatgcagatacagaaaggagatggagccggctgcgcttcctactggcggatcagtcattgctgctgcttccctgagtaccatctacgagtanannnnnnnnnnnnnnnnnnnnnnnnnnnnnnnnnnnnnnnnnaaacgccaggtggtccaaggccccacccttttttctttgaggggggtcccaaaaccctggggtattgtgggaacgagggcgggcactgggaaaacttgccaagggggcggtgggtctgtgggcccatagaaccagcccttgagatggcgcccgctcccggaacctcaaggttttgaacaaggcccacccg

SEQ ID NO: 262267 - DNA, 870 bp, Homo Sapiens
  misc_feature (784)..(784): n is a, c, g, or t
  misc_feature (840)..(840): n is a, c, g, or t
  misc_feature (842)..(842): n is a, c, g, or t
agctgcagctcccccagctccagcgccaccagccttctcccaccgtgtccccagagccccccaggcctccgcagcagcccgtaccaaccgagctctcactggccagcatcactgtgcccctggagtccatcaaacccagcaacatcctgcccgtgactgtgtatgaccagcacggcttccgcatcctcttccattttgcccgggacccactgccagggcgctccgacgtgctggtggtggtggtttccatgctgagcaccgccccccagcccatccgcaacatcgtgttccagtcagctgtccccaaggttatgaaggtgaagctgcagccaccctcgggcacggagctgccagcttttaaccccatcgtccacccctcagcaatcacccagggtcctgctggcttgccaacccccagaaggagaaggttcgcctccgctacaagctcaccttcaccatgggtgaccagacctacaacgagatgggggatgtggaccagttccccccacctgaaacctggggtagcctctagaacagaggggctggggagaggaaggggcagagggaccggtcactgtccagcctggagggaggcattggtggccaaggacaccctttgttgcccatggccattcacccccaggcctggtgcttctccccacacccctgtaggcctcaagtgactcttccccctcctgctccggccccgcccctgctgagccaaacccagtaggaggctgggcctgggtttgtgccgctggggtctccatcaccggggacctgnagagggaaggggctgtgtagccttggaaagaacttgggtcatggggaggaagccancntggttgggggaaagggccaggacctcag

SEQ ID NO: 262268 - DNA, 1069 bp, Homo Sapiens
  misc_feature (661)..(661): n is a, c, g, or t
ccaaggcccagttggggggggcttggtttaaggccgtttcgtggggccaggaaaacccccgttgcatgccctgcggtgtacccttgggtttgggtttttttcctggttattcaagccggtttctttaggaaaagtttccttgtcaaaggttccaaagtttcgtttgggctgatccagggaaaaaagagacttagccgccagttgggtggggaaaccagagtgttcagaggcagtaccaagggttacagggctggagccaaggcatttttgggcagcttcatcagttactgttcttggagcaacttcttgagcccttacccatcttgcttcccctccacacatcaacggcagtttgggcggctctgagaggaagccctgcacatccttcaatcttgccagggccagcaccctcccaccagaggagcatctgccttggtgtgagaaacctctccttccctctcagggcccccccagaggacaggcggaggaactggcccctgcagagccccctggagatgggcgggggcccagggtggcataggcagggggaggggctgtcaaggctggagagggagcagggcctggctgggacaaggacagagacatggggtgggggcagaagtgggaaggaggggaggatgccagggtggaggctacctcntgagcacccctgccccctcggcctggaaccagtatcggcttcggaaccttcggagcagcatgaggaacatgatgaccagcaggtcaaagacgagctcagccatctccaccacagacaacaccgaggagccgaaccacaggctccactggctgcccaggttggacaggagggtgaccatcgtgacagagggagactcagaattggttttgtagttcagctccttgaagaagatgttgactttggccactccatttctcttgttgttgacggtgtaattgttctgtcgcgatagcatctggaagacccattcctaggaaagaatgggggtgtcatcaaggtcactcccatatgcttcaggcttacagggatagggttgtgtcaaacacactcatacacataatacccaga

SEQ ID NO: 262269 - DNA, 907 bp, Homo Sapiens
  misc_feature (781)..(781): n is a, c, g, or t
tttcagatcaagattgttctacagccacctccttagaatgggcaaacacctgtggtatccagggcaggcatcagcccatctctgttggtgtggctcccattgctgtagcacctgtgtgtttgaagaccaactctcagatgagcggttccagagaagtaatgctccttcagttaacagtgatcaaagtgatgacaacccggatattgtctgtcaaaaccgagttccatgcaaaggagcagtacagagatgtaattaaaattctcttagaatcagccaaagtcgattctaaattaatctgcatgttccaaaattcagataaattgttatctcacatggctgcacagtgccttgcattgcttctatatttccaattgagagaaaagataaccttaagtaattcctggattgctttttgccagaaaaatctttctgaatactctgagagtaataaagcaatatactgcctctgggactcttacagcaataataaaaggaaatctttaaaggattcatgttcacaggaaaacaggaaattctaaaggcagttcctggacttcatttcgacaccatttttgaaggtgtttttacaattcccttattctctcagcattttgaaaactgccgggatacttctaaaatagtaaacatcctgatgtgtttcctggatttgcttgagcttctcatcgcctccagaatccacctgaagttacatttcacttgccagaggattttatttttgaaaccatcttgcatgctagaagttattacctggcctattcanggcttttggtaaaaggaagtcatcatattcctcaaaaagtggccttctctggtaaagtgggggagacctctgtccggggatctgtggcctgcctttaatggcgccaggaccatcctgttaccgggg

SEQ ID NO: 262270 - DNA, 1583 bp, Homo Sapiens
gaagacctgatgggggacctgctgggggaaggctcttacggcaaggtgaaggaggtgctggactcggagacgctgtgcaggagggccgtcaagatcctcaagaagaagaagttgcgaaggatccccaacggggaggccaacgtgaagaaggaaattcaactactgaggaggttacggcacaaaaatgtcatccagctggtggatgtgttatacaacgaagagaagcagaaaatgtatatggtgatggagtactgcgtgtgtggcatgcaggaaatgctggacagcgtgccggagaagcgtttcccagtgtgccaggcccacgggtacttctgtcagctgattgacggcctggagtacctgcatagccagggcattgtgcacaaggacatcaagccggggaacctgctgctcaccaccggtggcaccctcaaaatctccgacctgggcgtggccgaggcactgcacccgttcgcggcggacgacacctgccggaccagccagggctccccggctttccagccgcccgagattgccaacggcctggacaccttctccggcttcaaggtggacatctggtcggctggggtcaccctctacaacatcaccacgggtctgtaccccttcgaaggggacaacatctacaagttgtttgagaacatcgggaaggggagctacgccatcccgggcgactgtggccccccgctctctgacctgctgaaagggatgcttgagtacgaaccggccaagaggttctccatccggcagatccggcagcacagctggttccggaagaaacatcctccggctgaagcaccagtgcccatcccaccgagcccagacaccaaggaccggtggcgcagcatgactgtggtgccgtacttggaggacctgcacggcgcggacgaggacgaggacctcttcgacatcgaggatgacatcatctacactcaggacttcacggtgcccggacaggtcccagaagaggaggccagtcacaatggacagcgccggggcctccccaaggccgtgtgtatgaacggcacagaggcggcgcagctgagcaccaaatccaggggcggagggccgggcccccaaccctgccccgcaaggcctgctccgccagcaacaaaatcccgccggctgtcggcctgcaagcagcagtgaggctggccgcctgcagcccgtgtccaggagccccgccaggtgcccgcgccaggccctcagtcttcctgccggttccccccgcccctccggagagggggccggtagggcttctgggcccaccacgcgccgtgaccttcgggcccgcctgtaatgtccccgcccagtcgcacctcatcgcgttagcttccgttgcccccgcgcccgtttggccgatctgcctcccctgttcacctcctccgctccttaattagccccgcgccatttcccgtttgtgcgcgcgcccccataacccctccccgggcgtgccctgttacccccacccggcccgcatgcccgccccgccctgttcttgactgtgcccctacaactacccccttccccaccccgctcgttaccagctaaaaaatgtgccaccgccg

SEQ ID NO: 262271 - DNA, 970 bp, Homo Sapiens
cgagcgggaaacagagagccggagccggatcccgatcccgagtccgagccgccgccgccatgagctgccccgtgcccgcctgctgcgcgctgctgctagtcctggggctctgccgggcgcgtccccggaacgcactgctgctcctcgcggatgacggaggctttgagagtggcgcgtacaacaacagcgccatcgccaccccgcacctggacgccttggcccgccgcagcctcctctttcgcaatgccttcacctcggtcagcagctgctctcccagccgcgccagcctcctcactggcctgccccagcatcagaatgggatgtacgggctgcaccaggacgtgcaccacttcaactccttcgacaaggtgcggagcctgccgctgctgctcagccaagctggtgcgcgcacaggcatcatcgggaagaagcacgtggggccggagaccgtgtacccgtttgactttgcgtacacggaggagaatggctccgtcctccaggtggggcggaacatcactagaattaagctgctcgtccggaaattcctgcagactcaggatgaccggcctttcttcctctacgtcgccttccacgacccccaccgctgtgggcactcccagccccagtacggaaccttctgtgagaagtttggcaacggagagagcggcatgggtcgtatcccagactggaccccccaggcctacgacccactgggacgtgctggtgccttacttcgtccccaacacccccggcagcccgagccgacctggccgctcagtacaccaccgtcggccgcatggaccaaaggagttggaactgggtgctccagggagctgccgggacgcccggtgtccctgaacgacacactgggggatcttcacgtcccgaacacgggaatcccccttccccagcgggcagggaccaaccctgtaactgggccggggccactggcttgaaaccctttaattgg

SEQ ID NO: 262272 - DNA, 543 bp, Homo Sapiens
  misc_feature (479)..(479): n is a, c, g, or t
gaactcggaattcctccctgttgtgaagtgcaccattgataataccctggaccagtggctacaagtcgggggtgatatgtgtgtgcacgcctacctcagcgggcagcccttggaggaatcacagctgagcatgctggcctgcttcctcgtctaccactctgtgccagctccacagcacctgccacctataggactagaagggagcacaagctttgctgaactgctcttcaaatttaagcagctaaaaatgccagtgcgagctttgctgagaatggcccctttgcttcttggaaatccacagccaatggtgatgtgaccgtgtctggcggtgaacctaccctgaaacgtgacttctgcacaacaaacgtgaccaaacatcaaagctaaagcaatgtttataaagttttatggtataactagggggaaatgagctgcacaaacctcaatgtattttaaatctgttgctgtcatcattaacnggtatatgacatataaaagcaagttaaaatttacttttgtaaataaagtttttggtttgtttcc

SEQ ID NO: 262273 - DNA, 966 bp, Homo Sapiens
  misc_feature (828)..(828): n is a, c, g, or t
  misc_feature (862)..(863): n is a, c, g, or t
ccctgagaaaagccagccctctctcttggggcaggaactaggtcttggccctttctacagcttttctcctgcaaagggtccagccttttcctgctccccacgttgtccttacggctgtgtggggtagggcagggtccacactccttcccatccattttagaggaggaagctggagtctgggaagggatgggattttcccagggcaccctgtgagtcacatgccacttgagacaagggtctagagctccagcattttccaagctacaaatgtatctgctgctccaagtgtcctagatcaggaccctaggaaaggtcctttctggggatcaccccattggctgaagatgagaccattcttcctcttgtgttttgccctgcctggcctcctgcatgcccaacaagcctgctcccgtggggcctgctatccacctgttggggacctgcttgttgggaggacccggtttctccgagcttcatctacctgtggactgaccaagcctgagacctactgcacccagtatggcgagtggcagatgaaatgctgcaagtgtgactccaggcagcctcacaactactacagtcaccgagtagagaatgtggcttcatcctccggccccatgcgctggtggcagtcacagaatgatgtgaaccctgtctctctgcagctggacctggacaggagattccagcttcaagaagtcatgatggagttccaggggcccatgcccgccggcatgctgattgagcgctcctcagacttcggtaagacctggcgagtgtaccagtacctggctgccgactgcacctccaccctccctcggggtccgnccagggtcgggcctcaaaaactgggccaggatgnnttcggtgccagtcccctgccctcagagggcctaatgcccgccctataaatgtggggggggaagagggccaaactttaaccccttaatgggaattttaagggtc

SEQ ID NO: 262274 - DNA, 902 bp, Homo Sapiens; identical to SEQ ID NO: 73615

SEQ ID NO: 262275 - DNA, 1160 bp, Homo Sapiens
  misc_feature (957)..(957): n is a, c, g, or t
ctggacttgtcttggttccagaacctgacgacccggcgacggcgacgtctcttttgactaaaagacagtgtccagtgctccagcctaggagtctacggggaccgcctcccgcgccgccaccatgcccaacttctctggcaactggaaaatcatccgatcggaaaacttcgaggaattgctcaaagtgctgggggtgaatgtgatgctgaggaagattgctgtggctgcagcgtccaagccagcagtggagatcaaacaggagggagacactttctacatcaaaacctccaccaccgtgcgcaccacagagattaacttcaaggttggggaggagtttgaggagcagactgtggatgggaggccctgtaagagcctggtgaaatgggagagtgagaataaaatggtctgtgagcagaagctcctgaagggagagggccccaagacctcgtggaccagagaactgaccaacgatggggaactgatcctgaccatgacggcggatgacgttgtgtgcaccagggtctacgtccgagagtgagtggccacaggtagaaccgcggccgaagcccaccactggccatgctcaccgccctgcttcactgccccctccgtcccaccccctccttctaggatagcgctccccttaccccagtcacttctgggggtcactgggatgcctcttgcagggtcttgctttctttgacctcttctctcctcccctacaccaacaaagaggaatggctgcaagagcccagatcacccattccggggttcactccccgccctccccaagtcagcagtcctagcccccaacccagcccagaagcagggtctctctaaaggggacttgagggcctgagcaggaaagactggccctctagcttctaccctttgtccctgtagcctatacagtttagaatatttatttgttaattttattaaaatgcttttccaaanaaacccctccccctcccccatttaaacttgtcggccccgcttcgcccctcaagaaacttttcctagaccatttcttttgggggcgcggggcccccttaggtaaactggaacttggggccctaacctgttttccctacgaaaaacccggcgcctggaaccagggctttggatttccccccccaataaaccaaaccgcccggggg

SEQ ID NO: 262276 - DNA, 858 bp, Homo Sapiens
  misc_feature (317)..(325): n is a, c, g, or t
  misc_feature (342)..(357): n is a, c, g, or t
ctacgctagatctcgcgtcgtgtaagcagtctcccctctcactaaggctttgagtccggtccagcagcgcagcagggaaccagaatgaggttcagggccaccatcaaaagagtgacctcccctctccttccaattaagttacctgtattcaatgtgcagtgtaaacgagcagaagttttacaaattaaattactttcttaaaaatcaatacaacatcgttacatacaattctctttgagaagtctttccaattcaattcttaagtttcatttacaaaatggtgtgcaaaaacaaacactgacctcaaataaataggnnnnnnnnngtgggaagagctaaaannnnnnnnnnnnnnnnaaattaaaagttaaaaacatgagctgcacttcaaagtatctgcaggatggagaaatacatcaagaaggctgtcaaaaacagctctcagagttagagttgcattttcaactgaggttttctgtgttcaaaattcacgatcaatgcctccactgagatctttcaccactccctctttgaccagctttaagaggaacttggtttccgttgtcacattatgcatggtctgaaagttcatagcagccatgcattgactgtcgaagtagtgcaaaggtgttctgggttgattgaggtcatatccaaaacccgccaaactgacttcatcgcacagatgtgtggctaagacaacggcaatgacaccgattgtggggacgttcttatctcggccccagaaccttgactgaggctctgagtactgaaggatgtcaaaggcagtctctttgatgataactggattcaaaatcctgaaatgttttggctgcagtgggatttttctgtgccgaa

SEQ ID NO: 262277 - DNA, 899 bp, Homo Sapiens
  misc_feature (69)..(255): n is a, c, g, or t
acagagtccttgtgtctgtgtgtctacatgtctgcgcgtgtccctgtgtctttgtgtatatatatccannnnnnnnnnnnnnnnnnnnnnnnnnnnnnnnnnnnnnnnnnnnnnnnnnnnnnnnnnnnnnnnnnnnnnnnnnnnnnnnnnnnnnnnnnnnnnnnnnnnnnnnnnnnnnnnnnnnnnnnnnnnnnnnnnnnnnnnnnnnnnnnnnnnnnnnnnnnnnnnnnnnnnnnnnnnnnnnnnnnnnnnnnnatccgtgtgtgcatctgtgtatctgtccatgtatccgcgtgtgcctgtgtgtacctttgtgtgagcatcaagggacctcccaggcctggtgctcaccgtccgccccaacgcaccctgcattgcagcgactccagctcggacacagacagcttctacggcgcagttgagcggcctgtggatatcagcctttccccgtaccccacggacaatgaagactatgagcacgacgatgaggatgactcctacctggagcctgactccccggagcccggaaggcttgagggcgatcaccccccgatgggcagagtttcaggagcttctcctttgaaaagccccggcaaccctcacaggctgacactggcggggacgactcggacgaggactatgagaaggtgccactgcccaactcggtcttcgtcaacaccacggagtcctgcgaagtggaaaggttgttcaaggctacaagcccccggggagagccccaggatggactctactgcatccgggaactcctctaccaaagtcgggggaagggccctggttgtggtgggacgaaaacctctaacaaaagtgaaggaactaatcgccaatttttgaagaaaggacttcttaggtttcctacctttggaagggcccaaaggtcc

SEQ ID NO: 262278 - DNA, 1125 bp, Homo Sapiens
ctactcaagttgtcaaaacacggcttaaaagacggcagtactataacggtcataaggtagcgaggctgggtggcgggaccccccaagggaggcagccatgcccggactctttgtgccccccgtggctccccggcctcctgcgctgaagctgccagtgcctgaggccatggcgcggcccgcagtcctgcccaggccagagaagccgcagctcccgcacctccagcgatcaccccccgatgggcagagtttcaggagcttctcctttgaaaagccccggcaaccctcacaggctgacactggcggggacgactcggacgaggactatgagaaggtgccactgcccaactcggtcttcgtcaacaccacggagtcctgcgaagtggaaaggttgttcaaggctacaagcccccggggagagccccaggatggactctactgcatccggaactcctctaccaagtcggggaaggtcctggttgtgtgggacgaaacctctaacaaagtgaggaactatcgcatttttgagaaggactctaagttctacctggagggcgaggtcctgtttgtgagtgtgggcagcatggtggagcactaccacacccacgtgctgcccagccaccagagcctgctgctgcggcacccctacggctacactgggcctaggtgatggcagtccatgtggctgccaggccaaggcagtcacaggggccctgaccccaggccacacagacggacatgggcccacatgggagggtgagcaggagcaaggctgtgcttgcctagggcctctgtgatggacatctcgtaggacccagccagtctcatccagcaggttgggttctagggctgaaccaggcgccaggctccagaggacgaagggactctgttgccccacactaacttgccctgtcccaatcccagaaacccaggaccaagctgtgcctgggctccaaggacaggaacactgggccccccatcacactcacccctaagtgggctgggagccaggcagggccagggcagctgggtgggggccggggctggcactgggacccccaggaacgctaagacacaggctccagtatgggctgttgcctccaataaagcagcagtgagtttgcaaaa

SEQ ID NO: 262279 - DNA, 1396 bp, Homo Sapiens
  misc_feature (1335)..(1335): n is a, c, g, or t
agaaaggggtgcggcagcactgccaggggaagagggtgatccgacccggggaaggtcgctgggcagggcgagttgggaaagcggcagcccccgccgcccccgcagccccttctcctcctttctcccacgtcctatctgcctctcgctggaggccaggccgtgcagcatcgaagacaggaggaactggagcctcattggccggcccggggcgccggcctcgggcttaaataggagctccgggctctggctgggacccgaccgctgccggccgcgctcccgctgctcctgccgggtgatggaaaaccccagcccggccgccgccctgggcaaggccctctgcgctctcctcctggccactctcggcgccgccggccagcctcttgggggagaatccatctgttccgccagagccccggccaaatacagcatcaccttcacgggcaagtggagccagacggccttccccaagcagtaccccctgttccgcccccctgcgcagtggtcttcgctgctgggggccgcgcatagctccgactacagcatgtggaggaagaaccagtacgtcagtaacgggctgcgcgactttgcggagcgcggcgaggcctgggcgctgatgaaggagatcgaggcggcgggggaggcgctgcagagcgtgcacgcggtgttttcggcgcccgccgtccccagcggcaccgggcagacgtcggcggagctggaggtgcagcgcaggcactcgctggtctcgtttgtggtgcgcatcgtgcccagccccgactggttcgtgggcgtggacagcctggacctgtgcgacggggaccgttcgcgggaacaggcggcgctggacctgtacccctacgacgccgggacggacagcggcttcaccttctcctcccccaacttcgccaccatcccgcaggacacggtgaccgagataacgtcctcctctcccagccacccggccaactccttctactacccgcggctgaaggccctgcctcccatcgccagggtgacactggtgcggctgcgacagagccccagggccttcatccctcccgccccagtcctgcccagcaggggacaatggagattgtagacagcgcctcagttccagaaacgccgctggactgcgaggtctccctgtggtcgtcctggggactgtgcggaggccactgtgggaggctcgggaccaagagcaggactcgctacgtccgggtccagcccgccaacaacgggagcccctgccccgagctcgaagaagaggctgagtgcgtccctgataactgcgtctaagaccagagccccgcagcccctggggccccccggagccatggnggtgtcgggggctcctgtgcaggctcatgctgcaggcggccgagggcacagggggttcgcg

SEQ ID NO: 262280 - DNA, 915 bp, Homo Sapiens
cacatgctctcggaccaggccgacatcgagaacgtcaccaagtgcaagctgtgcattgagcggagactctcggcgctgctgactggcatctgtgcctgacctttctggcctggctgggccccccgtcctgccgagccctgcagagtgggctctgtgtgctggctggactcctcgggacaagcccatggcgctgatcgctggtgctgagccctgccctgggccccacagacagtcagcctgccggcctccctgcagctcacggggcagaaccagcacatctggagccacacagcttggggggtgtctcccatcttttacaggtggggatcacagaatttctgcccctccagctgcctggctcagcaggcgtgggtgccaccaccctctagccccagggcagccccggaggacaagcaagggcctgagaccactgccgactcaaagccaaagcgagctcctgcttacggcaggtcagcaggcactgtgcccaggaagagcctgcggcctcggacgtcccccagtctccacgagcctctccctccgagatacccacccagcctttgtcaatcacccaagcactttatgcatatagagacagaacctggacctcaccagggactgctgggcagcgattcctggcagtggcctggtgtttggtacatacacatatggcagacacatgccagggccccccaagcccgagcaccggaccaccgttgctgcccagtgcttggacctcaaggggaaaaactggctccctgcggcaatggagcgcccgcgactagaaggcgcggggagcggcggggtgctttgaggtgagacgtggtcctcctggagcagcgggtaggccgaaggagactgggtggcgtcttccggcccttgaagaccgcccgcggccaaagtctgttcgccttc

SEQ ID NO: 262281 - DNA, 820 bp, Homo Sapiens
ggtggagaacttggcctcttatcgatgaattaagcaacaatgtaactggtcttgacttgtcatattcccccatgcaatcctaggtctgtattgctcaattttaggaagcctttgctactccatcagtaggtttagatttgagcttttgagacctggctatggaaaagaaagacacttgagaatttagtgttggggtctgtacagatgatgctacccaatttggctttgaaggatcaagtaacaggttgaaaactatttttataaaggtaatactttttcagttcccttcttccttccctctcaatccactagctttcatgttgggcaaggaaaagttgaggaaggatggctgatggtgatggaaagctgtgttaatggtatgaggaatgtgtgaaaagtatacacaaagggctctgaagctcaagtcagaggagtgggaggtctgatcattgttggtggaaaaacgtaaggttattttgtgtttttaagttggttttacaattctttcctggggaaattatttctggaggggaaaaagatccattctacgtatccttgtggagaaaagctaaataacctttaagaatgtgggtggtattggagaaagaagatgaattatagctcccggagaatcaagatcttaagtgaagccctttctggtcagatgtgatctataaaaaatcataatttgggggaaagtttaagcaaatctggctttgtagtcctggatgttataaagtgactttgtgatccaaactgttcaggctttggggtgcttgttataagaatgccttgggtatagaaaaaaccatggccatcc

SEQ ID NO: 262282 - DNA, 327 bp, Homo Sapiens
  misc_feature (231)..(231): n is a, c, g, or t
tatatcaaacacatttattcttaaagtgagaagctcatcaaggatagctagaggagagtgaaatatttacagtagaaaagtatggatgctagccaaacttcaaattctgtcactgcagagttattccgatagtacttttccaccatggcacatcacacatgttaaaattaactgcattcttgtaacacctctcaatggttgtgcacaataatagaagcaacattctggganctctttttcttaagatcctacagaatgaatttatgcacacacaaaaacaagtataatacaaaacattcaaaacaaggtcacatccaatttttttaa

SEQ ID NO: 262283 - DNA, 905 bp, Homo Sapiens
acttttaatcacactacaagtattctcttggtaagggctagggagggggtatggataccagtttctctacatcgtccatgggagtcttccccctctattcacatagtcaatgaagttcttaaagacatcctcaaaagaacaaagagatttatttttactcttattgcagtccttgcaggactacttgcggttactgcaacagcagcaactgctggagttgccatccgcagttctgttcaaactgctcactatgttgaagcatgccagaaaaattcctccagactttggaattctcaggcgcaaattgatcaaaaattagctaatcagattaatgatctccgccaaagtgtaacctggctgggagatagagttatgaacttgcaacaccgtatgcaattacagtgtgattggaatacttctgattattgcataacgccttatgcttataatcaagatcaacatagctgggaaaatgtctcaagacatttaaaagcctgggatgataacttaaccttggatatttcacaacttaaagagcaaatctttggaggcttcacaagccccatttatcccacagttccctggctcacacatttttgaaggcataactaaacaattaccctgattttaatcccttcaaatggctcaaacccgtcagaggatcattgttgttactggcattattaatattggtatgcttatgttgtctccttttagtctgcagatgcctctaaggagtccgaaaccaagtccgaagtcaacaacaagcaatgatggcgatggcgattctagttaataaaaaggggggagatgtgggcggcaagccacccaggcaccgaggcaagagacagaggacacgagctgttccagtataataaaatataaaacaagaatagttataccag

SEQ ID NO: 262284 - DNA, 1467 bp, Homo Sapiens
  misc_feature (1332)..(1332): n is a, c, g, or t
aagcgaggcctgggtggcgaattcggcacgaggggcggcaggtcccctgggcttgcgaaggcacagattccccgtccacagctcacgaccagatgcaccagcaggagtccacatcgaggacgtcctccgggcactcccacgaccagtgaccaggagttaaactttgggatgtgcccgtgatgttggaccacaaggacttagaggccgaaatccaccccttgaaaaatgaagaaagaaaatcgcaggaaaatctgggaaatccatcaaaaaatgaggataatgtgaaaagcgcgcctccacagtcccggctctcccggtgccgagcggcggcgtttttttctttcattgtttctctgcctttttgtggtgttcgtcgtctcattcgtcatcccgtgtccagaccggccggcgtcacagcgaatgtggaggatagactacagtgccgctgttatctatgactttctggctgtggatgatataaacggggacaggatccaagatgttctttttctttataaaaacaccaacagcagcaacaatttcagccgatcctgtgtggacgaaggcttttcctctccctgcacctttgcagcttgctgtgtcgggggccaacggcagcacgctctgggagagacctgtggcccaagacgtggccctcgtggagtgtgctgtgccccagccaagaggcagtgaggcaccttctgcctgcatcctggtgggcagacccagttctttcattgcagtcaacttgttcacaggggaaaccctgtggaaccacagcagcagcttcagcgggaatgcgtccatcctgagccctctgctgcaggtgcctgatgtggacggcgatggggccccagacctgctggttctcacccaggagcgggaggaggttagtggccacctctactccggcagcaccgggcaccagattggcctcagaggcagccttggtgtggacggggaaaagtggcttcctcccttcacgccaccaggacaggtgcccactacatcctcttttccctggcgcaagctccctctgcggctgctctgtgaagggtctctacgagaaggtgaccgggagcggcggcccgttcaagagtgacccgcactgggagagcatgctcaatgccaccacccgcaggatgctttcccacagctctggagcagtgcgctacctgatgcatgtcccagggaacgccggtgcagatgtgcttcttgtgggctcagaggccttcgtgctgctggacgggcaggagctgacgcctcgctggacacccaaggcagcccatgtcctgagaaaacccatcttcggccgctacaaaccagacaccnttggctgtagccgttgaaaacggaactggcaccgacagacagatcctgtttctggaccttgggcactgggagcccgtcctggtgtagccctagcccctcccgaggccttcccctgggggggtcccactggtccgt

SEQ ID NO: 262285 - DNA, 1209 bp, Homo Sapiens
tttccaaagttcggattcttcgcctcaagagagacatggcttaataagggccaggctggcaggagcacagaatgcaacaggtgatgtgttgacatttttagattctcatgtggaatgtaacgttggttggttggaacctcttctggaaagagtttatttaagtagaaagaaagtggcctgtccagtaatcgaagtcatcaatgataaggatatgagttacatgacagtggataactttcaaagaggcatctttgtgtggcccatgaactttggttggagaacaattcctccagatgtcattgcaaaaaacagaattaaagaaactgatacaataaggtgccctgtcatggctggtggattgttttctattgacaaaagttacttttttgaaacttggaacatacgaccctggccttgatgtttggggtggggaaaatatggagctctcattcaaggtgtggatgtgtggtggtgaaattgagatcattccctgctcccgagtgggccatatattcagaaatgacaatccatattccttccccaaagaccggatgaagacagtggagcggaacttggtgcgggttgccgaggtctggctggatgagtataaggagctgttctatggccacggagaccacctcatcgaccaagggctagatgttggcaacctcacccagcaaagggagctgcgaaagaaactgaagtgcaaaagtttcaaatggtacttggagaatgtctttcctgacttaagggctcccattgtgagagctagtggtgtgcttattaatgtggctttgggtaaatgcatttccattgaaaacactacagtcattctggaagactgcgatgggagcaaagagcttcaacaatttaattacacctggttaagacttattaaatgtggagaatggtgtatagcccccatccctgataaaggagccgtaaggctgcacccttgtgataacagaaacaaagggctaaaatggctgcataaatcaacatcagtctttcatccagaactggtgaatcacattgtttttgaaaacaatcagcaattattatgcttggaaggaaatttttctcaaaagatcctgaaagtagctgcctgtgacccagtgaagccatatcaaaagtggaaatttgaaaaatattatgaagcctgaagtgtaactgatgtttttatatagtaaaccacattaaataactgtg

SEQ ID NO: 262286 - DNA, 658 bp, Homo Sapiens
ttttttctgctcagcggttgaaattaaaaattgtaaatttattttacagttatatttgacatgttgttatttgaacagtgtatataaatccaaaatgtctgataagttaccaggttgagccacttaaagtagctgccattctatttggacccataaaaatggcaattttataatacagtgcgttatctaaaaacaggtcacatatacttatttatcagttgaattttgtaaaaaacagaaccatttttttaagactagtttcttgtctttcatagctttcctggatttcccgaatactttcaagggggaatattatagtaagtttttgctatcaggagattttccagacagaaagcatggtataatccactctcaagaagaactgaaaaaatttggcctaaaagggcgggataactaatggtcacatttttaaagaatttcttggatgaagaaaaaggaagcacaccactagctctcacaatgggagcccttaagtcaggaaagacattctccaagtaccatttgaaacttttgcacttcagtttctttcgcagctccctttgctgggtgaggttgccaacatctagcccttggtcgatgaggtggtctccgtggccatagaacagctccttatactcatccagccagacctcggcaa

SEQ ID NO: 262287 - DNA, 1305 bp, Homo Sapiens
ggagcggtccctgcaacccgtccggcgggaactgccttctagtttttagtctcagaccagaccaccgggcgcaccccgatgccgagcccgcagcttctggtgctcttcggcagccagacaggcacggctcaggatgtgtcggagagactgggtcgcgaggcccggcgccggcggcttggctgccgggtgcaggccctggactcctacccggtggtgaatctgattaacgagcccctggtgatatttgtttgtgcaactacaggccaaggagacccccctgacaacatgaagaacttctggaggtttatattccggaagaacctgccctccactgccctctgtcagatggactttgccgtcctgggcctcggggactcctcatacgccaagttcaacttcgtggccaagaagctgcaccgacggctactgcagcttgggggcagcgccctcctgcccgtgtgcctgggcgatgaccagcatgagctggggcccgaccctgctgtggacccctggctgccaaacttgtgggacagggttctggggctgtacccgccgcctccgggcctcactgagatccctcccggagtccccctgccctccaagttcaccctgctgttcctccaagaggcacccagcacgggctctgaggggcagcgggtagctcaccccggctctcaggagcccccgtcagagtcgaagcccttcctagcacccatgatctccaaccagagagtcaccggcccctcccacttccaggacgttcggctgattgagtttgacatcttgggctctggcatcagctttgctgctggtgatgtggtgctgattcagccctccaactcggctgcccatgtccagcggttctgccaggtgctgggcctggaccctgaccagctcttcatgctgcagccgcgggagccagatgtctcctcccccacgaggctgccccagccctgctccatgcggcacctcgtgtcccactacctggacatcgccagcgtgcctcgccgctccttcttcgaactcctgggctgtctatccctccatgagctggagcgggagaagctgctggagttcagttctgcccagggccaggaagaactctttgaatactgcaacgggccccccagacccatcctggaggtgctctgggacttccccgcacacagctgccgccatccctcccaactccctgttgggacctcatccccgtttatccgggccaagggccttttccatcggcctcctcgcctggtggaacctgtcccgggtggccccccctggggggccgcctgggaagttttg

SEQ ID NO: 262288 - DNA, 926 bp, Homo Sapiens
ttccggcaggcgctgcgctgctggggggcgcgggcgaggatggcggcggagaacgaggccagccaggagagcgccctgggcgcctactcgccagtggactacatgagcatcaccagcttcccgcggctgcccgaggacgagccggcgcccgcggccccgctgaggggccgcaaggacgaggacgcctttctgggagaccccgacaccgacccggactccttcctgaagtctgcacggctgcagcggctgccatcgtcgtcgtcggagatgggcagccaagacgggtcgccgctacgcgagacgcgcaaagacccgttctccgccgcagcggccgagtgctcctgccgccaggatgggctcacggtcatcgtcacggcctgtctcaccttcgctaccggtgtcaccgtggcgctggtcatgcagatctacttcggggacccccagatcttccagcagggtgccgtggtgaccgatgctgcccgctgcacttcactgggcatcgaggtgctcagtaaacagggatcttctgtggacgcagcggtggcagcagccttgtgtttgggtatcgtggctccacacagttctggcctgggcggtgggggcgtgatgctggtacatgacatccgacgaaatgagagccacctaattgatttccgggagtccgccaccagggggccctcaggggaagagaccctgccaaggatcctggggagacccagccctgggctccttggtggggggtttccctgcaatggtgaaaggggcttccttgaaactccaccagcgtctatggaagggctgccatggggcccaaggccctgggcccttttgccaccccgtggtggccccaaccatgggctcccaccgagaactccttggatttatgccccgcggccctggcctgaaaaagcctgggctacccaaat

SEQ ID NO: 262289 - DNA, 1738 bp, Homo Sapiens
  misc_feature (1393)..(1393): n is a, c, g, or t
ggggaaccgcgccaggagacggaccgcaagtccagcgtacccacagacgactcaggcgggagacgagcggtgtcatggccgccgacagtgacgatggcgcagtttcagctcccgcagcttccgacggtgagcggcttcccagaggtggtgtcagcaaaagcacaacatctggggaggagctagtagtccaggttcccgtagtggatgtgcaaagcaacaacttcaaggagatgtggccatccctcctgctagccataaagacagctaatttcgtggctgtggacacggagctgagtgggcttggggacaggaagagtttgctgaaccagtgcattgaggaacgttacaaggccgtgtgtcatgctgccaggacccgttctatcctttccctgggcctcgcctgcttcaagcggcagccagacaagggtgaacatttctatctggctcaagtgttcaatctcactctgctgtgcatggaggagtatgtcatagaaccaaagtctgtgcagttcctgatacagcatggcttcaacttcaaccagcagtatgcccaaggcatcccctaccataagggcaatgacaagggtgatgagagccagagccagtcagtacggaccctattcctggagctaatccgagcccgccggcccctggtgctacacaatggccttatagacttggtgttcctgtaccagaacttctatgcacacctccctgagagtctgggaaccttcaccgctgacctgtgtgagatgttcccagcaggcatttatgacaccaaatatgctgctgagtttcatgcccgtttcgtggcctcctacttagaatatgccttccggaaatgtgaaacggaaaatgggaagcagcgggcagctggcagcccacaccttaccctggagttctgcaactatccttccagcatgagggaccatattgattaccgctgctgcctgcccccagcaaccccacgtcctcatcccaccagcatctgtgacaacttctcggcttatggctggtgccccctgagaccacagtgtcctcagtctcacgatattgaccttatcattgacactgatgaagctgcggcaaaagaaaaccggcgacggcgacgacgtagggaaaaacggaagagggctttattgaacctaccgggaacacaaacctctggggaaactaaggatggtcctcccaagaagcaggtctgtggggatagcatcaagcctgaagaaaccgagcaggaggtggctgccgatgaaactaggaacctgcctcactccaagcaaggcaacaaaaatgacttagagatggggattaaggcagcaaggcctgaaatagctgatagagctacctcagaagtgccagggagccaagccagtcctaacccagtgcctgnggatggattgcaccgggctggttttgatgcctttatgacaggttatgtgatggctatggtggaaagtgagcagggaccgcagccctgcagctctggaccctggctccctgaatgccacaataaggtatatttgagtggcaaagctgtacccctcacagtggccaagagccagttctctcgttcctccaaagcccaccatccaaagatgaagctcacttgggggcagtaacctgatgcaacttccaaccttggctctcagtgggaacaaaagtatttttggggtctctctaagcctggaaatggccatcctccaactggctaatggattttaagggggagggggga

SEQ ID NO: 262290 - DNA, 1028 bp, Homo Sapiens
  misc_feature (51)..(51): n is a, c, g, or t
aggcaaggccaaggcgggttaattccaaataagggtttgcccctccattgncttggaaggagaataacttgccaagaacctcccaggggttaaaggtgggggggttgcccaggctgccccggctggtttccccatttttccccgttccacattttccgggaagggcatattctaaggtaggagggccacgaaaacggggcatgaaactcaggcagccatatttggtgtcataaatgctgctggggaacatctcacacaggtcagcggtgaaggttcccagactctcagggaggtgtgcatagaagttctggtaccaggaacacccaagtctataaggccattgtgtagcaccagggggccggcgggctcggattagctccaggaatagggtccgtactgactggctctggctctcatcacccttgtcattgcccttatggtaggggatgccttgggcatactgctggttgaagttgaagccatgctgtatcaggaactgcacagactttggttctatgacatactcctccatgcacagcagagtgagattgaacacttgagccagataggaatgttcacccttgtctggctgccgcttgaagcaggcgaggcccagggaaaggatagaacgggtcctggcagcatgacacacggccttgtaacgttcctcaatgcactggttcagcaaactcttcctgtccccaagcccactcagctccgtgtccacagccacgaaattagctgtctttatggctagcaggagggatggccacatctccttgaagttgttgctttgcacatccactacgggaacctggactactagctcctccccagatgttgtgcttttgctgacaccaccgtcggaagctgcgggagctgaaactgcgccatcgtcactgtcggcgaccatgacaccgctcgtctcccgcctgagtcgtctgtgggtacgctggacttgcggtccgtctcctggcgcggttcaggcagtcggggatggggcggggtctcgccgtcgggtcgccccc

SEQ ID NO: 262291 - DNA, 843 bp, Homo Sapiens
gagaacaggagccatcagcactgcacgctgggctggggcacggctctgtgatgtgttagcccaggctggccaccaactctgtgaaactgaggcccacgtctgctttgagggactggactcagaccctactgggactgcctatggagcatccatccctctggctcgggccatggaccctgaagctgaggtcctgctggcatatgagatgaatgggcagcctctgccacgtgaccacggcttccctgtgcgtgtggtggttcctggagtggtgggtgcccgccatgtcaaatggctgggcagagtgagtgtgcagccagaggaaagttacagccactggcaacggcgggattacaaaggcttctctccatctgtggactgggagactgtagattttgactctgctccatccattcaggaacttcctgtccagtccgccatcacagagccccgggatggagagactgtagaatcaggggaggtgaccatcaagggctatgcatggagtcgtggtggcagggctgtgatccgggtggatgtgtctctggatgggggcctaacctggcaggtggctaagctggatggagaggaacagcgccccaggaaagcctgggcatggcgtctgtggcagttgaaagcccctgtgccagctggacaaaaggaactgaacattgtttgttaaggctgtggatgatggttacaatgttgcagccagacaccgtggccccaatctggaacctgcgaggtgttctcagcaatgcctggcatcgtgtccatgtctatgtctccccatgagcatggaaagggaccacctccacccccttttccccacccatttaaccctcc

SEQ ID NO: 262292 - DNA, 1015 bp, Homo Sapiens
  misc_feature (568)..(581): n is a, c, g, or t
gggcggcggccgtgggtccctgccggccggcggcgggcgcagacagcggcgggcgcaggacgtgcactatggctcggggctcgctgcgccggttgctgcggctcctcgtgctggggctctggctggcgttgctgcgctccgtggccggggagcaagcgccaggcaccgccccctgctcccgcggcagctcctggagcgcggacctggacaagtgcatggactgcgcgtcttgcagggcgcgaccgcacagcgacttctgcctgggctgcgctgcagcacctcctgcccccttccggctgctttggcccatccttgggggcgctctgagcctgaccttcgtgctggggctgctttctggctttttggtctggagacgatgccgcaggagagagaagttcaccacccccatagaggagaccggcggagagggctgcccagctgtggcgctgatccagtgacaatgtgccccctgccagccggggctcgcccactcatcattcattcatccattctagagccagtctctgcctcccagacgcggcgggagccaagctcctccaaccacaannnnnnnnnnnnnncggtgaatcacctctgaggcctgggcccagggttcaggggaaccttccaaggtgtctggttgccctgcctctggctccagaacagaaaaggagcctcacgctggctcacacaaaacagctgacactgactaaggaactgcagcatttgcacaggggaaggggggtgcccctccttcctaaaaacccctggggggccaggaaaaaatagggggggccgaaatttgaaactagggcacccaacacaactcaagaggggccggggaaataaccaccccggggcggtcaaccctttgagggggatataggggatcctattttgtttaaaaacaaacaggaagaacttggtacccgccactagcggagtggcttgcttcgccttacaataagaccgagcacccccaccaaaatatcccgccaaagacgggaggcgaggg

SEQ ID NO: 262293 - DNA, 1471 bp, Homo Sapiens
  misc_feature (842)..(842): n is a, c, g, or t
ggagagagacggcaacctgggttccggaagccggagagctggagctttgaagccaccccggtcaaaggatgctgagtccggagcgcctagccctaccggactacgagtatctggctcagcgacatgtcctcacctacatggaggatgcagtgtgccagctgctagaaaacagggaagatattagccaatatggaattgccaggttcttcactgaatattttaacagtgtatgccagggaacacacattctctttcgagaattcagcttcgtccaagccaccccccacaatagggtatcatttttacgggccttctggagatgcttccgaactgtgggcaaaaatggcgatttgctgaccatgaaagaatatcactgtttgctgcaattactgtgtcctgatttcccgctggagctcactcagaaagcagccaggattgtgctcatggacgatgccatggactgcttgatgtctttttcagatttcctctttgccttccagatccagttttactactcagaattcctggacagtgtggctgccatctatgaggacctgctgtcaggcaagaaccccaacacagtgattgtgccgacgtcgtccagtgggcagcaccgccaacgacctgccttgggcggggccggcacgctggagggcgtggaggcgtcgctgttctaccagtgtctggaaaacctgtgtgatcggcacaagtacagctgcccacccccagcacttgtcaaagaggccctcagcaatgttcagagactgaccttctatggattcctcatggcctctctcaaagcaccgtggaatcaaccaagcccctccggagctttgccctgnacaagggggatctgatgcacgacccagcaatggatgaagagctggaacggctgctggcccaggtcccaggcctggtcaactcggtcacagccagtccagaggccagttgcctgccttcccggacccctccccgggttggctctccctggagacctctccatcattcccgaaaagtggatggagagagtgatggctccactgaagagacagacgagtcggagacttgaggagtccaaagggtcctgaccacagagccctgtacctgatccacaaaccaaaccttgagagtagcacaaaccaagacctacctctcacagcactagccagtgaatgcactcatgatgctgacaaaggaggaataaaagccacaagaaacagacaagaggaggcactgatgatcagacaagacagcggccccggacaagggaaagcgaccggcactcccaggaccgatatcagacgggaaacaacgtacgcaccacagaacacgggcgaagcaactagaaacacggacaagtacgcacccaaacaagaagcatacagagaacaaccgaaaacaacagaaacacgaaacataaaaggggaacgaaaagaacacgcacaaggaaacaagcaaccagacagcgacg

SEQ ID NO: 262294 - DNA, 990 bp, Homo Sapiens
  misc_feature (494)..(744): n is a, c, g, or t
aagagcgagcctgggtggcgaattcggcacgagggcttgatgtctttttcagatttcctctttgccttccagatccagttttactactcagaattcctggacagtgtggctgccatctatgaggacctgctgtcaggcaagaaccccaacacagtgattgtgccgacgtcgtccagtgggcagcaccgccaacgacctgccttgggcggggccggcacgctggagggcgtggaggcgtcgctgttctaccagtgtctggaaaacctgtgtgatcggcacaagtacagctgcccacccccagcacttgtcaaagaggccctcagcaatgttcagagactgaccttctatggattcctcatggctctctcaaagcaccgtggaatcaaccaagccctcgcagccactaggaaggagaagccaattagcaactgggtcacagcctgaagtaacctcatcccccttttctaagggcctttaaaaaggacactggctgnnnnnnnnnnnnnnnnnnnnnnnnnnnnnnnnnnnnnnnnnnnnnnnnnnnnnnnnnnnnnnnnnnnnnnnnnnnnnnnnnnnnnnnnnnnnnnnnnnnnnnnnnnnnnnnnnnnnnnnnnnnnnnnnnnnnnnnnnnnnnnnnnnnnnnnnnnnnnnnnnnnnnnnnnnnnnnnnnnnnnnnnnnnnnnnnnnnnnnnnnnnnnnnnnnnnnnnnnnnnnnnnnnnnnnnnnnnnnnnnnnnnnnnnnnnctggaccaacaaaacggaaacttccttcaaataaattaaccccttatagccccgcacccaacaaaccccaaaaaaattccagagcttttaatgttcgggggggcgggcaaaagaggttaatgtaattgggcaactttggtccaaagccggggtttccatgagacccaactttttttaggaccacagggggagacaaactgggcgcgggacaccccccagtaggtgcggcctagtattactcccccc

SEQ ID NO: 262295 - DNA, 1412 bp, Homo Sapiens
  misc_feature (1046)..(1084): n is a, c, g, or t
  misc_feature (1086)..(1113): n is a, c, g, or t
  misc_feature (1115)..(1133): n is a, c, g, or t
  misc_feature (1135)..(1152): n is a, c, g, or t
  misc_feature (1154)..(1169): n is a, c, g, or t
  misc_feature (1171)..(1195): n is a, c, g, or t
  misc_feature (1197)..(1199): n is a, c, g, or t
  misc_feature (1201)..(1211): n is a, c, g, or t
  misc_feature (1213)..(1213): n is a, c, g, or t
  misc_feature (1215)..(1215): n is a, c, g, or t
  misc_feature (1217)..(1217): n is a, c, g, or t
  misc_feature (1219)..(1223): n is a, c, g, or t
  misc_feature (1225)..(1229): n is a, c, g, or t
  misc_feature (1231)..(1239): n is a, c, g, or t
  misc_feature (1242)..(1278): n is a, c, g, or t
  misc_feature (1284)..(1284): n is a, c, g, or t
  misc_feature (1291)..(1291): n is a, c, g, or t
  misc_feature (1293)..(1313): n is a, c, g, or t
  misc_feature (1340)..(1340): n is a, c, g, or t
ctggggggtgctcccgggtccccgccgccggggacgggcgtctgcggctggcgcgactagcgctggtactcctgggctgggtctcctcgtcttctcccacctcctcggcatcctccttctcctcctcggcgccgttcctggcttccgccgtgtccgcccagcccccgctgccggaccagtgccccgcgctgtgcgagtgctccgaggcagcgcgcacagtcaagtgcgttaaccgcaatctgaccgaggtgcccacggacctgcccgcctacgtgcgcaacctcttccttaccggcaaccagctggccgtgctccctgccggcgccttcgcccgccggccgccgctggcggagctggccgcgctcaacctcagcggcagccgcctggacgaggtgcgcgcgggcgccttcgagcatctgcccagcctgcgccagctcgacctcagccacaacccactggccgacctcagtcccttcgctttctcgggcagcaatgccagcgtctcggcccccagtccccttgtggaactgatcctgaaccacatcgtgccccctgaagatgagcggcagaaccggagcttcgagggcatggtggtggcggccctgctggcgggccgtgcactgcaggggctccgccgcttggagctggccagcaaccacttcctttacctgccgcgggatgtgctggcccaactgcccagcctcaggcacctggacttaagtaataattcgctggtgagcctgacctacgtgtccttccgcaacctgacacatctagaaagcctccacctggaggacaatgcccctcaaggtccttcacaatggcaccctgcctgagttgcaaggtctaccccacattagggtttttcctggacaacaatccctggggtctgcgactgccacatgggcagacatggtgacctggctcaaggaaacagaggtagtgcagggcaaagaccggctcacctgtgcatatccggaaaaaatgaggaatcgggtcctcttggaactcaacagtgctgacctgaactgtgacccgatctcccnnnnnnnnnnnnnnnnnnnnnnnnnnnnnnnnnnnnnnncnnnnnnnnnnnnnnnnnnnnnnnnnnnngnnnnnnnnnnnnnnnnnnncnnnnnnnnnnnnnnnnnngnnnnnnnnnnnnnnnngnnnnnnnnnnnnnnnnnnnnnnnnngnnnannnnnnnnnnncngncngnnnnngnnnnngnnnnnnnnngcnnnnnnnnnnnnnnnnnnnnnnnnnnnnnnnnnnnnncgcaanggggggngnnnnnnnnnnnnnnnnnnnnngaccgcgcgcggggcggcgccgccacncgcggccgcagggggcgaggccacgcgcagaaagcacaacacaccaagaacgcgaacccgaagaggccaggc

SEQ ID NO: 262296 - DNA, 1038 bp, Homo Sapiens
tggtacggtccgcgaatccggggatatcgtcgacccacgcgtcggtggaacgagactgcaatggggacacgccaaacctgagtttctacagaaatgagatccgcttcctgcccaacggctgtttcattgaggacattcttcagaactggacggacaactatgacctccttgaggacaatcactcctacatccagtggctgtttcctctgcgagaaccaggagtgaactggcatgccaagcccctcacgctcagggaggtcgaggtgtttaaaagctcccaggagatccaggagcggcttgtccgggcctacgagctcatgctgggcttctacgggatccggctggaggaccgaggcacgggcacggtgggccgagcacagaactaccagaagcgcttccagaacctgaactggcgcagccacaacaacctccgcatcacacgcatcctcaagtcgctgggtgagctgggcctcgagcacttccaggcgccgctggtccgcttcttcctggaggagacgctggtgcggcgggagctgccgggggtgcggcagagtgccctggactacttcatgttcgccgtgcgctgccgacaccagcgccgccagctggtgcacttcgcctgggagcacttccggccccgctgcaagttcgtctgggggccccaagacaagctgcggaggtccaagcccagctctctgcccatccgtcgagggcttccagaacgctgcgcgcgaagaagcccggggaccgaacacgaggcagaacccaggttcggactggggcacaagcaatgcaagggggggcccggtgcacacgggccagcccggaacgtgagcccagatggggacccgaaagaccagggatagggagggccggaaaaatgcgcacctagcccaagagaaaacatatgggagcaccggagaaccaaagagcccaagctaagagacacccagatgtagaggacacaagcaagcacagacagaggaaacggacacacaacagacaaggaaagcagtaatacacccgacagaaggccaa

SEQ ID NO: 262297 - DNA, 1044 bp, Homo Sapiens
tctgcaggaagtggtgggaatccggtcagacttggccgtggaggctggagctccctatgctgagcgattggctgcaggggagcttcgtctgggcaaggaacggaccgatcggtaccgcatggtagtagggggtgcccaggcaggggacgcaggcacctaccactgcactgccgctgagtggattcaggatcctgatggcagctgggcccagattgcagagaaaagggccgtcctggcccacgtggatgtgcagacgctgtccagccagctggcagtgacagtggggcctggtgaacgtcggatcggcccaggggagcccttggaactgctgtgcaatgtgtcaggggcacttcccccagcaggccgtcatgctgcatactctgtaggttgggagatggcacctgcgggggcacctgggcccggccgcctggtagcccagctggacacagagggtgtgggcagcctgggccctgcctatgagggaccacacattgccatggagaaggtggcatccagaacataccggctacggctagaggctgccaggcctggtgatgcggacacctaccgctgcctcgccaaagcctatgttcgagggcctgcgcaccaactttcccgaagccaatcagtgccccgcttcccggcctctacctgaaaaatgtgcccgtaacgatagtgccttccccttccccctgcgcgctctgccccgacgcccacgccccgtacctcccctcgcacgcaaccggacggccccgcccaactgcacacttttgagcccttttattacgagcccccaccgatcgagactccccccaactgccctgtcgttaccgggtcgcccccgtaataccacccccccctgtatgtgtgcaggcccccggccgctaccgcatggccaacgccaccacaccagtattgacccacgctcataccctccccccgtagcaccgcctccacaaggccagttccaaactatcttccctccatccaccccgcccgtgcttcacccatccacccgttgagccccaccccgcccccagtacc

SEQ ID NO: 262298 - DNA, 1318 bp, Homo Sapiens
  misc_feature (528)..(550): n is a, c, g, or t
tgtgacctgctactgtcgctacggacagcgctctggcaaaaacaggccagtgccagccaggctgtgggggagacctaccacgcgtcaggcgctgaactggcgggcttccaacgggacctgggcagcctgcgcaggctggcacacagcttccgcccagcataccgcaaggtgttcctgcatgaagccaccgtgcgcctgatggcaggagccagccccacccgcacccaccagctgctggaacacagcctgcggcggcgcaccacgcagagcaccaagcacggagaggtggatgcctggcccggccagcgagagcgggccaccgccatcctgctggcctgccgccacctgcccctctccttcctctcctccccgggccagcgggcagtgctgctggccgaagctgcccgcaccctggagaaggtgggcgaccggcgctcctgcaacgactgccagcagatgattgttaagctgggtggtggcactgccattgccgcctcctgaccaccaggctcagcccacccctccacnnnnnnnnnnnnnnnnnnnnnnncccctcagcatcttcccgctgagagtggtggggaagagccttgtcttcttagctgtcacctgccgaggcttctgggccactcaggccagtgcacccctgggcagagccccttaaagctgctgtcactagatgcccatggtccaggcctggtgggcgtgagaggataggtggcagggcagaaactgggcagccctgacttgatagcagcagggggagctcccaagctgcaagcccctgctccagccttcctgagtttctctctcctgaaacctaatctctcctttttgcttctcagtttttatcagggtttctctggggggacagcagtctctgagcaccagggagccagtggcctcaagggctgtgccaggaagtgccttcccttttataccacatggtttctacccaggggctggggttgcaccaataaagggaaagtggtaggctgaaaaaccccaggggagcgaaacccccccggggggaacaggaaacacgcgaccaagtggtacccccttattaaagcgacagccaaggcgagagggaggggcgagcccgcgagataaggtagataaacagcaagcagcccgcatggattacacaagatgggtcttcttttttgattttcactagcctctttgatttgtgttgttacccccgaaagaagaagatcagcgacgggacgtcagatgaagcagaagcgtagataccaccgaacaagctccgactagccttaatgatagcatccttgatgtatttcacgtatcagct

SEQ ID NO: 262299 - DNA, 1324 bp, Homo Sapiens
  misc_feature (1115)..(1116): n is a, c, g, or t
  misc_feature (1133)..(1133): n is a, c, g, or t
  misc_feature (1149)..(1149): n is a, c, g, or t
  misc_feature (1259)..(1259): n is a, c, g, or t
  misc_feature (1283)..(1283): n is a, c, g, or t
  misc_feature (1290)..(1290): n is a, c, g, or t
aagggccattatgtacaacaattgaaaccccggtggggtttaaaaaaaacaagcaaggggctggtacggcccggaattccgggatatcgtcgacccacgcgtcgcatcgacaggggccagtacttgcagctgcaggagctcgagtgtgactgggaggaggtcaccacctcggggccctgtggggaggactctgtgctcctggaccgcaagagcgggaagcagtactccatcgaggccgcctccgctgccggcgcatctctaaggaggagtaccatctgtacaaggacggccacctgtccatctccgagtttgcgctgcttgtagctggggagaccaagccaagctcctcactctccatcggctctatcatctccaagtccccgctcgcctccccggccccccagagcaccagtttcttctctcccagcttctctctcgggctcggtgatgacagcttccctatcgccgggatctatgacacaaccacagacaacaagtgcagcatcaagacggccgtggccaagaacatgctggaccccatcactgggcagaagctactggaggcccaggcggccacagggggcatcgtggacctgctcagccgtgagcgctactctgtgcacaaggcgatggagaggggcctgatcgagaacacctccacacagaggctgcttaacgcccagaaggccttcaccggcatcgaggaccccgtcaccaagaagaggctctcggtgggcgaggccgtccagaagggctggatgccccgggagagcgtgctcccacacctgcaggtgcagcacctgaccggggggctcatcgaccccaagaggacaggccgcatccccatccagcaggccctcctctccgggatgatcagtgaagagctggcccagctcctgcaggacgagtccagctacgagaaggatttgacagaccccatctccaaggaacggctgagctacaaggaggccatgggccgctgccgcaaagaccccctgagcggcctgctgctcctgccagcggcactggaggggtaccgctgctaccgctccgcctcccccaccgtcccgcgctcccttcgctgacacgggccaaggagcccagtgggggaagtnngcgtgtgttgggccagngtaggatacgtacacnctcttgcctcagagcagcctcatcccagggcagtggggtcttccctctgtccaaccactggttttattattttactaaacatgggtgatggggctcccctcccctaaccnttgggtgcctgatccatcccccgnaccaggnacaggcagcccactcagtttctttcctccaccct

SEQ ID NO: 262300 - DNA, 1149 bp, Homo Sapiens
aggctggaccggtccggaatttcgggatggatcgccacctggtggctaagagactgactgaacatgtgcaagataaaagcaagctgcctatcctcatcttcccagaaggaacctgcatcaataatacatcggtgatgatgttcaaaaagggaagttttgaaattggagccacagtttaccctgttgctatcaagtatgaccctcaatttggcgatgccttctggaacagcagcaaatacgggatggtgacgtacctgctgcgaatgatgaccagctgggccattgtctgcagcgtgtggtacctgcctcccatgactagagaggcagatgaagatgctgtccagtttgcgaatagggtgaaatctgccattgccaggcagggaggacttgtggacctgctgtgggatgggggcctgaagagggagaaggtgaaggacacgttcaaggaggagcagcagaagctgtacagcaagatgatcgtggggaaccacaaggacaggagccgctcctgagcctgcctccagctggctggggccaccgtgcggggtgccaacgggctcagagctggagttgccgccgccgcccccactgctgtgtcctttccagactccagggctccccgggctgctctggatcccaggactccggctttcgccgagccgcagcgggatccctgtgcacccggcgcagcctacccttggtggtctaaacggatgctgctgggtgttgcgacccaggacgagatgccttgtttcttttacaataagtcgttggaggaatgccattaaagtgaactccccacctttgcacgctgtgcgggctgagtggttggggagatgtggccatggtcttgtgctagagatggcggtacaagagtctgttatgcaagcccgtgtgccaaggaaatgtgcctgggggcggccaccccgctctccaggaaaggcacagctgaagcacctgtggctggcttcggcctcaacatcgcccccagccttggagctctgcaaacatgataggaaggaaactgtcatctgcaggggctttcagcaaaatgaaaggttagatttttatgctgctgctgatgggggtactaaaggggaggggaaaagcccagtggggccccctgaatgggccatggggaagaaccgt

SEQ ID NO: 262301 - DNA, 1018 bp, Homo Sapiens
ggtacggtccggaagttcgggatatcgtcgacccacgcgtcgggggaccatgactattgtgtccggagcaggacccccccaaaaaagatgcctgccctagtcattccagaggtgggctcccgatggaatgtcaagcgccatcaggacatcaccatcaaacctgtcttgtccttgggcccagctgcccctccgcccccatgcatagctgcctcccgggagccgcttgatcacaggactagcagtgagcaggcagatccctcagcaccctgccttgccccatccagcttgctgtcccctgaggcctcaccctgccggaatgacatgaacactaggactccccctgaaccctcagccaagcagcggtcaatgcgctgttaccgaaaagcctgcaggtcagccagcccctcaagccagggctggcagggccgccgaggccgcaacagccgttctgtcagctctgggtccaaccggactagcgaagcatcttcctcatcctcatcatcgtcttcctcatcccgatctcggtccaggtccctctcccccccacacaagaggtggcgaaggtccagctgtagttcctctggacgttctcgaagatgctcttcctcttcttcgtcatcatcttcctcttcgtcttcctcatcctcatcatccagttctcgaagccgctcacgatccccatccccccgccggagaagtgacaggaggcggcggtacagctcttatcgttcacatgaccatttaccaaagggcaaagagtgctacaaaaggagcgtgcaatagaagaaagaagggtggtcttcattggaaagatacctggccgcatgactcgatcagagctgaaacagaggttctccgtttttggagagattgaggagtgcaccatccacttccgtgtccaaggggacaactacggcttcgtcacttatcgctatgctgaggaggcatttgcagccattgaggagtgggccacaagctgcggcaggcagatggaggcagccctttggatctctgcttt

SEQ ID NO: 262302 - DNA, 1465 bp, Homo Sapiens
  misc_feature (518)..(518): n is a, c, g, or t
  misc_feature (884)..(884): n is a, c, g, or t
gcctacaagcccatgaactgcgccctgtcctctcagctcaatggcaagtgcatcgagctggtacaggtgcccggccaaagcagcatcttcaccatgtgcgagctgcccagcaccatccccatcaagcagaacgcccgccgcagcagctggagctctgacgaagggatcggggaggtgctggagaaggaagactgcatgcaggccctgagcggccagatcttcatgggcatggtgtcctcccagtaccaggcccggctggacatcgtgcgcctcattgatgggcttgtcaacgcctgcatccgctttgtctacttctctttggaggatgagctcaaaagcaaggtgtttgcagaaaaaatgggcctggagacaggctggaactgccacatctccctcacacccaatggtgacatgcctggctccgagatccccccctccagccccagccacgcaggctccctgcatgatgacctgaatcaggtgtcccgagatgatgcagaagggctcctcctcatggnaggaggagggccactcggacctcatcagcttccagcctacggacagcgacatccccagcttcctggaggactccaaccgggccaagctgccccggggtatccaccaagtgcggccccacctgcagaacattgacaacgtgcccctgctagtgccccttttcaccgactgcaccccagagaccatgtgtgagatgataaagatcatgcaagagtacggggaggtgacctgctgcctgggcagctctgccaacctgcggaacagctgcctcttcctccagagcgacatcagcattgccctggatcccctgtacccatcccgttgctcctgggagacctttggctacgccaccagcatcagcatggccncaggcctcggatggcctttctcccctgcagctgtcagggcagctcaacagcctgccctgttccctgacctttcgccaggaggagaccatcagcatcatccggcttatcgaacaggctcggcatgccacctatggcatccgtaagtgcttcctcttcctgctgcagtgccagctgactcttgtggtcatccagttcctttcttgcctggtccagctgccgccactcctgagtaccaccgacatcctggggctgtcctgcttttgctaacctctgctcagcaatctctctgctcggggaagcccccccatagctccatcagggctatggcaaccgggaaaaaacctccagtccatttcccaagaaagacccagcactaacttcctggctccgctttccggctcaagtttcagccttcaccatcagcctcctggcctcatctgcttttgggctttcacacctgcagagctttctgtggacagcttccccggggaccggcaaccctcacccaactggctccctccggtcaaggcttggccccaggaaacggacgaaaaagggcctcccaaccccggggtttggaa

SEQ ID NO: 262303 - DNA, 1104 bp, Homo Sapiens
  misc_feature (26)..(26): n is a, c, g, or t
ctgggacttcccgggggggaagtggnccacccccaattctttcattccggattcgggggtaagggcagggcccccgggagggcccgagatccccagtcgtcctcggtgaggggaggtgacttcattcatggcccgctcccacacggccactgggggggccaggtcgagaagggtcgaagttggccagctccttctccatgtagtacaggacccgcatggagtcgtcctgctggctggcctgaatcctgtagccactgcggacttcagaggccacactgctgtccgtgtcccgaagcaggggtacataggagccttggccaccagctgagctactcctgtcaacgtctccagggtatcctccagggtacccgttgtaggcagggcccatgggaatcatagctggtgggggtggggtcttggcgggagacaggtgggcataggtgctgggggcataaatgctgggaacacctgaggtggctgctttgccggcggcatacacaaggacgatgagctctgcgtaggcctcattgttcccctggaggtcctgggctgagaccacggagcagtaatacacaccactgtccccccacgccgtctggtcaaaggtcaggtcagcatttccgggtgatggtaatcctccgggccctggtagtaatctcccagggtcacagcgttgccctgcttggtggccacgaccctgacggtgcgcacgctgtcctggcactcgacgtaggggttgtagcctgggttcccggctgccagctgggcattgagctggttgtcgacgctggccggggagaaggcatcggcgatgcggtcccggcagaaagacttgtacttccagatgacgatgggttgcgtgggggtcgaggtcatctggtaggtacagggcagggtcacaggctggaagaggatcaccacgtggtaggggttggacacggtcacctggatggccctggcaggagctgtgcaccaggtgctaagcagaagccacacgaagacgaccgcgtcccggcctgcggcggccgggtgggagcccagccctctggagagcccgccggccaacagcgccatcgcggcggtaagggcgcgtctggcccgcgc

SEQ ID NO: 262304 - DNA, 1078 bp, Homo Sapiens
  misc_feature (775)..(809): n is a, c, g, or t
ccgcgatggcgctgttggccggcgggctctccaggacctccaggggaacaatgaggcctacgcagagctcatcgtccttgactggctcttcgtggttgtggtatgcctggctgccttcctcatcttcctcctcctgggcatctgctggtgccagtgctgcccgcacacttgctgctgctacgtcaggtgcccctgctgcccagacaagtgctgctgccccgaggccctgtatgccgccggcaaagcagccacctcaggtgttcccagcatttatgcccccagcacctatgcccacctgtctcccgccaagaccccacccccaccagctatgattcccatgggccctgcctacaacgggtaccctggaggataccctggagacgttgacaggagtagctcagctggtggccaaggctcctatgtacccctgcttcgggacacggacagcagtgtggcctctgtccgcagtggctacaggattcaggccagccagcaggacgactccatgcgggtcctgtactacatggagaaggagctggccaacttcgacccttctcgacctggcccccccagtggccgtgtggagcgggccatgagtgaagtcacctccctccacgaggacgactggcgatctcggccttcccggggccctgccctcaccccgatccgggatgaggagtggggtggccactccccccggagtccccaggggatgggaccagggagccccgcccagggaagcaggcagggcggggggctgggagggaccacgaannnnnnnnnnnnnnnnnnnnnnnnnnnnnnnnnnnttggagagaaactttacccccgtcccaaaaaccccgttcccaaataccagggcacaccaggacccctccccacgcaaataaaccgcgcgcgcacgagaaaaaaattatcgcggccccccaaagagtccctctcacccgacatgctgtcgcccgccttgcggcggataacaactcctcttgtggcgcgccccgatacgccacctcccgccccgccgaaatttttccccccacgtcctcgtgcgcgaaaacctccccccccgcaaaaccgg

SEQ ID NO: 262305 - DNA, 924 bp, Homo Sapiens
  misc_feature (781)..(781): n is a, c, g, or t
aggcttctccacagactgtggcgctcacgcaggcgacggcggccgggcagcaggtgcagatgatccctgcagtgaccgcgactgcccaggtggttcagcagaaactcattcagcagcaggtggtgaccacggcgtcggccccgctccagactccaggcgctcccaacccagcccaggtgcccgccagctccgacagcccaagccagcagcccaagttacagatgagggtccctgctgtcaggctaaagacacctactaagcctccgtgccagtagtcagggcagcagggctgcctctcatctaaagcaaaactaccttcctcacagaaaacgctttattagtgaaccttgggaccatgtcacgcaagagattcagcactgggaaagatataattgaaacaaaatagtgtaatcattttattaaaatgcatcccacactgcaggacaaatggtccttatggagtgccgcgttctctgtactacgtggctcatggaaaaagtgacaacatggcttcctctaaatcatttcacctttcagtccccacccgcacccgtcccctagagccatagtactgtgttctgaaagccatttagaatttctttgtgagcatgtagtgctttgcagcgcacagaagccgtctgccgtgtgtgaggagcatacaatggactttctaaagataaggcgtggggcttccacagtgtctgccagagtttagttctttataccttacttgaaaaatgcctcgtggtcttcggcagagggggaaggcctgtctaaagtncaatccatcccgagatggggtttttccctttccaaaagaaagggcaatatgggttcccttcctttcccctccctaaaatatgactttaacttttttaaaaagaaatggttctttgaacaccccaccctaaaacaccaccaagg

SEQ ID NO: 262306 - DNA, 1506 bp, Homo Sapiens
  misc_feature (1358)..(1358): n is a, c, g, or t
  misc_feature (1456)..(1456): n is a, c, g, or t
  misc_feature (1459)..(1459): n is a, c, g, or t
ccaggtgcccgccagctccgacagcccaagccagcagcccaagttacagatgagggtccctgctgtcaggctaaagacacctactaagcctccgtgccagtagtcagggcagcagggctgcctctcatctaaagcaaaactaccttcctcacagaaaacgctttattagtgaaccttgggaccatgtcacgcaagagattcagcactggggaaagatataattgaaacaaaatagtgtaatcattttattaaaatgcatcccacactgcaggacaaatggtccttatggagtgccgcgttctctgtactacgtggctcatggaaaaagtgacaacatggcttcctctaaatcatttcacctttcagtccccacccgcacccgtcccctagagccatagtactgtgttctgaaagccatttagaatttctttgtgagcatgtagtgctttgcacgccacagaagccgtctgccgtgtgtgaggagcatacaatggactttctaaagataaggcgtgggcttccacagtgtctgccagagtttagttctttataccttactgaaaaatgcctcgtggtcttcgcagaggggaaggcctgtctaaagtcaatcatccgagatgggttttccattccaaagaaaggcaatatggttccttccttccctcctaaaatataacttaacttttaagagaaatgttctgacacccacctaaacacacaaggcacgttcctggcctgtgttcaagggaaatgatcagtcattgcattgttattccaaagagcagccaacagtggcctcccccaggccctaccctgcaatgggattcgctttcatttaatggaaaacttctgggactgatgcccaactcagtgcactcaagacgcatctccagttttcgggggaagctggtatttgacatagtgtgttaaacagctcctgagaacctttgggacactctgccatggctggcgtgaggcccagaggaccacgcagaggcaatggtagtacagatgtcacagctgagggtacgatgaggcctgggctcagtgagccaggacgaatgtgacagacaccccttgctgccacagtcagccctttgacgaaggtgggctggtgattctggaagtattggctatagcggtgggcccagtcaactcttccttgtggacttacgacagcagattttctctaggataagcttgtgtggttctgccagtgaagcagagaaccacctgtgctgttgtggaaggcgtgccgttgagggggaaaacgaagcccagtatttgctactgtttttcctttttttactatgacaggaaaataaatgcaattttagtggaattgattgacagtgtcnccttactttgaagttttcaccaaagcaaaaaggtccatatccaatagtatcctttgtgctgtggcttgattttggcctattttacattatttggtccnggnaattaggttatattaggttttttgtatactaaaaatcagttatggca

SEQ ID NO: 262307 - DNA, 1240 bp, Homo Sapiens
  misc_feature (895)..(895): n is a, c, g, or t
cctgggtggcgatttcggcacgaggggcaggacagttcgcccgcgcagagcggacctcctcccaggtgaccattctctgtaccttcttcaccgtggtgtttgccctctacctggcccctctcaccatctcctctccctgcatcatggagaagaaagacctcggccccaagcctgctctcattggccaccgcggggcccccatgctggctccagagcacacgctcatgtccttccggaaggccctcgagcagaagctgtacgggctccaggctgacattaccatcagcctggacggcgtgcccttcctcatgcatgacaccaccctgcggcgcaccaccaacgtggaggaggagttcccggagctggcccgcaggcctgcctccatgcttaactggaccaccctgcagagactcaacgctggccagtggttcctgaagactgaccccttctggacagccagctccctgtcaccctccgaccacagagaggcccagaaccagtccatctgcagcctggcagagctcctggagctggccaagggcaatgccacactgctgctcaacctgcgtgacccgccccgggagcacccctaccgcagcagttttatcaacgtgactctggaggccgtgctgcactccggcttcccccagcaccaggtcatgtggctgcctagcaggcagaggcccctggtgcggaaggtggctcccggcttccaacagacatcaggctccaaggaagcagtcgccagcctgcggagaggccacatccagcggctgaacctggcgctacactcaggtgtcccgccaggaagctcaggggactacgcgtcctgggaacctgagtggggaacctctacacagtcaacgcaccgtggactcttctccctgctgtggtnggtgcgagaggtcccatccgtcacctctgacaactcccacaccctgtcccaggtgccttcccccctctggatcatgcccccggacgagtactggtctcatgtgggtcactgccgacctggtctccttcaccctcatcgtgggcatcttcgtgctccagaagtgggcgcctgggtggcatacggagctacaaccctgagcagatcatgcttgagtgctgcggtgcgccggaccagccgggacgtcagcatcatgaaggagaagcttattttctcagagatcagcgaaatggtggtgaagggtcttccgatgtgcctcttccgtatggttcaggacaacagtttatg

SEQ ID NO: 262308 - DNA, 1469 bp, Homo Sapiens
  misc_feature (54)..(54): n is a, c, g, or t
  misc_feature (214)..(214): n is a, c, g, or t
  misc_feature (250)..(269): n is a, c, g, or t
  misc_feature (304)..(304): n is a, c, g, or t
  misc_feature (316)..(316): n is a, c, g, or t
  misc_feature (342)..(342): n is a, c, g, or t
  misc_feature (401)..(414): n is a, c, g, or t
  misc_feature (448)..(462): n is a, c, g, or t
  misc_feature (490)..(507): n is a, c, g, or t
  misc_feature (526)..(537): n is a, c, g, or t
  misc_feature (551)..(605): n is a, c, g, or t
  misc_feature (636)..(644): n is a, c, g, or t
ttggtttggtgttcagattgtcgatcttcttatagcatgggtttattgttttcnagtaattacaggcacagcacgttcagccaccacccctgggtcttcgttcgtgtgcgggttagtagtttgtggggagtgttcttctttcccttctcgtatattcaaaggggagaaagatgtgggtgggggcgtggtgtttgatttcttcatctttctctantcccggcgcgaggccgctgcgctggctcttcgattnnnnnnnnnnnnnnnnnnnnaggtcgcggggtccgggcgcccggccggttcgagngaaggagagggntattatatttgtttgttgctcgggancccgtctacatgtgtatatcttttatctatgctgcgcgacaggaaagaaactaatcctnnnnnnnnnnnnnnagatatataaaaggagccccccctccccccctcnnnnnnnnnnnnnnnttaataaactcaaaccctccctcccccnnnnnnnnnnnnnnnnnnccccccccccaccgggggnnnnnnnnnnnnattagaggggtcgnnnnnnnnnnnnnnnnnnnnnnnnnnnnnnnnnnnnnnnnnnnnnnnnnnnnnnnttttttaaaggggggcaaaaaaaggtttagnnnnnnnnntggggcccggggaacttttgtgggaggttcctcttgggcccgctgagggcctgggggtgcaccatgagtccacaaagcatcccaggtagcctggcatgtgacaggaggggatgtcgcagtagcgcccagtagatgccctcctctgtctcagccacgtagcaccacggctgcacgtcaccgtctgggttacggcagaagttgtgcgcgcccagcccccagcggccgtgggggtcgctggcgctgctgtagctgtgttgctgcgtctggtcccagaagaggcacgggcggcccgccccgcgcgggccagtgcggttctggtggccggcggtagtcagccccattcacctggaagcattcggacaggcctggactgtgcaggctcccagccgaggccccacgcggctgcagcagcgggaggaagaggagaaagaggaagccctgcagggcttgtgtccccatcgctctcaaccaaggataggtcaccctcgcccggacacggcccgggctgcccccggggtcgcttcggggtctcccaggagacctagggggcgttgtcctctgacagtctcccctcgtccgactctgagccgcgctttccgtctggggtgggtaaatctctcctgggggtctttgcctcccagggcctctgcccgtagaggcgtctctctgtccctgtccctacccgggtctctccggggggaatctggccgggggcgttctcagtctctgtctcagcgagctctgggcggtgcctcagcctatacgcccgccccctccacaatgagcctagctctcggcatccctgaagtccggaccggtccagcc

SEQ ID NO: 262309 - DNA, 1224 bp, Homo Sapiens
  misc_feature (915)..(915): n is a, c, g, or t
tgcgatgaaggcctgcgggcatgtggtttgtgggaagtgctccgagttccgggcccgcctcgtctatgacaacaaccgctccaaccgtgtgtgcactgattgctatgtggccttgcacggggtgcctgggagcagtccagcctgcagccagcatacaccccagcgccggaggtccatcctggagaaacaggcctcagtggctgcagagaacagcgtcatctgcagcttcctgcactacatggagaagggtggcaaaggatggcacaaggcatggttcgtggtccctgaaaatgaacccttggtgctgtatatctacggagcccctcaggatgtgaaagcccagcgcagcctgcccctcattggcttcgaggtgggaccgcccgaggcaggggagcggcctgacagaaggcatgtcttcaagatcacccagagccacctcagctggtacttcagccctgagacagaggaactacagcgacgctggatggctgtgcttggccgggcgggccgaggggacacgttctgcccggggcccacactgtctgaggacagggagatggaggaggcaccggtggctgctttaggagccactgctgaaccccccgaatccccccagacccgagacaagacctagagggtttgggacaaactgggagcccccaccccacactctagttgcccatgtctgattgggggctctagccccttccctcccagctcagtcaatacttgaactcccatcacgggcactttcaatcccgaatgctgggtcttgggttttttaattcatcttttcacaaaacgtgggcttttaaaaaatatattcctacagtgatgtcaatttttattaatccctgtccccagggagggtggggagccgttgccagtcctaacctgaattaggtcgtttttctnccctcatccctcaataccctaccacagatcctgcctccacccagttccccacaaagcaccagaggtaggagacctggattcaagtgccagctctgccactgaccctggggccccgacccagccctgcctcctcagccagtgtcttcacacgtacaactccacgtggggtggcaactagacctctcctgcctctcccatggcttacagcttctacccggccccaaggctacccagtattttatcgtccagacccatggcagggccagcgggcaggacagggaaacaggggggaggacaatggatactcag

SEQ ID NO: 262310 - DNA, 1700 bp, Homo Sapiens
ggcgacatggagagcggggcctacggcgcggccaaggcgggcggctccttcgacctgcggcgcttcctgacgcagccgcaggtggtggcgcgcgccgtgtgcttggtcttcgccttgatcgtgttctcctgcatctatggtgagggctacagcaatgcccacgagtctaagcagatgtactgcgtgttcaaccgcaacgaggatgcctgccgctatggcagtgccatcggggtgctggccttcctggcctcggccttcttcttggtggtcgacgcgtatttcccccagatcagcaacgccactgaccgcaagtacctggtcattggtgacctgctcttctcagctctctggaccttcctgtggtttgttggtttctgcttcctcaccaaccagtgggcagtcaccaacccgaaggacgtgctggtgggggccgactctgtgagggcagccatcaccttcagcttcttttccatcttctcctggggtgtgctggcctccctggcctaccagcgctacaaggctggcgtggacgacttcatccagaattacgttgaccccactccggaccccaacactgcctacgcctcctacccaggtgcatctgtggacaactaccaacagccacccttcacccagaacgcggagaccaccgagggctaccagccgccccctgtgtactgagcggcggttaacgtgggaagggggacagagagggccctcccctctgccctggactttcccatgagcctcctggaactgccagcccctctctttcacctgttccatcctgtgcagctgacacacagctaaggagcctcataagcctgggcggggggctggcagagccacaccccaagtgcctgtgcccagaaggcttcagtcagccgctcactcctccaggccactttttaggaaaaggtttttaagctaaggtttttcctcgcttttaatgacctcagccccgcctgcagtggctagaagccagcaggtgcccatgtgctactgacaagtgcctcagcttccccccggcccgggtcaggccgtgggagccgctattatctgcgttctctgccaaagactcgtgggggccatcacacctgccctgtgcagcggagccagaccaggctcttgtgtcctcactcaggtttgcttcccctgtgcccactgctgtatgatctgggggccaccaccctgtgccggtggcctctgggctgcctcccgtggtgtgagggcggggctggtgctcatggcacttcctccttgctcccacccctggcagcagggaagggctttgcctgacaacacccagctttatgtaaatattctgcagttgttacttaggaagcctggggagggcaggggtgccccatggctcccagactctgtctgtgccgagtgtattataaaatcgtgggggagatgcccggcctgggatgctgtttggagacggaataaatgttttctcattccaaaaacggaaagggccccccagcagccgggaacattggtcggcccgccctcgggcccctcgaaagaagccttttctagaacccaattttcgttttgggccccgccggggccccccaagtaacgcgaaaggtggaaaccttggggtccataagccgtggttttcccctaagggaaaaactccctgggccccatggaactaaggggcctggggcatttctctcccccaatat

SEQ ID NO: 262311 - DNA, 410 bp, Homo Sapiens
  misc_feature (15)..(15): n is a, c, g, or t
  misc_feature (25)..(25): n is a, c, g, or t
  misc_feature (114)..(114): n is a, c, g, or t
  misc_feature (117)..(117): n is a, c, g, or t
caaaaaaagggctgncaattccaanaagctcatgggaaaatcccaggcaaaagggaaggcccctctctgtcccccttccccaacctaaccgcccgcctcaattacacaggggancgnctggtaagccctcggtggtctccacgttctgggtgaaagggtggctgttggtagttgtccacagatgcacctgggtaggaggcgtaggcagtgttggggtccggagtggggtcaacgtaattctggatgaagtcgtccacgccagccttgtagcgctggttagcccagggaggccagcacaccccaggagaagatggaaaagaagctgaaggtgatggctgccctcacagagtcggcccccaccagcacggtcttcgggttggtgactgcccactggttggtgaggaagcaga

SEQ ID NO: 262312 - DNA, 1448 bp, Homo Sapiens
  misc_feature (1386)..(1399): n is a, c, g, or t
cccggatcccctgagctgcctgccatcccacgtgaccgcgccgccccccagctccaccgctgagcccgctcgccatggccctcttcggggccctcttcctagcgctgctggcaggcgcacatgcagagttcccaggctgcaagatccgcgtcacctccaaggcgctggagctggtgaagcaggaggggctgcgctttctggagcaagagctggagactatcaccattccggacctgcggggcaaagaaggccacttctactacaacatctctgaggtgaaggtcacagagctgcaactgacatcttccgagctcgatttccagccacagcaggagctgatgcttcaaatcaccaatgcctccttggggctgcgcttccggagacagctgctctactggttcttctatgatgggggctacatcaacgcctcagctgagggtgtgtccatccgcactggtctggagctctcccgggatcccgctggacggatgaaagtgtccaatgtctcctgccaggcctctgtctccagaatgcacgcggccttcgggggaaccttcaagaaggtgtatgattttctctccacgttcatcacctcagggatgcgcttcctcctcaaccagcagatctgccctgtcctctaccacgcagggacggtcctgctcaactccctcctggacaccgtgcctgtgcgcagttctgtggacgagcttgttggcattgactattccctcatgaaggatcctgtggcttccaccagcaacctggacatggacttccggggggccttcttccccctgactgagaggaactggagcctccccaaccgggcagtggagccccagctgcaggaggaagagcggatggtgtatgtggccttctctgagttcttcttcgactctgccatggagagctacttccgggcgggggccctgcagctgttgctggtgggggaacaggtgccccacgacctggacatgctgctgagggccacctactttgggagcattgtcctgctgagcccagcagtgattgactccccatttgaagctgggaacttgcgggtcctggcccccacgcggctgcaccatcaagccctctggcaccaacatctctggcactgctaacgtcaccattgccctggtcccacagaccagcctgaggtccagctggtcagcatgactatggacgcccgtctcagcgcccagatggctctccggggggaagggccctgcgcacgcaacttgaacctgccccaggtcccgaatctatttcaaccattcggccttggaagccccctgggtctgaatcccctttaagggccccctcttgaaaaccagggcttcaaaaaatgggggggaagccccatggcccaaggaacgggacctnnnnnnnnnnnnnncaaaacccccccttacccggagggggctccccttttttgccccataaaa

SEQ ID NO: 262313 - DNA, 890 bp, Homo Sapiens
gagactgggtgtttcacagaaaagctgaaggtccccacttgagaaaggactaaagaatggtgagccccacgctgggggagggctgggattgatgtgtgttccagaactcaaatccgagctgattgagccctctcagtgcagtgggatatacaatacccctttccagcatctccccccacccccatgaggaaataatgaacttaacctgggatgatttccttaagtgccagctgatcctgtgtcagagttctgtgtgcatgtggggacccgcaatagaagggtaggggtgttcgccaggataaccagctttaggttctcaagcattaagggtaatactggaaaggggtttggggtacagggcgaatcttctcaaaaagtgaagccaactgggtctcctcttcagcagtccaggaacgtttccagtctctctcctccccagactggaggaaaatatgtacatcaatgcgcaccagtgatcagaaaacccccaggaacccaagcaagtgggaactgagggggccggctcctcatcagctggggaaaagggaaaatgggcctcacagaagccataacagggtggaaagagcgaggctgcagtccacaggggttgtgtgaacagggcaggcaaatggtccctagggcagggggggcccattgacacccgggtggtagaaggcacagttgttctcatagcggcagttgcccttcatcatgaaatgtcggcagacagggcggtttgacatgtctcctccatggctgtggcctccatcgtgccctcggtggccccctcccccgtggccaggaccatcatggccacggtgctcatgaggtggcggccctcgatggtcatggcctcggtgaccagggacatcatgaggccggtggccatg

SEQ ID NO: 262314 - DNA, 1314 bp, Homo Sapiens
  misc_feature (141)..(187): n is a, c, g, or t
  misc_feature (889)..(906): n is a, c, g, or t
  misc_feature (915)..(953): n is a, c, g, or t
  misc_feature (1000)..(1072): n is a, c, g, or t
  misc_feature (1126)..(1192): n is a, c, g, or t
cctgggtggcgaattcggcacgaggggagaacaagcgcgaaaggcccagcgtgaggcagaggaggctgaacgtgaggagcggaaacgactcgagtcccagcgcgaagctgagtggaagaaggaggaggagcggcttcgccnnnnnnnnnnnnnnnnnnnnnnnnnnnnnnnnnnnnnnnnnnnnnnncaggcccagcgggagcatgaggagtacctgaaactgaaggaggcctttgtggtggaggaggaaggcgtaggagagaccatgactgaggaacagtcccagagcttcctgacagagttcatcaactacatcaagcagtccaaggttgtgctcttggaagacctggcttcccaggtgggcctacgcactcaggacaccataaatcgcatccaggacctgctggctgaggggactataacaggtgtgattgacgaccggggcaagttcatctacataaccccagaggaactggccgccgtggccaacttcatccgacagcggggccgggtgtccatcgccgagcttgcccaagccagcaactccctcatcacctggggccgggagtcccctgcccaagccccagcctgaccccagtccttccctcttggactcagagttggtgtggcctacctggctatacatcttcatccctccccaccatcctggggaagtgatggtgtggccaggcagttatagattaaaggcctgtgagtactgctgagcttggtgtggcttggtgtggcagaaggcctggcctaggatcctagataagcaggtgaaatttaggcttcagaatatatccgagaggtggggagggtcccttggaagctggtgaagtcctgttcttattatgaatccattcattcaagaaaatagcctgttgcnnnnnnnnnnnnnnnnnnctcgaggcnnnnnnnnnnnnnnnnnnnnnnnnnnnnnnnnnnnnnnncatggtcatagctgtttcctgacccagctttcttgtacaaagtggtnnnnnnnnnnnnnnnnnnnnnnnnnnnnnnnnnnnnnnnnnnnnnnnnnnnnnnnnnnnnnnnnnnnnnnnnntgcagtaccccggaatttaacccgccctatgagcggggcttttttttgtgatcnnnnnnnnnnnnnnnnnnnnnnnnnnnnnnnnnnnnnnnnnnnnnnnnnnnnnnnnnnnnnnnnnnngctaacaaggggggggttggttttgccggaacaaagagcttaccaactccttttcccaaagggaaactgggctccaccaggagggcacaatacccaaaacctggttcttctaaggggagccc

SEQ ID NO: 262315 - DNA, 1128 bp, Homo Sapiens; identical to SEQ ID NO: 102233
  misc_feature (995)..(995): n is a, c, g, or t

SEQ ID NO: 262316 - DNA, 1526 bp, Homo Sapiens
  misc_feature (1050)..(1050): n is a, c, g, or t
  misc_feature (1217)..(1217): n is a, c, g, or t
gctggctcacctccgagccacctctgctgcgcaccgcagcctcggacctacagcccaggatactttgggacttgccggcgctcagaaacgcgcccagacggcccctccaccttttgtttgcctagggtcgccgagagcgcccggagggaaccgcctggccttcggggaccaccaattttgtctggaaccaccctcccggcgtatcctactccctgtgccgcgaggccatcgcttcactggaggggtcgatttgtgtgtagtttggtgacaagatttgcattcacctggcccaaaccctttttgtctctttgggtgaccggaaaactccacctcaagttttcttttgtggggctgccccccaagtgtcgtttgttttactgtagggtctcccgcccggcgcccccagtgttttctgagggcggaaatggccaattcgggcctgcagttgctgggcttctccatggccctgctgggctgggtgggtctggtggcctgcaccgccatcccgcagtggcagatgagctcctatgcgggtgacaacatcatcacggcccaggccatgtacaagggggctgtggatggactgcgtcacgcagagcacggggatgatgagctgcaaaatgtacgactcggtgctcgccctgtccgcggccttgcaggccactcgagcccctaatggtggtctccctggtgctgggcttcctggccatgtttgtggccacgatgggcatgaagtgcacgcgctgtgggggagacgacaaagtgaagaaggcccgtatagccatgggtggaggcataattttcatcgtggcaggtcttgccgccttggtagcttgctcctggtatggccatcagattgtcacagacttttataaccctttgatccctaccaacatttaagtatgagttttggccctgccatctttaattggctgggcagggtctgccctagtcatcctgggaggtgcactgctctcctgttcctgtcctgggaatgagagcaaggctgggtaccgtgcaccccgctcttaccctaagtccaactcttcncaaggagtatgtgtgacctgggatctccttgccccagcctgacaggctatgggagtgtctagatgcctgaaagggcctggggctgagctcagcctgtgggcagggtgccggacaaaggcctcctggtcactctgtccctgcactccatgtatagtcctcttgggttnggggttggggggtgccgttggtgggagagacaaaaagagggagagtgtgctttttgtacagtaataaaaaataagtattgggaagcaggcttttttcccttcagggcctctgctttcctcccgtccagatccttgcagggagcttggaaccttagtgcacctacttcagttcagaacacttagcaccccactgactccactgacaattaactaaaagatgcaggggctccgtatctcgacattcattcccacccccctcttatttaaatagctaccaaagtacttcttttttaataaaaaaataaagat

SEQ ID NO: 262317 - DNA, 902 bp, Homo Sapiens
  misc_feature (71)..(85): n is a, c, g, or t
  misc_feature (94)..(365): n is a, c, g, or t
  misc_feature (414)..(414): n is a, c, g, or t
  misc_feature (636)..(636): n is a, c, g, or t
  misc_feature (676)..(676): n is a, c, g, or t
  misc_feature (694)..(694): n is a, c, g, or t
aaagtactggcataatagacatgagccactgcacctggctcctaagttcttttcttgaataatatctttcnnnnnnnnnnnnnnngaggtggannnnnnnnnnnnnnnnnnnnnnnnnnnnnnnnnnnnnnnnnnnnnnnnnnnnnnnnnnnnnnnnnnnnnnnnnnnnnnnnnnnnnnnnnnnnnnnnnnnnnnnnnnnnnnnnnnnnnnnnnnnnnnnnnnnnnnnnnnnnnnnnnnnnnnnnnnnnnnnnnnnnnnnnnnnnnnnnnnnnnnnnnnnnnnnnnnnnnnnnnnnnnnnnnnnnnnnnnnnnnnnnnnnnnnnnnnnnnnnnnnnnnnnnnnnnnnnnnnnnnnnnnnnnnnnncaagtaatatcttaatatcatgccattgacatttatcctctaattattntcagaggtggccttcagaagaaggcctctttggtaaaattgctattgaggatatttcactgaaaaacaaatttatctttaaatttaaatccaggaaaaatttaaactttcaggcttctatttttatcagacagggtaaaaaatttataactcagaatattaccctttcccctctttgtgtgatggattgcttggttttagttactgattatttaaaataatnaagttattcaaatctaggattttggatacaatagttcttnctctagaatatagtgtgntgtgtgagagtatatttaaaatttttattaaggcccatggggcagcctttgaggaaaccagaccttggggatcgccaggcagggattagtggcaggaatttgagagaacagaagccccacagagctccttcggggaacgtcccccagtcacaagaagtatctcaaggaaagtaagcctttctcccacattccccccaagaataactac

SEQ ID NO: 262318 - DNA, 1003 bp, Homo Sapiens
  misc_feature (915)..(915): n is a, c, g, or t
  misc_feature (943)..(943): n is a, c, g, or t
  misc_feature (955)..(955): n is a, c, g, or t
  misc_feature (970)..(970): n is a, c, g, or t
tcactgagcaagatgttgcaagccaccagagctattcccaaaagaccctgattgcactggtcacctcgggagccctgctggctgtcttgggcatcactggctatttcctgatgaatcgccgcagctggagccccacaggagaaaggctgggcgaagacccttattacacggaaaacggtggaggccagggctatagctcaggacctgggacctcccctgaggctcagggaaaggccagtgtgaaccgaggggctcaggaaaacgggaccggccaggccacctccagaaacggccattcagcaagacaacacgtggtggctgataccgaattgtgactcggctaggtggggcaaggctgggcagtgtccgagagagcacccctctctgcatctgaccacgtgctacccccatgctggaggtgacatctcttacgcccaacccttccccactgcacacacctcagaggctgttcttggggccctacaccttgaggaggggcaggtaaactcctgtcctttacacattcggctccctggagccagactctggtcttctttgggtaaacgtgtgacgggggaaagccaaggtctggagaagctcccaggaacaatcgatggccttgcagcactcacacaggacccccttcccctaccccctcctctctgccgcaatacaggaacccccaggggaaaagatgagcttttctaggctacaattttctcccaggaagctttgatttttaccgtttcttccctggattttctttctctactttgaggaaaccaaagtaaccttttgcacctgctctcttgtaatgatatagcccagaaaaacgtgttgccttgaaaccacttccctcatcttctcctccaagaacactgtgggacttgggtcaccaggcttcctcccttgttnttctaagttccactggaggttccatgtngccccctcttancatttggcagagttnctggcaacagttttttgggctgggaggcttagg

SEQ ID NO: 262319 - DNA, 1623 bp, Homo Sapiens
  misc_feature (1389)..(1389): n is a, c, g, or t
  misc_feature (1508)..(1508): n is a, c, g, or t
ttgagggtgtgggcagggcagggtgggctggtaggccatcagggccctcatgcagcccctgctcgggtgggtggccagttcccctgggtcctgcaggactacgtgtccccaaccctggacctcagcaacccagccgtcttccgggacctgtctaagcccatcggtgtggtgaaccccaagcatgcccagctcgtgagggagaagtatgaaagctttgaggacccagcagggaccattgacaagttccactatggcacccactactccaatgcagcaggcgtgatgcactacctcatccgcgtggagcccttcacctccctgcacgtccagctgcaaagtggccgctttgactgctccgaccggcagttccactcggtggcggcagcctggcaggcacgcctggagagccctgccgatgtgaaggagctcatcccggaattcttctactttcctgacttcctggagaaccagaacggttttgacctgggctgtctccagctgaccaacgagaaggtaggcgatgtggtgctacccccgtgggccagctctcctgaggacttcatccagcagcaccgccaggctctggagtcggagtatgtgtctgcacacctacacgagtggatcgacctcatctttggctacaagcagcgggggccagccgccgaggaggccctcaatgtcttctattactgcacctatgagggggctgtagacctggaccatgtgacagatgagcgggaacggaaggctctggagggcattatcagcaacttttgggcagactccctgtcagctggctgaaggaagccacatccaactcggctctcagctgaggaagcagcccatcgccttgcacgcctggacactaactcacctagcatcttccagcacctggacgaactcaaggcattcttcgcagaggttgtcagtgatggtgtacccctggtgctagccctggtcccccaccggcagccccactccttcatcacccagggttccccagacctgttggtgactgtgagtgccagtgggctgctgggcacccacagctggttgccctatgaccgcaacataagcaactacttcagcttcagcaaagaccccaccatgggcagccacaagacgcagcgactgctgagtggcccgtgggtgccaggcagtggtgtgagtggacaagcactggcagtggccccggatggaaagctgctattcagcggtggccactgggatggcagcctgcgggtgactgcactaccccgtggcaagctgttgagccagctcagctgccaccttgatgtagtaacctgccttgcactggacacctgtggcatctacctcatctcaggctcccgggacaccacgtgcatggtgtggcggctcctgcatcanggtggtctgtcagtaggcctggcaccaaagcctgtgcaggtcctgtatgggcatggggctgcactgagctgtgtggccatcagcactgaaacttgacatggctgtgtctgggatctganggatgggaactgtggatcatacaccactgtacgccgcgggacagttttggtagcgggaacttaccggccctctggggttgccacatttcccctgggaacctattttttccacctt

SEQ ID NO: 262320 - DNA, 1250 bp, Homo Sapiens
  misc_feature (1032)..(1032): n is a, c, g, or t
aggcagcgtggagaacctgtccatcgtgtaccggagccgcgacttcctggtggtcaacaagcactgggacgttcgcattgacagcaaggcgtggcgggagactctgaccctgcagaagcagctgcggtaccgctttcccgagctggccgaccctgacacctgctacgggttcaggttctgccaccagctggatttctccaccagcggggcgctgtgcgtggcgctaaacaaggcagccgccggcagcgcggacaggtgcttcaaggagcggcgcgtggccaaggcttacctggcattggtgggctccccggcagcactgggcggccccgtgaactgcgtgcggtgctccctctcctgcagctgcgggggcacatccaggagagccgggtaaccatcagccatgccattggcaggaacagcacggagggccgggcccacaccatgtgcatcgagggctcgcagggtgtggcaggttgtgagaacccaaagccaagcctcacagatctcgtggttctggaacacgggctgtacgcaggcgatcctgtctccaaagtgctgctgaagccgctcacgggccggacacaccagctgcgcgtgcactgcagtgccctgggccaccccgtggtgggcgacctgacctacggagaagtctcgggccgggaggaccggccgttcagaatgatgctgcacgctttctacctgcgcatccccacggacaccgagtgtgtggaggtctgcacgcctgaccccttcctgccctccctggatgcctgatggagcccccacacactgctgcagtcgatggaccaccccgtgcaggccttacgggccacccccgaccctgaccccgaaggataggggccccaggccaggcagcccctccgcactcctgcctgggcccggccggcctcctccacccccaaccaagccccctgagactgaggcacagcggggcccctgcctgcagtggctgtcggagtggacgctggaaccggacagctgagagccgtggggctgggggcaggggtgtcncctgcacagcgggactctagggagatgggcgagcgagcgtctgctcactgggtctggggcctccgagtggcaagcatcatccgggccagctgggttgccccgtcccaggcttgcgaaggaaggctgagaggggggcccgcaaggagggcaccatggtaacgcgtggatcccgcgggacgcacggcaaccccggggccgggaaaatgagaggtgaaatg

SEQ ID NO: 262321 - DNA, 507 bp, Homo Sapiens
ttctcacaaccctgcgagccctcgatgcacatggtgtgggcccggccctccgtgctgttcctgccaatggcatggctgatggtcacccggctctcctggatgtgcccccgcagcaatgccaggtaagccttggtcacgcgccgctccttgaagcacctgtacgcgctgccggcggctgccttgtttagggccacgcacagcgccccgctggtggagaaatccagctggtggcagaacctgaacccgtagcaggtgtcaggggcggccagctcgggaaagcggtaccgcagctgcttctgcagggtcagagtctcccgccacgccttgctaacaatgcgaacgtcccagtgcttgttgaccaccaggaagtcgcggatcccgtacaccatggacaggttctccacgctgccaggctccataaccggcctgctgccgggccgtgcagtccaggcccccgatgccgtgcccggcgccggctccagccgcgcgcccgcgcgctggcgaccc

SEQ ID NO: 262322 - DNA, 923 bp, Homo Sapiens
aacggagcagctgctgcagcagggcccatggcggacacccagtacatcctgcccaatgacatcggcgtgtctagcctggactgccgtgaggccttccgcctgctgtcacccacagagcgcctctatgcctaccacctgtcccgtgccgcctggtacggaggcctggctgtgctgcttcagacctcccctgaggccccctacatctatgctctgctcagccgcctcttccgcgcccaggaccccgaccagctgcgccaacatgccctggctgaaggccttaccgaggaggagtaccaggcgttcctggtctatgccgcgggtgtttactccaacatgggcaactacaagtcctttggtgacaccaagtttgttcccaacttgcccaaggaaaagctggaacgggtgatcctagggagtgaggctgctcagcagcacccagaagaagtcaggggcctctggcagacctgcggggagcttatgttctctctggagccaaggcttcgacacctcggactggggaaggagggaatcaccacctatttctctgggaattgtaccatggaagatgccaaattggcccaggactttctggactcacagaacctcagtgcctacaacacccggctcttcaaagaggtcgatggagaagggaagccctactacgaggtgcggctggcttctgtgcttggctcagagccttccctggactctgaggtgacttccaagctgaagagctatgaattccggggaagccctttccaggtgacccggggggactacgcgcccatcctccagaaagtggtggagcagctggagaaagccaaggcctatgcagccaacagccaccaggggcagatgctggcccagtatatagagagcttcacccagggctccctcgaggccccacagaggggctccccgct

SEQ ID NO: 262323 - DNA, 987 bp, Homo Sapiens
gagaagtggggccgagatcgcgccgtcccagcccgcccgccggcgtctgcgctgctccggcgcccttacccctgctggcccttgcaaggcgcgaccggcggccatgcagccccggggctgaggccgccccatggcaaagccggcggtcccggcgacgacggcgcatggagaacttccgtaaggtgcgctccgaagaggcgccagcggggtgcggggccgagggaggcggcccgggctccggccccttcgcagacctggcgccgggcgcggtgcacatgcgggtcaaggaaggcagcaagatccggaacctgatggccttcgccaccgccagcatggcgcagccagccacgcgcgccatcgtcttcagcggctgcggccgggccaccaccaaaaccgtcacgtgcgccgagatcctcaagcgccgcctggcgggcctgcaccagatcacgcggctgcgctaccgcagcgtacgcgaggtgaggacgattctcccccgatgatcccatgtcagggatggacccatgggcgatatgtattcctagtctgaaccggacctacctatacctgccctaccctcccagatttctaccgggcctggcaacaacgataaatcaccccacttattcaggtaataacctgcgatcccgtggactccggccccagagaaccgaccgtggactcctcgtcccctggaccgcctcgccaccccgggtgcccggggtatggccaggtgcccactttcccccgggtgcctcgactaagcgggtgacagattgcccgcctccccggggtatacacatcggggccgccttgctcttgcccccgatagcgatgtgttcccccccgcgtccaccaatgagcccgtccaacccgtctcgaccgtagatacacccgagaacaccctgtaacatagaccccggacctgcgcaacctatcacaccgatgcgaggttcttcggccgagtaccgtacgtctcttcttctgaat

SEQ ID NO: 262324 - DNA, 451 bp, Homo Sapiens
  misc_feature (14)..(14): n is a, c, g, or t
  misc_feature (32)..(32): n is a, c, g, or t
  misc_feature (37)..(37): n is a, c, g, or t
  misc_feature (53)..(53): n is a, c, g, or t
  misc_feature (87)..(87): n is a, c, g, or t
  misc_feature (99)..(99): n is a, c, g, or t
  misc_feature (114)..(114): n is a, c, g, or t
  misc_feature (174)..(174): n is a, c, g, or t
  misc_feature (184)..(184): n is a, c, g, or t
cctgggccaaattncctgcctaaaagaaatgnccggncctgttgaaacgtggngcccctgggcctgcctggaaacttgccgcctttnaggtccctgaanctgtcttttcggagnaatccctggcagccttgtgtccatccgtccccttgtaaaatgtggccatccccaggcccnaagatgtccnacctcatcatgccttcatggcaatctggatctcttcagtaggatacaggccccggggaaggtgctgcaggcggctgcggtggtaggggtaggtgagggtgttgagctccccgcagcgccggggcacagttgagtaggtgtaatcagccatatctgtcacccgtttgtagcagggggaacccagggactggtcgtgcagcagctcgcggattatctggctgctggccttggtggagcccccgaagtggatctgcaccttctcaatgtc

SEQ ID NO: 262325 - DNA, 1043 bp, Homo Sapiens
ggcccctcgctcgctgctcgccagcccagactcggccctggcagtggcggctggcgattcggaccgatccgacctgggcggaggtggcccgcgccccgcggcatgagccggtgaccaagctcggggccgagcgggaggcagccgtggccgaggagtgtgaggaagaggctgtctgtgtcattatgtgtgcgtcggtcaagtataatatccggggtcctgccctcatcccaagaatgaagaccaagcaccgaatctactatatcaccctcttctccattgtcctcctgggcctcattgccactggatggtttcagttttggccccattctatcgagtcctcaaatgactggaatgtagagaagcgcagatccgtgatgtgccggttgttaggctgccagcgaccagtcccatcccagagcggggggatctcagttgcagaatgacacgtgttttgatgtctatcgctgtggcttcaacccaaagaacaaaatcaaggtgtatatctatgctctgaaaaagtacgtgggatgactttgggcgtctctgtcaagcaacaccatctccccgggagtataatgaactgctcatggccatctcagacagtgactactacactgatgacatcaaccgggcctgtctgtttgttccctccatcgatgtgcttaaccagaacacactgcgcatcaaggagacagcacaagcgatggcccagctctctaggtgggatcgaggtacgaatcacctgttgttcaacatgttgcctggaggtcccccagattataacacagccctggatgtccccagagacagggccctgttggctggtggcggcttttctacgtggacttaccggcaaggctacgatgtcagcattcctgtctatagtccactgtcagctgaggtggatcttccagagaaaggaccaggtccacggcaatacttcctcctgtcatctcaggtgggtctccatcctgagtacagagaggacctagaagccctccagcctgagtgacagagtgaaaccctgtctcaaaacaaaacaa

SEQ ID NO: 262326 - DNA, 1002 bp, Homo Sapiens
  misc_feature (758)..(766): n is a, c, g, or t
  misc_feature (881)..(900): n is a, c, g, or t
tggcgcgtgcacactcgcctcgccgttcgggaccagccagatcgcggcggcctcgcgggcggtctggtcggtgaggtcttggccgcgcgcggcaatgctgaggctgctggcgtccgggtgcgcccggggcccggggcccggcgtgggcgcgcgtcctgccgcagggctctttcatccggggcgccgccagagccgccaggcttccgatgcgccccggaaccagccccccagccccgagttcgtggcccggccggtgggcgtctgctccatgatgcgcctgccggtgcagacctcccccgaggggctggacgctgccttcatcggggtgcccctggatactgggacctccaaccggcctggggcgagattcggacctcgccgcatccgggaagaatcagtgatgcttcggacagtcaatcctagcacgggggccctccccttccagtccctcatggttgcagacctaggcgatgtgaatgtcaatctttacaaccttcaggacagctgccggcgaattcaagaggcctatgagaaaattgtagcagctggctgtattcctctgaccttgggtggagatcacacaatcacatatcccatattgcaagcgatggcaaaaaagcatgggccccaggggggcctgctgcacgctgggatgcgcacaccggacacaaccgacaaggcccctaggagagaaactccaccacgggggggccctttcccccggcgggtgggatgagggtccccctggacgcgaaccnnnnnnnnnagaattggccctccccggggctctctccccgacctttggatcccctaccgacaacaaccgggaggccaggggcctccggggcaatccccggatataataactgccctgggccggnnnnnnnnnnnnnnnnnnnngaaatggcgcgcgaaccatcccctccgatgccacggcgatagccatctccgcaccacccctccccccgcttccgccaccctgctacccagctacgcacccca

SEQ ID NO: 262327 - DNA, 951 bp, Homo Sapiens
gcgggccgtaagtggctgtggagctggggtcactgcgcggtgggaccatggcctcggagaagccgctggcggcagtcacttgtacagcgccggtcaacatcgcggtcatcaagtactggggcaagcgcgatgaagagctggttctgcccatcaactcctccctgagcgtcactctgcaccaggaccagttaaaaaccaccacaacagccgtcatcagcaaggacttcaccgaggaccggatttggctgaatggccgggaggaggatgtggggcagccgaggctgcaggcctgcctgcgggagatccgctgcctggcccggaagcggaggaactcacgggatggggacccgctgccctccagcctcagctgcaaggtgcacgtggcatcggtgaacaacttccccacggctgcgggcctggcctcctcagcggcgggctatgcctgcctagcctacaccctggcccgtgtctacggcgtggagagtgacctctcagaagtggctcgccggggctcaggcagcgcctgccggagcctgtatgggggctttgtggagtggcagatgggagagcaggccgacgggaaggacagcatcgctcggcaagtggcccccgagtcacactggcctgaactccgcgtgctcatccttgtggtgagcgctgagaagaagctgacaggcagtaccgtgggcatgcggggccagtggtggagaaccagccccctggcttcggttccggggcccaagtccgtggtgcccgcgcgcatgggcggagatggccccgctggcatccgggaaccgaaaacttccccaagctttcgccccagctgaaccatgaaagggacagcaacccaaggtcccacgccacctggcctcggacacctttccccggccattttccttaattccaagggccctcctcctggggggcattaatcccacccgggggggcccc

SEQ ID NO: 262328 - DNA, 870 bp, Homo Sapiens
ccagaggccctgaatgacagccaggagttccccttccccgagacgcccaccaaagtgtggccgcaggacgagtacatcgtggagtactcactagagtatggcttccttcgcctgtcgcaggccacccgccagcgcctgagcatccccgtcatggtggtcaccctggaccccacgcgggaccagtgcttcggggaccgcttcagccgcctgctgctggatgagttcctgggctacgatgacatcctcatgtccagcgtgaagggcctggccgagaacgaggagaacaagggcttcctgcggaatgtggtgtcgggcgagcactaccgctttgtgagcatgtggatggcgcggacgtcctacctggccgccttcgccatcatggtcatcttcacgctgagcgtgtccatgctgctgcggtactcacaccaccagatcttcgtcttcatcgtggacctgctgcagatgctggagatgaacatggccatcgccttccccgcagcgcccctgctgaccgtcatcctggccctcgtcgggatggaggccatcatgtcggagttcttcaacgacaccaccaccgccttctacatcatcctcatcgtgtggctcgcggaccagtatgacgccatctgctgccacaccagcaccagcaagcggcattggctgcggttcttctatctctaccacttcgccttctatgcctatcactaccgcttcaatgggcagtatagcagcctggccctggtcacctcctggctcttcatccagcattccatgatctacttctttcaccactacgagctgcctgcccttcctgcagcaagtccgcatcccaggagatgctggctttcaggggcccgccacctgggcccc

SEQ ID NO: 262329 - DNA, 996 bp, Homo Sapiens
  misc_feature (906)..(906): n is a, c, g, or t
  misc_feature (910)..(910): n is a, c, g, or t
  misc_feature (913)..(913): n is a, c, g, or t
  misc_feature (922)..(923): n is a, c, g, or t
  misc_feature (927)..(929): n is a, c, g, or t
  misc_feature (970)..(970): n is a, c, g, or t
aaccccgccctaacccccacccgcaccaggcctgggtggcgaattcggcacgaggatggcgcggacgtcctacctggccgccttcgccatcatggtcatcttcacgctgagcgtgtccatgctgctgcggtactcacaccaccagatcttcgtcttcatcgtggacctgctgcagatgctggagatgaacatggccatcgccttccccgcagcgcccctgctgaccgtcatcctggccctcgtcgggatggaggccatcatgtcggagttcttcaacgacaccaccaccgccttctacatcatcctcatcgtgtggctcgcggaccagtatgacgccatctgctgccacaccagcaccagcaagcggcattggctgcggttcttctatctctaccacttcgccttctatgcctatcactaccgcttcaatgggcagtatagcagcctggccctggtcacctcctggctcttcatccagcattccatgatctacttcttccaccactacgagctgcctgccatcctgcagcaggtccgcatccaggagatgctgcttcaggcgccgccactgggccccgggacccccacggcgctgcccgatgacatgaacaacaactcgggcgccccggctacagcccctgactctgccggccagccccccgccctgggccccgtctcgcctggggccagcgggagtcccgggcctgtgggcagcggcgcccagctccctggtggccgccgcagcctcagtggcagcaagctgcccggtggtgacctggggttggaatggcaaaaacccgctggccatcatcacaggacgcctcctttcttgtccgggcctgagcgccctcccctcctgggagcggggggtccagccaaccccgctgggggcccctgggtgggggnggcntcnccccaaagnncccnnncaggaacgacggtcccccgccggagagaggaagagcggganagcatgcgcgagaaacacgtaccaga

SEQ ID NO: 262330 - DNA, 1258 bp, Homo Sapiens
  misc_feature (1150)..(1150): n is a, c, g, or t
  misc_feature (1209)..(1210): n is a, c, g, or t
tgtaccggtccggaattccgggatatcgtcgacccacgcgtcgggcttctttcgccgcacaatccagaagaacctccatcccacctattcctgcaaatatgacagctgctgtgtcattgacaagatcacccgcaatcagtgccagctgtgccgcttcaagaagtgcatcgccgtgggcatggccatggacttggttctagatgactcgaagcgggtggccaagcgtaagctgattgagcagaaccgggagcggcggcggaaggaggagatgatccgatcactgcagcagcgaccagagcccactcctgaagagtgggatctgatccacattgccacagaggcccatcgcagcaccaatgcccagggcagccattggaaacagaggcggaaattcctgcccgatgacattggccagtcacccattgtctccatgccggacggagacaaggtggacctggaagccttcagcgagtttaccaagatcatcaccccggccatcacccgtgtggtggactttgccaaaaaactgcccatgttctccgagctgccttgcgaagaccagatcatcctcctgaaggggtgctgcatggagatcatgtccctgcgggcggctgtccgctacgaccctgagagcgacaccctgacgctgagtggggagatggctgtcaagcgggagcagctcaagaatggcggcctgggcgtagtctccgacgccatctttgaaactgggcaaagtcactctctgcctttaacctggatgacacggaagtgggctctgctgcaggctgtgctgctaatgtcaacagaccgctcgggcctgctgtgtgtggacaagatcgagaagagtcaggaggcgtacctgctggcgttcgagcactacgtcaaccaccgcaaacacaacattccgcacttctggcccaagctgctgatgaaggagagagaagtgcagagttcgattctgtacaagggggcagcggcagaaggccggccgggcgggtcactgggcgtccacccggaaggacagcagcttctcggaatgcatgttgttcaggggtccgcaggtccggcagcttgagcagcagcttgggtgaagcgggaagtctcccaggggccgggttcttcagcaccagagcccgaagagcccgcagcnagcgtctccctggagctgcttccaccggaagcgggaattctccaatgccccgaaacggnncttggtggggggaagaacggacaggccagtggaggcggggacttcccc

SEQ ID NO: 262331 - DNA, 710 bp, Homo Sapiens
  misc_feature (634)..(634): n is a, c, g, or t
gggggattacaggcgtgagcaatcgtgcccagccttgttcttaattttgtatcatccagtcatcgctaatattacacgcaccttctcacttaatcctcacgacaagcctgtgaggcagatgctcattgttcccatcttgatgaaacttgagtctcagggaagtgaagtgacttgcccagggtcactcaggtagagttgagattcaaacccacatgtggctccaaagtctgcatctggatttgggggtgttttttggcatggcaccctcacctctctccctgcctgttttccccaaagtggaaaggaaggcctttcaaaccagagtgtctcactcccctctgacctccagaccagatggggcatgagccagccagctcagccaggctccctgtgtcctgggaggaagtgtccccatcccccatgccccttatggggagggagggcgtctgatgcttctctctctggcctccccccccatcctgtcaggcacaggtgacgggggcagccatgcgagcccttctcctgctgctctgggagggcaagttcacattgagcaacctggtcctatgaaaatgatgccctggctttctgaggcttatctgatgctctgagttcatgtgccaacaaagctgancgtagggtggagaggcccggctgcatgtaatgtctacacttcctcctgtccacatcgtgtataattaggactaaat

SEQ ID NO: 262332 - DNA, 444 bp, Homo Sapiens
  misc_feature (17)..(17): n is a, c, g, or t
  misc_feature (23)..(23): n is a, c, g, or t
  misc_feature (49)..(49): n is a, c, g, or t
  misc_feature (55)..(55): n is a, c, g, or t
  misc_feature (65)..(65): n is a, c, g, or t
  misc_feature (104)..(104): n is a, c, g, or t
  misc_feature (117)..(117): n is a, c, g, or t
  misc_feature (125)..(125): n is a, c, g, or t
aagcctttttaaaaacnaaaatntttaattcccctttttgacttccaanaaccanatggggcatnaaccaagccaagttaaacccaggctccttttgccctggnaggaattgtcccnatcccccnatgccccttatggggagggagggcgtctgatgctctctctctgcctccccccccatcctgtcaggcacaggtgacgggggcagcccatgcgagcccttctcctgctgctctgggagggccagttccacattgagccagcctggtcccatggaaaatgatggcctgggctttctgaggccttatctgatgcctctgcagttcatgtcccccaccaggcctcgaggctcagggtgggagagggccccgggctgccctgtcactcctctaacacttccctcccctgtccccaacatgccctgtaataaaattagagaagact

SEQ ID NO: 262333 - DNA, 1025 bp, Homo Sapiens
cctcccaccgcagttaattgcgaaacaaggtggaaggttccccaaaaggtttaaaaggtataagggacccccgggccttggtttcccctagggctggatttcccgttgagttcaacccaggcccctgtattttttaaaagaggagaaaaaagtcccgcgctctcaaaacccgtggtggggcctcatccaaggcaggttaccaccccgggggtgttccttggtaaccatagaacccatagcactgagtggttgctccccattggaatctgtgaggatcattcctctccaaagtcacagaagagctgcccaaaacaggccccgcgtgtctgccaccaccagcttgatgccacggttgtgacagaactcacccactcgcagctggtcctccaggggggtgttggtgagcaccaccacctggaaaccactaaggaagtcctcaacgaggggtccagtgtaggcagtgacaggcacatagctgttgagctcagcgaggcggggctgtgatacctcggcccggtttttaccgatgtcctcctcccgcaggtagaactgggaggaaagatcagcccactgggcagtgccctggtcatgtagggtaacagccttgaccccaccaaggatgatgttcttagcgatctccacgcccaggccccgcaggcctgataccaggacactggatgtctggagccgcttcattgcctcatggcccaacacatacagctgccgggagtaaaggccctcgtctatgtctgcttcactgccgttcttggccattccgttggttggcaccgagggcacttcggacaacacggactgggcaggggagcagttagaacccggctttggatcaggcccggacacgcgacgtttcttggacagcggcgagctggacatcccctgtgccgggcggaagcctcgccttcctgccaaagatgagctgaagccacggggcaacggaagagcaaaccacctctgtcgtacaagagcctcgtgccgaattcgccacccaggcctcgctacttagg

SEQ ID NO: 262334 - DNA, 1201 bp, Homo Sapiens
  misc_feature (779)..(798): n is a, c, g, or t
tctgttcctgcgggctcagagaagcccccaaagggctccagctataacccacctctgcctcccctgaagatatctacctccaatggcagtccagggtttgaataccaccagcctggggacaagttcgaagccagcaagaacgacctgggaggctgcaatgggacctcgtccatggccgtgatcaaagattactatgcactgaaggagaatgaaatctgtgtgagccaaggtgaggtggtccaggtcctcgccgtcaaccagcagaacatgtgtctggtgtaccagcctgccagcgaccattcccccgccgccgagggctgggtcccaggcagcatcctggcgcccctcaccaaagccacagcagcagaaagtagtgacgggagcatcaagtaagtgcctcgttggcttccccgggagcggagtatgaggattaaaaatattcagaaacaaacaaaagaacacaaaaatgcaaacacatggtagggaattactactgcttattctcaacagtaccacagaaccagtgtttgagtgctggcaccatatgcaacatggggcatccgggctggagtgatccagttttttagttggtggtggcgatgatttttctttccttttggtttataattttctgttcatttttccccctttctcccccacattcattaagaaccctactgaaaccctaggtgacaaaaggtgtgccttctgttgccacatttgacccaccacaggactcactggactggacttctatttatattgtattaagtaactgnnnnnnnnnnnnnnnnnnnnttttgattgacacccaaaaaattaccttggcacaaatgccagacctgtgaaggtcagaggcccgctgcttctcccaggagggagggaactttttggttgtctgtggcaattcctctgtacagattgtaactttttaaaaatttcccttcaccccgtcacttgaatatatgttcatagtaatttgtaagatacttcttttccttattttggttgcaagacccttccgaacacattcctgtataaagtattttgcactatttaaagaaacccatatggatgaagtcaggatgtgcaatatgatggcgtcacagtgctcatcgttgtacctgtaatgtaactaatcagtttaaatgtactattttaaatatgtaaaataaattttccccatgagcatgttttaatg

SEQ ID NO: 262335 - DNA, 1008 bp, Homo Sapiens
cccggctaggcacaggccaccaaggcccaaggccagccctttccttcccagggggcgggaagggaacccccccggggtaaggggcccagggttccacccttttgcccccaattaacaaaacctcgcgccaagggggaaacatggaaaagcccggattttgcagggcttgcaggcgaattgccaagcccaaggaaagtcgccagccagtgatgacgggccaagcgatgcctcccggtcaccagccacgtctcatttgccagctccaccaactgcattgttcgagacagcatcttctctttgtctcccacgtatttgcctggcacagaaggtgaagcttggaacagtttgaagctgctgcaataggtcttcaccagttctgccaagcacagagatggcacatccagtcccaggagcttcactatctgcatgtaagtgctagaaaacacatccaaatctgcatacaacagcgtgcagatggcccccattgttaggggccagttatgctgtcggcaggtgattaagacgcagcacccaaccaacacctccttcttttgcagcctggccgctcggatgccagagtgccgatatgcctgttggtagtaggcaaccgcggtatcctcaaatgttggtggcaactgcagaactcgacaaaggtctctcactcgccggagacctcgttgctggctgcgactaacttgttcgttttcccctgtgcttcgggaatatgttacctctcggagattgccctcgtcgctgaaggtagtggtaaggaccccctcggtgaccacgcagccgcagtcggagcacaccagctggctctgcgaatagtgcgagtcttccaccagctccgtggagccgcagtccgggcagcggcctctgcctggcatctcacaaccggccccaaagccgcggaagccttcagagactcctgggtctgcaacagcaaccgtgaggcagcaagaagcgaacgcgtgggtcgacgatatcccgtaaattccagacctgtac

SEQ ID NO: 262336 - DNA, 1868 bp, Homo Sapiens
ctggtacggtccgcaattctcgggatatcgtcgacccacgcgtccggacatttcacctaacttgtcaccagatgataaatccttcagccgtgtcgtgccccgagtgccagactccaccagacgaacagatgtgggtgctggtgctttgcgtcgtagtgactctccagaaattcctttccaggctgctgctggcccttctgatggcttagatgcctcctctccaggaaatagctttgtagggctccgtgttgtagccaagtggtcatccaatggctacttttactctgggaaaatcacacgagatgtcggagctgggaagtataaattgctctttgatgatgggtacgaatgtgatgtgttgggcaaagacattctgttatgtgaccccatcccgctggacactgaagtgacggccctctcggaggatgagtatttcagtgcaggagtggtgaaaggacataggaaggagtctggggaactgtactacagcattgaaaaagaaggccaaagaaagtggtataagcgaatggctgtcatcctgtccttggagcaaggaaacagactgagagagcagtatgggcttggcccctatgaagcagtaacacctcttacaaaggcagcagatatcagcttagacaatttggtggaagggaagcggaaacggcgcagtaacgtcagctccccagccacccctactgcctccagtagcagcagcacaacccctacccgaaagatcacagaaagtcctcgtgcctccatgggagttctctcaggcaaaagaaaacttatcacttctgaagaggaacggtcccctgccaagcgaggtcgcaagtctgccacagtaaaacctggtgcagtaggggcaggagagtttgtgagcccctgtgagagtggagacaacaccggtgaaccctctgccctggaagagcagagagggcctttgcctctcaacaagaccttgtttctgggctacgcatttctccttaccatggccacaaccagtgacaagttggccagccgctccaaactgccagatggtcctacaggaagcagtgaagaagaggaggaatttttggaaattcctcctttcaacaagcagtatacagaatcccagcttcgagcaggagctggctatatccttgaagatttcaatgaagcccagtgtaacacagcttaccagtgtcttctaattgcggatcagcattgtcgaacccggaagtacttcctgtgccttgccagtgggattccttgtgtgtctcatgtctgggtccatgatagttgccatgccaaccagctccagaactaccgtaattatctgttgccagctgggtacagcctttgaggagcaaagaattctggactggcaaccccgtgaaaatccttttccagaatctgaagggtactcttggtatcagaacaacagcagaacttcctggagctctggtctgagatcctcatgactggtggtgcagcctctgtgaagcagcaccattcaagtgcccataacaaagatattgctttaggggtatttgatgtggtggtgacggacccctcatgcccagcctcggtgctgaagtgtgctgaagcattgcagctgcctgtggtgtcacaagagtgggtgatccagtgcctcattgttggggagagaattggattcaagcagcatccaaaatataaacacgattatgtttctcactaaagatacttggtcttactggttttattccctgctatcgtggagattgtgttttaaccaggttttaaatgtgtcttgtgtgtaactggattccttgcatggatcttgtatatagttttatttgcttaacttttatgataaaataaatgttgaatctctttggttgtagtaa

SEQ ID NO: 262337 - DNA, 374 bp, Homo Sapiens
ctaataggggtttctactactaaacataaacatcaatcttcttttgtcccagcaacagaaccatagccattaactaacccaaggtcctaccttctcttccctatacacaacaaaaattctatttcatgcaaaaacattttggcagtttctcagttcctgaaatctctggctactttatccaggttccccaacccctcccaggcctcttctcaacacagcaagttggctcttatcattgccactatattaggttacacaaagaaactcctcacctgggcttcattgaaatcttcaaggatatagccagctcctgctcgaagctgggattctgtatactgcttgttgaaaggaggaatttccaaaaattctatatt

SEQ ID NO: 262338 - DNA, 1014 bp, Homo Sapiens
gattgatgctgctgtgcagatatacgaacaggtgtttgcaaaactgaacagttctgttttcccagaaggctctggcgagggggacagtgccagctcccagagttggaccagtgttctcgaagccatcacactgatgcacacgagcctgctgagattccacatgaaagtgagtgtttacccgctggcccctctgcgagaggcactctcacaggctttaaagttgtatccaggcaaccaggttctttggaggtcctatgtacagattcagaataagtcccacagtgccagcaaaaccaggagattttttgacacaatcaccaggtctgccaaacccttggagccttggttgtttgcaattgaagctgagaaactgaggaagagactggtggaaactgtccagaggttagacggtagagagatccacgccacaattcctgagaccggcttaatgcatcggatccaagccctgtttgaaaatgccatgcgcaggaccagtggcagccagtgccccttgctgtggaggatgtatttgaactttctggtttccttaggaaataaagaaagaagcaaaggtgtattctacaaagcacttcagaattgcccttgggcaaaggtgttgtacctggacgccgtggagtatttccccgatgagatgcaggagatcctggacctgatgactgagaaggagctccgggtgcgcctgccgctggaggagctggagctgctgctggaggattagagagcagcgggaaaacgggctgtgcctgcgaggccaagttgccccaccatgcggagctaggaggcgcgagcagagaacgtgtgtgttaggagaactcggcttttgaaatgttctttctcgatagtaataatgtggctgccagcctctcacatcttgcacactttttgggtgtgtaaatgacacaaaagttatttacatattatatatgtgaatatgtgtatatatgtacatagccagagagtcatgccacgtggtcattaaaccgatgatgattg

SEQ ID NO: 262339 - DNA, 1026 bp, Homo Sapiens
tgcgatcgctgggcctcgaccacatggcctccagcattgagcgcatgggccagaccatggagcgcattggctctggcgtggagcgcatgggtgccggcatgggcttcggccttgagcgcatggccgctcccatcgaccgtgtgggccagaccattgagcgcatgggctctggcgtggagcgcatgggccctgcaatcgagcgcatgggcctgagcatggagcgcatggtgcccgcaggaatgggagctggcctggagcgcatgggccccgtgatggatcgcatggccaccggcctggaagcgcatgggcgcaaacaatctggagcggatgggcctggaagcgcatgggcgcaaacaagcctcgagcgcatgggcctggagcgcatgggtgccaacagcctcgagcgcatgggccccgccatgggcccggccctgggcgctggcattgagcgcatgggcctggccatgggtggcggtggcggtgccagctttgaccgtgccatcgagatggagcgtggcaacttcggaggaagcttcgcaggttcctttggtggactgtggaggcctgctcctggggaggccaaaaagggccggcagatatttgtgaaaaatctggccattcgagcttcccatgggaaagatgtctccgcgaccaatcccaccgaatggccggtccaacggggctgtgtcgcccgaccttccataattggtagaatcgtgggagctcccctgaccctgttttgcccacgagaccaacactcacatcgcaccccccacaccgcccccgtaacgtaaacacgcgcagcctcatattaccccggcacgcccaccccgcacgcaggtaacaccacacaacgcaggtgtgcgtagagtgcacaccaaaaggcaacttactgagtacacaagcgcatacaactaataactcagtgcattccaatattcatatcaacgggcgcgcggatggggaggaacgccggcgactcccggaagcaagccagcacactgcctgactcgcatctcactaagg

SEQ ID NO: 262340 - DNA, 905 bp, Homo Sapiens
acaggcttcaacgggcttccccgaaaaccttccccgcttctggatatgaaattcgagctgcttgctgagtcctattgccggctgctgggagccaggagagccctgaggagtagtcactcagtagcagctgacgcgtgggtccaccatgaactggagtatctttgagggactcctgagtggggtcaacaagtactccacagcctttgggcgcatctggctgtctctggtcttcatcttccgcgtgctggtgtacctggtgacggccgagcgtgtgtggagtgatgaccacaaggacttcgactgcaatactcgccagcccggctgctccaacgtctgctttgatgagttcttccctgtgtcccatgtgcgcctctgggccctgcagcttatcctggtgacatgcccctcactgctcgtggtcatgcacgtggcctaccgggaggttcaggagaagaggcaccgagaagcccatggggagaacagtgggcgcctctacctgaaccccggcaagaagcggggtgggctctggtggacatatgtctgcagcctagtgttcaaagcgagcgtggacatcgcctttctctatgtgttccactcattctaccccaaatatatcctccctcctgtggtcaagtgccacgcagatccatgtcccaaatatagtggactgcttcatctccaagccctcagagaagaacattttcaccctcttcatggtggccacagctgccatctgcatcctgctcaacctcgtggagctcatctacctggtgagcaagaaatgccacgagtgcctggcaacaaggaaagctcaagccatgtgcacaggtcatcaccccccgggaccacctccttcctgcaaacaatacgacctccctttcgggggaccttcatcctttctggcg

SEQ ID NO: 262341 - DNA, 1386 bp, Homo Sapiens
  misc_feature (817)..(817): n is a, c, g, or t
  misc_feature (1210)..(1210): n is a, c, g, or t
  misc_feature (1216)..(1216): n is a, c, g, or t
gagcgggccgaggactccagcgtgcccaggtctggcatcctgcacttgctgccctctgacacctgggaagatggccggcccgtggaccttcacccttctctgtggtttgctggcagccaccttgatccaagccaccctcagtcccactgcagttctcatcctcggcccaaaagtcatcaaagaaaagctgacacaggagctgaaggaccacaacgccaccagcatcctgcagcagctgccgctgctcagtgccatgcgggaaaagccagccggaggcatccctgtgctgggcagcctggtgaacaccgtcctgaagcacgtcatctggctgaaggtcatcacagctaacatcctccagctgcaggtgaagccctcggccaatgaccaggagctgctagtcaagatccccctggacatggtggctggattcaacacgcccctggtcaagaccatcgtggagttccacatgacgactgaggcccaagccaccatccgcatggacaccagtgcaagtggccccacccgcctggtcctcagtgactgtgccaccagccatgggagcctgcgcatccaactgctgcataagctctccttcctggtgaacgccttagctaagcaggtcatgaacctcctagtgccatccctgcccaatctagtgaaaaaccagctgtgtcccgtgatcgaggcttccttcaatggcatgtatgcagacctcctgcagctggtgaaggtgcccatttccctcagcattgacccgtctggagttttgaccttctgtatcctgccatcaagggtgacaccattcagctctacctgngggccaagttgttggactcacagggaaaggtgaccaagtggttcaataactctgcagcttccctgacaatgcccaccctggacaacatcccgttcagcctcatcgtgagtcaggacgtggtgaaagctgcagtggctgctgtgctctctccagaagaattcatggtcctgttggactctgtgcctcctgagagtgcccatcggctgaagtcaagcatcgggctgatcacatgaaaaggctgcagaataacctgggatctacccagatcgtgaagatcctaactcaggacactcccgagttttttatagaccaaggccatgccaaggtggcccaactgatcgtgctggaagtgtttccctccagtgaagccctccgccctttgttcaccctggngcatcngaagcccagcttcgggaagctcagttttttacaccaaaaggtggaccaactttatacttcaactttggaaataaacattcagcctctggaatcggaatcccagcctgaatgaaactccccgggggaaatggggccggggttcccacaccccggaagggtttctgaaaaaa

SEQ ID NO: 262342 - DNA, 1085 bp, Homo Sapiens
  misc_feature (269)..(269): n is a, c, g, or t
acctcaatgttgagttttcataaaacaggtgtataacagtgtttatcttgacagctgtttaaaaaatttaaaatttcttcctccctcccagaaaaacacaaacatctgtattgggataagtccaatagtaggacacaaatgattttcaggtcagtctttctgagttgacattcaccgaacattccccttgggtaatttacatgctcctcttctgtcactgcaaaaagggattgaccttaatcatttgattaaaaaacaaaatcagatcnacatcaaaaagtgtttttccccatacaagctatcacagtatataggcctctagctctaaataatagagttccagatttgtaaattttcttcagacttcagaacataggcattccaaatcctgaatcatcttctatgatagctgcagagtcaaagaagtctggccttagctcagctctctctcgccgatttcttgatggaggcagatcaataaccatggtgtcctcaaattcttcattcatatcttctaactggcttcgggatgacatcatcacatcttcaaagatgggctcagcatcttcctccattagaccccgaacagcatgcctcactccagttctcactttcatgtagttcattcctgttctgtccttccgatttaagtcttctaacttcggctggcctaaccaagagatctgcatctgaggattgtgtaaaaagtctggttcagaaccatgttcagactcaggttcttgaatctggtctcccatgggccgactgttctcccgcagtacagtggatgtgagttgtggtgctggcagggggccaggagtctgaatcatggtgtcagtcctgtttagccatgtgttatccagactctcatcttctactcgttttttatgaagtggaggtcgtcctttcttattccttactgatgaggttttgctgctgctacttccactgttcacagacattctatcatcttcacccccagtgactaatgaatttctataggagatgagtggaagccatacatcctccctcctttccatcatctgctcggtaaggaatttctctaggtatgaatgaactgtctt

SEQ ID NO: 262343 - DNA, 1666 bp, Homo Sapiens
  misc_feature (30)..(30): n is a, c, g, or t
  misc_feature (536)..(536): n is a, c, g, or t
  misc_feature (746)..(776): n is a, c, g, or t
  misc_feature (995)..(995): n is a, c, g, or t
gatggcgtaggtgcgtgcagaacagatggngatggtgtgtggggtagctcagaggtgagtgatcgtgtgtatggaggtagcagtattgaagtcgagtcgtcagcggatagtgagcaagcggtctatatgcaagcacggcgcttttgcaccggtagcgtgtatatagctgagatgcgacaggcgcggtggaaggtgggcgtgggcgccgtgaatgtgaagatatggcgtgtacttctatctggcgtcgcgatctcagttgatggagagatggatcaggttggcagtccgtatgatcacattggtcgcgcagggaggggaatatatcgagagcgacaggagagtgggtggaggggttgggtaatattagtgagtgcggtggcgtaacagtatgtattgtttgtcagatgagacgggtgaggcgcgcgactcttcttagggcggtatgtaggtgtgacgtaagtggtggggatagcaactattatctacaggtgagtgtctggcgccaggtataaaataaggggcgtgtgaggagaganctcccaggtaatttcttcaaggcggcgtgcgggtcgtgtgtttagacggatggtggcgcgggggggtgagtatagtcatcaagagtgaggtgcggggatctccgtctggaagaggtggggtaaaaatggagggtagggcaagatcaactcggcataagatagtaggggtaatggggcgcaggcggagcgggtgtaagtaagaagacatannnnnnnnnnnnnnnnnnnnnnnnnnnnnnncgacgcggctatgcagcaggaataaattattaggcagggtacgcggatgccggtccagggtatcgattcctcgtcctagttggtagggatgggaacagggaagggcatgggcggggtgggtccacgccgccggtccagtcggtcccgccagggcagcgatcaaacgtcgagggaggaaggcgggggacaggaagggggttcgagagggcgtggcgggcngccggccccgcgccccccagcgcccagcactcgccactggaagatgctggcgtccttgccgcccagcgagacgaggtgcgagtcgtcgtgcgtgaatcggacgctggtcacgtggctgccgtggcccccgtacatgcggctcggcgccttggcacgagcgcacgggtactggaagagatgcactttgcagaagtcgtcggccaccgccaccacgcgctcgttgtgggagcggcacagggagttgatgtcggtcccatcggagccgtccggccagacgccgtagacgtgaaagcccagcacacaggtgtaggtagcccattcccggtctcggctctcatagcgattcttcagctgcttgcagcctccagccacgtcccagtaaagaatctcatagtccccagaattggacatgatgaaattcccatccttggaccagtcaagatgagtgatgaagctggagtgacccatacagcggccaaagcggctggatttggcaccatcactggaaacactatagatgtagatcacgttgtcatgggaaccaatgcccaggtacaacccatctgggctgtaccggaccactgagagctgctcattgccatcaatgacatcagacacgatctctctggtctctgtgtccaaaacccctcgtgccgaattcgccacccagg

SEQ ID NO: 262344 - DNA, 845 bp, Homo Sapiens
  misc_feature (582)..(582): n is a, c, g, or t
  misc_feature (723)..(723): n is a, c, g, or t
  misc_feature (809)..(809): n is a, c, g, or t
tgagattactgcttgagagcaaagaaaagaagatcagggaattcattcaagactttcagaaactcaccgcagctgacgataaaactgctcaggtagaagattttctgcagtttctttatggtgcaatggcccaggatgtcatatggcaaaacgcgagtgaagaacagcttcaagatgcacagctggccattgagcgaagcgtgatgaaccggattttcaagctcgccttctaccctaatcaagatggggacatacttcgcgaacagggtcttcatgaacatatccagagattgtctaaagtagtgactgcaaatcacagagctccttcagataccagaggtttatcttcgagaagcaccatggccatctgcacaatcagaaatcaggacaataagtgcttataaaaccccccgggacaaagtgcagtgcatcctgagaatgtgctctacgattatgaacctcctgagcctggccaatgaggactctgtccctggagcggatgactttgttcctgtgttgggtgtttgtgttgataaaggcaaatccaccctgtttgctgtctactgtgcagtatatcagtangcttttatgctagctgtctgtctggagagggagtcctattgggtggatgcaagttcacagcagcagtagaattcattaaaaccatcgaatgaccgaaagtgaccaagaccaaaggcccaccaaggcagcagactgttaatncagacaaacagaatctctgaaaaaaggtgcatcagcctgcttttgaaggctgaaaaaattggttttggtaatgatactgccacagncatcaaagcaatttttaaaagccaggatcttttact

SEQ ID NO: 262345 - DNA, 1166 bp, Homo Sapiens
ggcctgggtggcgaattcggcacgaggggatggccagaccttcaaccagatggaagacctcctggctgactttgagggcccctccattatggactgcaagatgggcagcaggacctatctggaagaggagctagtgaaggcacgggaacgtccccgtccccggaaggacatgtatgagaagatggtggctgtggaccctggggcccctacccctgaggagcatgcccagggtgcagtcaccaagccccgctacatgcagtggagggaaaccatgagctccacctctaccctgggcttccggatcgagggcatcaagaaggcagatgggacctgtaacaccaacttcaagaagacgcaggcactggagcaggtgacaaaagtgctggaggacttcgtggatggagaccacgtcatcctgcaaaagtacgtggcatgcctagaagaacttcgtgaagctctggagatctcccccttcttcaagacccacgaggtggtaggcagctccctcctcttcgtgcacgaccacaccggcctggccaaggtctggatgatagacttcggcaagacggtggccttgcccgaccaccagacgctcagccacaggctgccctgggctgagggcaaccgtgaggacggctacctctggggcctggacaacatgatctgcctcctgcaggggctggcacagagctgagctgctcagccaccatcaggttaattggatggcgccagtctggctggaggagccctgagatgccatgggaggcctgaggttggccaccgggggagctggcctccagggacgggagagattgtgtcatgtgccacaccgaaaccaacggggaaaagtctgaaagggccttggggaaaccaggtagcacctggcccccatcatgatgcaggggttttggggacctggaaggaaggtgatgaggcagtgagtcagaaaaaccagaacggggtccccggatctgctgggaaggcttctgaggggctgccctgagagcattcagttcacatgtcaccgggtatgggtgtgacagggtgccctgtggacacatgaaatcactttctaacctggccctccctgtcagcctccagggctgcccagctggctgaggccaggggactggggtcaggcttcatctgtggccgccctcaaaagg

SEQ ID NO: 262346 - DNA, 1207 bp, Homo Sapiens
gaaaagcctctttcggggagggccccaggcttctgctcccctggggaggccagaggccctggggacctacacacaagggcacacacaggcccgggctttggtcagtactgagtgtgggcagaggggcccgcagccctgtccagcccccacgatgttgactgagaggtgctatcccagacggtccttgttggagctgccatggcaggctgggccctaattggggtagcacaagcagcatcccgtgcctgccgcctccacgctgggcttggcaccgggccccaggagcccatcaggtgacagagggcttccaggaggatgtcctcccacccggggtgatgtacagcagggtcaagcagcacccccaggaactggggaagcaggatgcccagggaggatgcccgccatgatggtgtagttgtccatgaaccagatgatcacggcgttggtgcagccccgcacgtagatgacatcctgcacactgaaacgctccttgtcgatagttttgtagccacacatggtgttgacaacttctgtcgtgttcctgatgcagcaggtgtagggcaccccacaggccaggggtccaggggcactgcagtcgtggtactgattcttgctccaatctcggtagtcctccccgccacagcacttgaactttttctgaacaaagtccatgatgtttttgaagtccagatcatcatagtagttctcaattcctcttcgaatgttgtcgttcaggaagtcaatggtctggttccggaaggtcaaggccaccacgccaccaatgagctccatgatgaggcagatcccaaggatgtacatgaatgcttggagaaggtacaggttgtcacggagggacgccagcacaccaatgaaggagaccatgaacatgacgacgcccaggaggatgaggatgatggctggagccaggaaggcactttcaagggttttatatttctgccgctcaacctctgcatagatgcccacagacaggaccagggccccaatcagccagaacacggtggaatagatgataagtgaaaacttgagccagaggtaggagaagcgcgcgcagtagcgcacctgctccgagtccccgcgcggcatcctgggcgctccccgcgcgggttacgggggctccggggctctccggctcggtccctcagccagcgctcgtggccccacctgcggctgccgggctaccagcccc

SEQ ID NO: 262347 - DNA, 1014 bp, Homo Sapiens
  misc_feature (132)..(184): n is a, c, g, or t
gttatttttttaaaaaatgctgtttcttcctccctaggacaatccaatttttaggaggggcaggagattaagtccacccattgttcccaccagcccctgggcacacagtaggtactcaataaaatatatgtnnnnnnnnnnnnnnnnnnnnnnnnnnnnnnnnnnnnnnnnnnnnnnnnnnnnngggatggatgtgacccagctgaagtgtgagtaggaacattctcttattatgggtggaggaaagagagaggagattgagaaaataagataaaatacattgatgcgcatcatttttggtgttcgaaaagtaggattgaattaggactaataaatctagagaattttacctctttcaatgcccaagccacacttttctatcactttgaaaccgaaaaagtaaatactttcccaacatttgctttgctggtaggaaatgctttaataaaaatgcaatctctaagttgccatggcatcattaaaagaaaggatgtcatgcccaggtccagaacttgaaggtggcaggcaccagcaagcaccatagctctgaatgggcctgccttacaggtcctcactccaacactgctcacttcttccagcttgaaaatggagaacatgttcacaccctgggttgtaagtaggaggaactctgatcagcaagaagcttgcagaggacaatatgaggcaatagtattttactggccacagtgtgactgggttgcactctgttctgacattaggaagaatttcatgcctgggcaaagtcaaagttttttcctttagtcacattactcaaagaataagttgactatatcccaacagcacttgtccaaattccaggactccacttacgactattatgaggcaaacatctgcctgtgcagtttgtctttccatccagtctattctttggggtccagatccttgatcattctcacacccagtgctatctgcctcattgcccagcatcaggaagcaaggagtatggtgcaataagacaaccacctggccatg

SEQ ID NO: 262348 - DNA, 1091 bp, Homo Sapiens
  misc_feature (1008)..(1008): n is a, c, g, or t
agaagatttgaaggtggttaagaactgtgcaaataccacaagatcattttgtgacctcacagatgagtggagaagcacacacgaggcctatgtcaccgtcctagaaggattcagcgggaacacaacgttgttcagttgctcacacaatttctggctggccatagacatgtcttttgaaccaccagagtttgagattgttggttttaccaaccacattaatgtgatggtgaaatttccatctattgttgaggaagaattacagtttgatttatctctcgtcattgaagaacagccagagggaatggttaagaagcataaacccgaaataaaaggaaacatgagtggaaatttcacctatatcattgacaagttaattccaaacacgaactactgtgtatctgtttatttagagcacagtgatgagcaagcagtaataaagtctcccttaaaatgcaccctccttccacctggccaggaatcagaatcagcagaatctgccaaaataggaggaataattactgtgtttttgatagcattggtcttgacaagcaccatagtgacactgaaatggattggttatatatgcttaagaaatagcctccccaaagtcttgaggcaaggtctcgctaagggctggaatgcagtggctattcacaggtgcagtcataatgcactacagtctgaaactcctgagctcaaacagtcggaagaaagtgtgggattataattatgatgatgaaagtgatagcgatactgaggcagcgcccaggacaagtggcggtggctataccatgcatggactgactgtcaggcctctgggtcaggcctctgccacctctacagaatcccagttgatagacccggagtccgaggaggagcctgacctgcctgaggttgatgtggagctccccacgatgccaaaggacagccctcagcagttggaactcttgagtgggccctgtgagaggagaaagagtccactccaggacccttttccgagagataagntccggaagggtggggaaatactcagtggctaaccgggttaacttaaagatgcctaaccttgttctagcataatgcactacgtt

SEQ ID NO: 262349 - DNA, 388 bp, Homo Sapiens
  misc_feature (69)..(69): n is a, c, g, or t
ggtggaaaatttccccactccatgtttccccttttaatttccggggtttaatgccttccttaaacaaantcccctctgaactgttccttccaatgacgaagagataaatcaaaactgtaattccttccctcaacaatagatggaaatttcacccatcacattaaatgtggttggtaaaaccaacaatctcaaactctggtggttcaaaagacatgtctatggccagccagaaattgtgtgagcaactgaacaacgttgtgttcccgctgaatccttctaggacggtgacataggcctcgtgtgtgcttctccactcatctgtgaggtcacaaaatgatcttgtggtatttgcacagttcttaaccaccttcaaatcttctggtttact

SEQ ID NO: 262350 - DNA, 1048 bp, Homo Sapiens
ggaagtgcgggcggaggatccccagccgggtcccaagcctgtgcctgagcctgagcctgagcctgagcccgagccgggagccggtcgcgggggctccgggctgtgggaccgctgggcccccagcgattggcgaccctgtggggaggccttcttcggcttggctccttgctcagcctgtcgtgcctggcgctttccgtgctgctgctggcgcagctgtcagacgccgcccaagaatttcgaggatgtcagatgtaaatgtatctgccctccctataaagaaaattctgggcatatttataataagaacatatctcagaaagattgtgattgccttcatgtcgtggagcccatgcctgtgcgggggcctgatgtagaagcatactgtctacgctgtgaatgcaaatatgaagaaagaagctctgtcacaatcaaggttaccattataatttatctctccattttgggccttctacttctgtacatggtatatcttactctggttgagcccatactgaagaggcgcctctttggacatgcacagttgatacagagtgatgatgatattggggatcaccagccttttgcaaatgcacacgatgtactagcccgctcccgcagtcgagccaacgtgctgaacaaggtagaatatgcaccacgcagcgctggaagcttcaagtcccaagagcagcgaaaagtctgtctttgaccggcatgttgttcctcagtacattgggaattggattcagtgcctgaaacaaacggcgacacctgggaagaactgactgggttggcgggccgtttaaatccctgttggttcccacgggtgggattcacctgaggcgagacctgcgtgatatttctggtacgagatctacagttttacgcccccaaacacagacttcctctggctagataaaacgcggattttgtagtctgagagcgcttcacctagagctgcgtgtacctcgagcgaacatcttgattgcggcgccggagacattcaccaagagcgacctctgcggcacacatggtgttactcgtcatttat

SEQ ID NO: 262351 - DNA, 1318 bp, Homo Sapiens
tactgtacctgtccatcactggttctctcctcatgtcctctcgccccatgacgttgtgttgtgtcttctaagcgtggtactagtgcttgccacctggtcaccagacctccaaatatggctgccaccaccaggacctttccagttactccttatatgtgtgatctatggaggggcagggaaaaggtggcacttgtgagtgtgtgtggattggcagggggtccattcactttgggttccatcttgctttaaatttcttcattttgattaagagacctctttttgatctgtattgggctaaccagagccaaatacttttgaagagtttcccagggactagtcatggtaatagcatataattgatctgaatgagatggagagaagaatgaaggggtggtggttctgggtttgatttgagttcacctgtgggcagtgggcagtgggcagtgtcttggtgaaagggaacggatactactttttgcctcaccgtaaagtactcactagtaaatatttccttctctctttactcccactttttacgtttgcaggtgccaaagtaatgtccacttttccctttcatgctgcatattaactggttaattatactgcagaaaccttttcacctccactagtctgatacagtacatctgtacttccatataccttgcactgattttgtctgagagccctgcgagaactagaaaatgattgaaagtgacttccgtatctcaccccatgactcagcaaggcagaatggccaccccctgccaaagccttgcttctcttttcaacagtgcctcacccttccctctaggaataaagtgcttctgcccttccacgaactcctcctccatttcctttttgggatttgtcaccatccttctattctctggtcttctatttttggtgttgttcaagtgaaggaagagatgttccctctaatttctctctagcccattataacctgctatcttggggcaacttttgatgtatgacatgtcacccttcccaacttggtctcctccaacatgctgtcttcatgtggagccctcaccacaatccctgactccggtcatttgtgcctttctcttggcatctctgtacactacttatattcactgtgggttgggggagctaattttaagcatgttcagtggcagctcccctccagtttcagtgtcactgttaaaatttatcaaaaagcaacttcactaggggttttcttaagggataaaggccttttacagaagctaaacccttccccacatgtggtagaatgtgctcttctatatctactcctcaataaagcatgttctctgca

SEQ ID NO: 262352 - DNA, 901 bp, Homo Sapiens
cgagacctgtgaggcacggggacatggtgcagctggtccacggcatgaccacccgctccctgaacacgacatgatgttgcagcccccctgagcccccattcacacgaggtctcctgctacattgactataacatctccatgcccgcccagaacctctgtgagactggaaattgtgaacagaggatctgacacagacgtctgggaatgaccatcctctcagaggtccgctttgtgcacgtgaacacttccgctgtcttaaagctgagcggggctcacctccctgactgggggtatcggcaactggagatcgtcggggagaagctgtcccggggctaccacgggagcacggtgtggaacgtggaggagcaccgatacggcgcgagccaggagcagagggagcgggaacgggagctgcactcacctgcgcaggtggacgtcagcaggaacctcagcttcatggcgagattctcggagctgcagtggaggatgctggcgctgagaagtgatgactcggaacacaagtacagctccagcccacctggagtgggtcaccctggacaccaatattgcctactggctgcaccccaggaccagcgctcagatccacctacttggaaacatagtgatctgggtttcgggcagcctcgctctggccatctacgccctgctgtccttgtggcacctgctccgacggcgaagaaatgtccatgacctccctcaggatgcctggctgggctgggtgctgcctggggggctgtgtgcccgcggctgggcagtgaactacctcccgtccttcctgatggagaagacactcttcccctagcactacctggccggaattccccttccaaagtccttctgctccccctgtggtcctgccaaaacattaagcgaaccaccc

SEQ ID NO: 262353 - DNA, 967 bp, Homo Sapiens
ggcagtaactctaacggttataaggtagcgaggcctgggtggcgagacaccatgattcctggtaaccgaatgctgatggtcgttttattatgccaagtcctgctaggaggcgcgagccatgctagtttgatacctgagacggggaagaaaaaagtcgccgagattcagggccacgcgggaggacgccgctcagggcagagccatgagctcctgcgggacttcgaggcgacacttctgcagatgtttgggctgcgccgccgcccgcagcctagcaagagtgccgtcattccggactacatgcgggatctttaccggcttcagtctggggaggaggaggaagagcagatccacagcactggtcttgagtatcctgagcgcccggccagccgggccaacaccgtgaggagcttccaccacgaagaacatctggagaacatcccagggaccagtgaaaactctgcttttcgtttcctctttaacctcagcagcatccctgagaacgaggcgatctcctctgcagagcttcggctcttccgggagcaggtggaccagggccctgattgggaaaggggcttccaccgtataaacatttatgaggttatgaagcccccagcagaagtggtgcctgggcacctcatcacacgactactggacacgagactggtccaaccacaaatgtgacacggtgggaaacttttgatgtgagccctgcggtccttcgctggacccgggagaagcagccaaactatgggctagccattggaggtgactcacctccatcagactccggacccaccagggcccagcatgggcaggattaacccgaatcggtaccctcaaggggagtgggcaaaatggggcccaagttccgggcccccccctgggtaaccttttgggccctgatgggcccgggggccattgccttggacccgacagcccgggagggccaagcgtaaacccctaagcc

SEQ ID NO: 262354 - DNA, 1521 bp, Homo Sapiens
  misc_feature (1406)..(1446): n is a, c, g, or t
aggcagtactctaacggtgttaggtagcgaggctgggtggcgaattcggcacgaggccattccgtagtgccatcccgagcaacgcactgctgcagcttccctgagcctttccagcaagtttgttcaagattggctgtcaagaatcatggactgttattatatgccttgttttctgtcatcctgctaggaggcgcgagccatgctagtttgatacctgagacggggaagaaaaaagtcgccgagattcagggccacgcgggaggacgccgctcagggcagagccatgagctcctgcgggacttcgaggcgacacttctgcagatgtttgggctgcgccgccgcccgcagcctagcaagagtgccgtcattccggactacatgcgggatctttaccggcttcagtctggggaggaggaggaagagcagatccacagcactggtcttgagtatcctgagcgcccggccagccgggccaacaccgtgaggagcttccaccacgaagaacatctggagaacatcccagggaccagtgaaaactctgcttttcgtttcctctttaacctcagcagcatccctgagaacgaggcgatctcctctgcagagcttcggctcttccgggagcaggtggaccagggccctgattgggaaaggggcttccaccgtataaacatttatgaggttatgaagcccccagcagaagtggtgcctgggcacctcatcacacgactactggacacgagactggtccaccacaatgtgacacggtgggaaacttttgatgtgagccctgcggtccttcgctggacccgggagaagcagccaaactatgggctagccattgaggtgactcacctccatcagactcggacccaccagggccagcatgtcaggattagccgatcgttacctcaagggagtgggaattgggcccagctccggcccctcctggtcacctttggccatgatggccggggccatgccttgacccgacgccggagggccaagcgtagccctaagcatcactcacagcgggccaggaagaagaataagaactgccggcgccactcgctctatgtggacttcagcgatgtgggctggaatgactggattgtggccccaccaggctaccaggccttctactgccatggggactgcccctttccactggctgaccacctcaactcaaccaaccatgccattgtgcagaccctggtcaattctgtcaattccagtatccccaaaaccctgttgtgtgcccactgaactgagtgccatctccatgctgtacctggatgagtaatgaataagggtggtactgaaaaattatcaggagatgctaataaaaaggggatgtggggtgcccccttgagaatcaggcaatcccttggaggatagaccggatattnnnnnnnnnnnnnnnnnnnnnnnnnnnnnnnnnnnnnnnnnggttccccattccacttcaccccacaaaacttacaaagactggctttccttaaaagcttgggaacttttattttt

SEQ ID NO: 262355 - DNA, 642 bp, Homo Sapiens
  misc_feature (415)..(483): n is a, c, g, or t
  misc_feature (514)..(542): n is a, c, g, or t
atgccttgacccgacgccggagggccaagcgtagccctaagcatcactcacagcgggccaggaagaagaataagaactgccggcgccactcgctctatgtggacttcagcgatgtgggctggaatgactggattgtggccccaccaggctaccaggccttctactgccatggggactgcccctttccactggctgaccacctcaactcaaccaaccatgccattgtgcagaccctggtcaattctgtcaattccagtatccccaaagcctgttgtgtgcccactgaactgagtgccatctccatgctgtacctggatgagtatgataaggtggtactgaaaaattatcaggagatggtagtagagggatgtgggtgccgctgagatcaggcagtccttgaggatagacagatatnnnnnnnnnnnnnnnnnnnnnnnnnnnnnnnnnnnnnnnnnnnnnnnnnnnnnnnnnnnnnnnnnnnnngactgcttccttatagctggacttttatttnnnnnnnnnnnnnnnnnnnnnnnnnnnnntccctaaacattcaccttgaccttatttatgactttacgtgcaaatgttttgaccatattgatcatatattttgacaaaatatatttataactacgtatt

SEQ ID NO: 262356 - DNA, 1478 bp, Homo Sapiens
  misc_feature (289)..(289): n is a, c, g, or t
tccgagagggttggacacacgggccaatgggacacgaagttccttcccagtttccaattgcccttggagggttccaggaacccccaaaagcccattccaaggaaccagagtgacttggcaggggcccggggccctgagcgggagccatggccagggctggacgtttcaccttcctcatcaggggacagcttcagttccgggggctcttccaagaattttctggatgggggtagaaatgcaacctaaccatccgggtaaatccagccaaggaaaaagaactcccagaaanccaaggcaagggctcactggcttcttgtgacctgcgagaagatctggccacgtacaggtcaatccggtagcagcgtctgccctcagatgcaaggaaatcgtccagcccacgccctgatttgctgagcctgttaaggctgaacaggagagccctaggtgacgggcctagaaacttccgtaggaagccccatgggcagcttgggcggcatcactgggggacaggtgtgtctgccgtctgtttccctgggccaagcccaggcccaggctgcccacgccgtcctccgtgcctgtcccagagtgccgtgatgctgttgggcattaggagtagatggtgatcacctcccggccgccacccctgaccaggaggactctgttcagcccctcggtcaggacttcaagaaactccatgtagttctcgtctccctgccggtttttgggaggacctggcatgttgagcaggaccagctgcgcatcctgggacttgttgaggacgacgccattgagcttcacagccgtgtgcatccgcctgacgttggactggtccggcttcatgctgaagaggtctttgaaaccggataggctggtgtctctgctcctgtacttctcagcgatcagcttctccctggtccaggtcatctgcaccttgtctggcgtaggcggcgcttgggtcctggctgccgccgcggtgtgggacgcggtgttcctgtcgtggatcagctgggcctctcgctcctgctcgttcttggacagctgcatctgcttcagcatctgcgacctctgctccatcattagtgtcctctcgtaggtgaaagcagatatgtcgttttcaaccatctccaccacctccacctcggcgctgatgcgcaagtgatacaagaacatctgcaggtccttcttcatctggatgctgttgtcatccacctgggccacggtgaagatacgcatccggcacttcctccacaccttatgctggcgcagcaggaagggcagaagcatgagcatgccaccatcgtgcacgatccaccacacgtcgatgtggccctccaggtagcgctcgtggttgctggggtagaaggcgatgttcttgggcacgagcagggccaggtgggcagccgtagtgcagcgcacggtgtcaatgaaggtcttccaggcacgggggtcctcgctctgtcgccagccgtagggccagc

SEQ ID NO: 262357 - DNA, 1617 bp, Homo Sapiens
  misc_feature (204)..(204): n is a, c, g, or t
  misc_feature (369)..(379): n is a, c, g, or t
  misc_feature (512)..(533): n is a, c, g, or t
  misc_feature (677)..(677): n is a, c, g, or t
ggcacgagccaaagtttaaaatcaccttttcttcctgttttgctgtagtcactggtgttcctcacccaccagctgtaactcagtttgtgtgaggtacagccacagaagatgtcatgtactgtatattacctggtgatagttgcttttcaccccccgagttcagtttctaggagccaatgaaacttcccctcacctcctcatctnttccaagttgttctttgaattgaggagtttgaaggcataaacagttacttggggatttgcgaaaatcctacttagttactgcgtttacagttctttggcccagtctctggacccttcccaagtgatttgtgcaatgattgtgtttactgctggatttttgaaggnnnnnnnnnnnaagaaagtgccatttcattatttgattatcaccaaattatctggaaataattgggacattgtaacttatctatttatagttatgagattaagactggagtgccatcaccgcgggtgatgatttagcttttgcnnnnnnnnnnnnnnnnnnnnnnccttccaaatcatgccataattgtaatgttgaatcggacagagccttacgtgcccgagggcggggcctacctgcctgagcgcgagcccttcatcgtgccggtggagcccgagcggacagcggaatacgaggactacggcgcagnacgagcctgcagaggagcctcctgagccccaacggcgctggcggcgcgccctgccccacggacccgggcagtgaaccagagatcacgcgccgcgccgcgaggcttgggggaggtgttgaaattctcatttacaggtcagatagagcagtgtacgtcttttctgaggtgtttcttccagcgttgctcatccaggagtaccctttctgattgtagagaaccttgttttctgcaagaaagcctagctccaagcacccagtctgtagacatttttgcctctgcccttgaaatgcttgcaaaatactttgttaacaaaagctgcaaagagagaacatgccgtgtgcctttagttagcacagcgggcagcctcagtgaaactcttaggttaagcagttaagtcctggaacccagagctgctgtgtatttcgagcgggcagtttatcttttgctatacttattttcaattcaattacaccacgattcaaataattcccctcctaaaaccaaaaaggagggaaacgtcaactccattgcaattacttatcttcctcttctatctctgttatacgccggggcatagaatgctcgtatacatctctttaacaaccacaaaccttaagccatgtagatgaagttagtgcatcaacgggatacagttccatattgccttaaacctccttgttttagacacactaacatttataccaaattgcagattattctgcagagagggaattgcatgtttgtgttgtatatttagtatgaacttttttcagaatataatatttcttagttatcaaaagtagttggaaaacatttgcaagactatgaacatagaattgctgcttttatattttaactgcagattgtgaatttcactgccttatattatttatttctgaaacaaaagaggcatttttcaataaaactactgaaaatttaa

SEQ ID NO: 262358 - DNA, 414 bp, Homo Sapiens
  misc_feature (20)..(20): n is a, c, g, or t
  misc_feature (22)..(22): n is a, c, g, or t
  misc_feature (122)..(122): n is a, c, g, or t
acgaggactacggcgcaganangacctgcagaggagcctcctgagccccaccggcgctggcggcggccctgccccacggacccgggcagtgaaccagagatcacgcgccggccggaggttgnggggaggtgttgaaattctcatttacaggtcagatagagcagtgtacgtcttttctgaggtgtttcttccagcgttgctcatccagggagtacccttttctgattgtaggagaaccttgtttcttgcagggaagcctagctccaagcacggcagttttgttaggacatttttttgccttttgccctttgaaatgctttgcaaaataattttgttttaacaaaagcttgcaaaggaggaggaacatgccgtgttgccttttagtttagggcacagcgggggcagccttcagtt

SEQ ID NO: 262359 - DNA, 355 bp, Homo Sapiens
  misc_feature (26)..(26): n is a, c, g, or t
  misc_feature (46)..(46): n is a, c, g, or t
  misc_feature (64)..(64): n is a, c, g, or t
  misc_feature (86)..(86): n is a, c, g, or t
  misc_feature (135)..(135): n is a, c, g, or t
cccccacaaccccttaaggcccctgnaggatggaaggtaaggggcntccaacggggatacaggnccccatattgcccttaaacccnccctggttttaggacacacctaacatttatccccaaattgcagattatnctgcagagagggaattgcatgtttgtgttgtatatttagtatgaacttttttcagaatataatatttccttagttatcaaaagtagttggaaaacatttgcaagactatgaacatagaattgctgcttttatattttaactgcagattgtgaatttcactgccttatattatttatttctgaaacaaaagaggcatttttcaataaaactactgaaaatc

SEQ ID NO: 262360 - DNA, 836 bp, Homo Sapiens
  misc_feature (759)..(759): n is a, c, g, or t
tgtcagatcatataccctcgccagcagctgctgaccctccgagagctagagatgattggcttcattgaaaacaacgtgtcaaaattgagccttcttttgaatgacatttcaaggaagagcgagggcctcagcggccgggtcctgagaaaactcccctttctggctcatgcgctgtatgtccaggcccccaccgtcaccatagaggggttcctccaggccctgtctctggcagtggacaagcagtttgaagagagaaagaagcttgcagcttacatctgatcctgggcttccccatctggtgcttttcccatggagaacacacaaccagtaagtgaggttgccccacacagccgtctcccagggaatcccttctgcaaaccaaacgttacttagactgcaagctagaaagccaccaaggccaggctttgttaaaagaagtgtattctatttatgttgttttaaaatgcatactgagagacaaacatcttgtcattttcactgtttgtaaaagataattcagattgtttgtctccttgtgaagaaccatcgaaacctgtttgttcccagcccacccccagtggatgggatgcataatgccagcaagttttgtttaacagcaaaaaaggaagattaatgcaggtgttatagaagccagaagagaaactgtgtcaccctaaagaagcatataatcatagcattaaaaatgcacacattactccaggtggaaaggtggcaattgcttttctgatatcagctcgntttgatttagttgcaaaaaatgtttttcaggactattttaaatgggatgtaaaaaaagccctatttttctacaatta

SEQ ID NO: 262361 - DNA, 840 bp, Homo Sapiens
tcggataaatacatcttgtggttacagtgtcttgaaagtgtacctgggcacggtgcgaagctgctgggaatgtgaagcctgtggttgcggcagagggctttcccggagtggaggccacagaggcctctggggagccttctcagtctggcctggtttatctgggacatggagctcagagaagaggctgctgggccagtgccagggttccccctctgggaggggacagaaggtctctcgtccagccttcttggacaaggtcagattcaagacgaggtggtcccatcgctgctctggggctggttgccagcttccttgtctggggcgcttccctccacctgtccttctgccccctcgagtgccagctcgcccatgtctccagccagcttcctcacgctcacagcctctgagtctccctggatgtcagggaccgcattccgacggcctgtccggtcacaggagatgaagtccgagtaggaggactcgacctccatcatgcctgtcgcatcgctcctcaggcctggtttaatttctttttcctgcttgcatctcttcagattttccactgttgactaatcagtacgggaattctagttgaggagtgtgaggcattccacatttccactctccacttcctggcagggaccacaaagtctaggtaccttccttccagaacatcacctcctcaccaccacaagaccaaagtttcctcaaaatccagtggtcctcagtcagaagcggaggcagaatttaagaaaccaggattcaaggttagcagtccagacctgtggtgcgggcaggattctcactttaccctcctctctgtctcttccccgtgtcccc

SEQ ID NO: 262362 - DNA, 989 bp, Homo Sapiens
  misc_feature (105)..(162): n is a, c, g, or t
caagaggaatggcccccaattgaccaagttttaagcttaaaaatgggcctttaaaaaaaatgtgaaatttgaattgaccaggcttttctcccaatatctgctggnnnnnnnnnnnnnnnnnnnnnnnnnnnnnnnnnnnnnnnnnnnnnnnnnnnnnnnnnnggacaagccaggtctggacccagaaagattgggctggagagggaggtgttggtgttgggacagggtccctgcccgggccgctcgcgagaggagcgttcctgtgtgggctgctcactgtagggcaggccccgcccaagtcccggcgccagctcaataaataacatcttgtggttacagtgtcttgaaagtgtacctgggcacggtgcgaaggtggtgggaatgtgaagcctgtgggtgtgggcagagggctttcccggagtggaggccacagaggcctctggggagccttctcagtctggcctggtttatctgggacatggagctcagagaagaggctgctgggccagtgccagggttccccctctgggaggggacagaaggtctctcgtccagccttcttggacaaggtcagattcaagacgaggtggtcccatcgctgctctggggctggttgccagcttccttgtctggggcgcttccctccacctgtccttctgccccctcgagtgccagctcgcccatgtctccagccagcttcctcacgctcacagcctctgagtctccctggatgtcagggaccgcattccgacggcctgtccggtcacaggagatgaagtccgagtaggaggactcgacctccatcatgcctgtcgcatcgctcctcaggcctggtttaatttctttttcctgcttgcatctcttcagattttccactgttgactaatcagtacgggaattctgcggtctcgccgcctctccgtgcctgggccgccggtccgcagcgcctccccctcgtgccgaattcgccacccaggcctcgcttccta

SEQ ID NO: 262363 - DNA, 934 bp, Homo Sapiens
  misc_feature (819)..(827): n is a, c, g, or t
ccgcgcggaggaaagggaggaaaaaaagccaccctgcggccggggccggagctggagccgccgctgccgccgccgccgcggccgtctggagctcccccgcgcggacgatgcctgccgtgcccgcctggggctcggggcggtgaggcccggggcgcggggtagctatggcgacggcaagcgcggcccgcggcgccgcctgacaggtgtgggccccggcggcggcggcgtggagcagcatgtacgccaaggggggcaagggttcggccgtgccctccgacagccaggcccgcgagaagttggcgctggacgtttatgactacctgctgcacatcggtgcccaaaagccagcccagaccttcctgtctgaaatccgatgggagaagaacatcacgctgggggagccccctgggtccctgcatgcccgtccgcgcgctgttctgtgacttgcgctgcaagatccccgactactatgaggcccgttaccactccaagatggttgacgacgacagcatcctgggcgagctcaacgggcccctgcgggaggagatcgtcagcttcaactgccggaagctggcggcctccatgccgctgttcgccaacgctgaccccaacttcgtcacggccatgctgacccagctcacgttccaagtcttcccgccgggggactacatcctcccccgaacgcaccctccggtaagacgatgcactttatccatctcccgcgccggcccagcttgcctccctcaaggccacccccggataattacacttcccccgaagggttttctaactttcgcgggcagattcccgccctacctnnnnnnnnngcttctgcatcccattattttcctcccgtcctgggtccacaacgctctatcctgctcggtaaccttccctatccgctttcagacctgtgggcaaacacctctcagtc

SEQ ID NO: 262364 - DNA, 1481 bp, Homo Sapiens
  misc_feature (55)..(63): n is a, c, g, or t
  misc_feature (87)..(87): n is a, c, g, or t
  misc_feature (184)..(184): n is a, c, g, or t
gtactttccttccaaggaccctttcgttggaaaggttgtcccaccctcccagtcnnnnnnnnngagggcgggccattaggttttcgnccccgcacggttcgccgtgcggcgggccccgggtggagcagggcagatctcccccgaagttaggagccatcggacaggtttttatctcttgttgccnttagtgagcacgctgaccacgccgtgctggatgaagtacatcttcttcccgatgggtgccttcgcggatgatgtagtcacccggctggaagacctcgaacttgagcttggtcagcatggccgtgacgaagttggggtcagcgttggcgaacagcggcatggaggccaccagcttccggcagttgaagttgacgatctcctcccgcaggggcccgttgagctcgcccaggatgctgtcctcgtcaaacatcttgccctggtaacggtgctcatagtagtcgtggatcttctggcggaagtcagctggcagcttgtggaaggacatgtactgctccacctgcttgtacttctcctggtactggcgccgcgaggagtccagcgactggatgagggcagtggcgtggccgatgaacatggcgtagcaggtggcacccacaatcatgctgagcatggtcagccagatgtccgtcatgctctcgggcgcctgccggccgtacccgatgcacagcatgtggctcatggccttaaagagtgcgaaggaagtacagttcactccacgagtggttcacccatgccatgaatggacaccccagcagtgccgcgggaagtcctgcagcatgggcaccaggaactgcaggcagccctcccagtggcagagcagcagcatcatgctgatgagattgcagatcctcatcaccgcgctggccaggtcataggtcatgtggaagatctcctcccactgatggatgtagcggatcaggcgtgagaggcgcagcagccgcaggaggctgaggatcttggtgaagcgcacgatgcgcagggcgcgtgccgtcttgtagacctcggagtcaatgcccttctccacgataaggaagatgtagtccacggggatggaggacacgaagtccaccacgaaccacgtgcgcagatacttcttcttgatcttctcggggtccaggatgatctccgtgttgtcctcgatcacaatgccggtgcggaagttcaacaccaggtccatgaggaagaaggtgtccgagaccacgttgaacacgatccacggggcagtggtctcatccttgaagaaggtgatgcccactgggatgatgatgaggtttcccaccatgaacagcagcatggtgaagtcccagtagaacctgaagtcgctgtacgggtggatgatccaggcccccgccgacttgacgcgctcctgctcgcgctccacggccttctggctgccgaacatccgcagcgagaacttgttgacgcccggctgcaggagcgcgccgaactggcgctgc

SEQ ID NO: 262365 - DNA, 1534 bp, Homo Sapiens
ggggctggcgcgggcgggagctgcggcggatacccttgcgtgctgtggagaccctactctcttcgctgagaacggccgctagcggggactgaaggccgggagcccactcccgacccggggctagcgtgcgtccctagagtcgagcggggcaagggagccagtggccgccgacgggggaccgggaaacttttctgggctcctgggcgcgccctgtagccgcgctccatgctccggcagcggcccgaaacccagccccgccgctgacggcgcccgccgctccgggcagggcccatgccctgcgcgctccgggggtcgtaggctgccgccgagccggggctccggaagccggcgggggcgccgcggcccgtgcggggcgccaatggatcgccactcccgctacatcttcatctggctgcagctggagctctgcgccatggccgtgctgctcaccaaaggtgaaattcgatgctactgtgaagctgcccactgtggacccacctgcttatatgtgcaaatctgagctcaccgcctgcttctctaaacttcttgatcctcaaaactcaaattccccactcacccagggctgcctggactctcttgcaagcacgacagacatctgccaagccaaacaggcccgaaaccactctggcaccaccatacccacattggaatgctgtcatgaagacatgtgcaattacagagggctgcacgatgttctctctcctcccaggggtgaggcctcaggacaaggaaacaggtatcagcatgatggtagcagaaaccttatcaccaaggtgcaggagctgacttcttccaaagagttgtggttccgggcagcggtcattgccgtgcccattgctggagggctgattttagtgttgcttattatgttggccctgaggatgcttcgaagtgaaaataagaggctgcaggatcagcggcaacagatgctctcccgtttgcactacagctttcacggacaccattccaaaaaggggcaggttccaaagttagacttggaatccatggtcccggtcagtgggcacgagaactgctgtctgacctgtgataaaatgagacaagcagacctcagcaacgataagatcctctcgcttgttcactggggcatgtacagtgggcacgggaagctggaattcgtatgacggagtcttatctgaactacacttactgaacagcttgaaggccttttgagttctgctggacagggagcactttatctgaagacaaactcatttaatcatctttgagagacaaaatgacctctgcaaacagaatcttggatatttcttctgaaggattatttgcacagacttaaatacagttaaatgtgttatttgcttttaaaattataaaaagcaaagagaagactttgtacacactgtcaccagggttatttgcatccaagggagctggaattgagtacctaaataaacaaaaatgtgccctatgtaagcttctacatcttgatttattgtaaagatttaaaagaaatatatatattttgtctgaaaaa

SEQ ID NO: 262366 - DNA, 394 bp, Homo Sapiens
gaagtgagaaataagaggctgcaggatcagcggcaacagatgctctcccgtttgcactacagctttcacggacaccattccaaaaaggggcaggttgcaaagttagacttggaatgcatggtgccggtcagtgggcacgagaactgctgtctgacctgtgataaaatgagacaagcagacctcagcaacgataagatcctctcgcttgttcactggggcatgtacagtgggcacgggaagctgggaattcgtatgacggagctttattctgaactacacttactggaacagcttgaaggcctttttgagttctgctgggacagggagcacttttatgctggaaggacaaacttcattttaatccattcttttggaggaggaccaaaaatggacc

SEQ ID NO: 262367 - DNA, 1043 bp, Homo Sapiens
  misc_feature (447)..(464): n is a, c, g, or t
  misc_feature (468)..(468): n is a, c, g, or t
  misc_feature (470)..(471): n is a, c, g, or t
  misc_feature (476)..(476): n is a, c, g, or t
  misc_feature (1006)..(1006): n is a, c, g, or t
taggcgaggaggaaggaggtggagctggcagtggtggtggcagtgaggagggagcccgaggggcggaggtggaggacctccgggcccacatcgacaagctgacggggattctgcaggaggtgaagctgcagaacagcagcaaggaccgggagctgcaggccctgcgggaccgcatgctccgcatggagagggtcatccccctggcccaggatcatgaggatgagaatgaagaaggtggtgaggtcccctgggccccgcctgaaggatcagaggcagcagaggaggcagcccccagtgaccgcatgccgtcagcccggcccccctcgccgccactgtcaagctgggagcgggtgtcacggctcatggaggaggaccctgccttccgtcgtggtcgtcttcgctggctcaagcaggagcagctacggctgcagggactgcagggctctnnnnnnnnnnnnnnnnnnaaangnnaacgntaaggggactgaccccaggacctcgctgatccccaacgacgccagcggaagactgccccctcacaggtgcggcaccagcatccgcaagaatgctccgcgcacgctcagcaccgatcctacccattgctccgctacaacaaactaaccgtatcccgacctgtcccatgggcgaccatgggagatttgggggatccagcgcaagcgagcagacatagccacgagcacgcgggggcaaagggaccgtccacacctctctctgcgtctcgccccatccgacactgtacgaaagcggaactcgactcccagtgccccatcccggcaaatgacttccctctacgccctaacagatcaccgcgccagaatcagggtcgccaacaatcacaccgagactcacccatcagtctcccagccgccacgcgagtgaaggcgctagcccgatcgaccgacacgaacagatgacgagatgaagccacgcctgcttgaccctagcggtcacaccagtctatatattttcgaccatacacctaggncctagcacgctgaaactgaaacctggacgtctttctt

SEQ ID NO: 262368 - DNA, 711 bp, Homo Sapiens; identical to SEQ ID NO: 176221

SEQ ID NO: 262369 - DNA, 1148 bp, Homo Sapiens
  misc_feature (1043)..(1043): n is a, c, g, or t
ccggtgaaccggatgctctgtcagtctcctcctctgcgtcctcggccgcggcccgggtccctcgcaaagccgctgccatcccggagggcccagccagcgggctcccggaggctggccgggcaggcgtggtgcgcggtaggagctgggcgcgcacggctaccgcgcgtggaggagacactgccctgccgcgatgggggcccggggcgctccttcacgccgtaggcaagcggggcggcggctgcggtacctgcccaccgggagctttcccttccttctcctgctgctgctgctctgcatccagctcgggggaggacagaagaaaaaggagaatcttttagctgaaaaagtaaagcagctgatggaatggagttccagacgctcaatcttccgaatgaatggtgataaattccgaaaatttataaaggcaccacctcgaaactattccatgattgttatgttcactgctcttcagcctcagcggcagtgttctgtgtgcaggcaagctaatgaagaatatcaaatactggcgaactcctggcgctattcatctgctttttgtaacaagctcttcttcagtatggtggactatgatgaggggacagacgtttttcagcagctcaacatgaactctgctcctacattcatgcattttcctccaaaaggcagacctaagagagctgatacttttgacctccaaagaattggatttgcagctgagcaactagcaaagtggattgctgacagaacggatgttcatattcgggttttcagaccacccaactactctggtaccattgcctttggccctgttagtgtcccttgttggaagtttgctttatttaagaaggaacaacttggagttcatctataacaagactggttgggccatggtgtctctgtgtatagtctttgctatgacttctggccagatgtggaaccatatccgtggacctccatatgctcataagaacccacacaatggacaagtgagctacattcatgggagcagccaggctcagtttgtggcagaatcacacattatntctggtactgaatgccgctataacccatgggggaatggttccttcctaaatgaaagcagcaaacttccgaaagggcgaatgtttggaaaaaagaccggataattt

SEQ ID NO: 262370 - DNA, 1340 bp, Homo Sapiens
gccaatgtctctacccacattgtcgcctttgacgccgtcctgtttgagccaagccgccacgccgcctacatccttctgacaggcccggcagactcagaggcacccggcctggtctctgtgatcaagcacaaggtgcgggaccttgtcccaagcagcagggtggtccgcctgggtgagggtgggccagacagtgaccaagccatcagggaccggttctcccggctgcggtaccagagtgaggcgtagaggcacgccagccagagcctgtggagagactccgcctgctgacactaaacgtcctgggaagtgggcccttccctgggtctctgcactgactcccccactcctgaccctggtgatggtcgccactgggcagcagcagcctttaccagtcctccatgatcacacccagggacctgcatgggtgaggggacaccctgggcctctctcccgcccagcatcctccctgagtccccacacagggcctcactctgcaccccaccaggtcccgctcacaccaggcagccttcatagtggtctccctggccaccttgggcagagctgggtcatgcagcacccatccttacccggtgccctctccttgccagcttctccccaggccagagcggccatcgcgtagaaagaaccaggtgtccccgggacaggccgtcccccaccccatcctgtagaagtccattccccttttccctcctgtgctctgtcccccaaggagtcatggaactcagggtactgggcctcaacgggaacctgagacagtccagcttcgcagcccttcccggagctacagggggatcctctagcatggggggtgtgacttggttcctttgaccaggtcctgtgaggaagcctggagcaagggtctccccaagcagaatgggtggggcctgctctgaagctgaacccgtggccgctcaaaggtgtccttaatggtgttgcagctgtctactggctgcatgtgctgtgaatatcccaaggaactggctgtggaatgcgtgtttgggtcagtctgtgccctctcagtagacactggagctgctctgtccctgaagaggccccgtgccccaggcatggcaagcgcctgcctcttcccttccggtgctcacacgcccacgccgtgccacccgatgcaggactcacctctgtgccttgctgctcctgaggccaagggcagccatggtgctctgtactgctcgggccgcccaggtcacagagcctgagcttcgtagccaaagcagcctgatgacccacccaccaaggaagaaagcagaataaacatttttgcactgcctgaaaaaccccggtggtcaggcgtgagccta

SEQ ID NO: 262371 - DNA, 1353 bp, Homo Sapiens
  misc_feature (140)..(140): n is a, c, g, or t
cccctggctggagagaacttcttccttctgggcctccagggacagggaactggcgggatgtcgcaagcggacctgggtcctccccaatccctggagtctggcctgccctggctcggggccctgtgcgtcctccatgcctnccggctcctgcccttcctcttcctcaaagtagcggccgagcaggtccttgagcctggtgctgcgctcctcatcctgctgctccaggcagggcccgcagctggggaaggctacgctgtgaaaggcctggaaggttctgcgcagacgggccagggcctggcgctcccgggcctgcacacggccatagaggaagtcacatatctggtccttctcctcagcggtcaggtcccccgggctgcgaaggtggaaggccagctcactgaactccacaagcacccctgtcccacgccgcacacctgtcctgggctcgtggtcccactgcagctggcagagagcctgccgcacagaggccagctcccagcccatggagtccaccagcttgaccatgtcaaactccacggagctgctgccttgccctgggtcctcaggcagctgctgggccaagcacacagccaaagggggacacctgtgggccagggcctggagctgggcaggggcccccagggcagttcagacgccaaggggtataggtggtcgccagcagctccacccagtggtgtgggtgcagctccaggtagcacagcaaaagtctcgatggcctcctccggcatgtccaaaccctgtacggtaagctgtattgggagtgcccgctcatggcccatgcagacccttctgggtcctggggctgcttggtggctaagctgctcagcctcttgaggggggtacttggggcacaggcctctccccacccacggccccttcttgctccgagggcggcctggtgcaggtgcaggtgcaggctgggaacacgcgctgtaccagcctcttcacagccaggaagtccgtgctgtcggcgtgcacatgtctgcgcagctctcgcaggtcttcgccctggggctgcaggaagaggtggcagtgggcaggctgcccgtcacgcccggcccggcccacggcctgcacgtagctctcgaagcttgggggcagccccagatgcagcacagcccgcacatctggccggtccagccccatcccaaaggccaccgtggccaccaccacccgcaactggccctgcatgaaggctcgctgtacccgccgccgttcccggctgcacatgcccgcgtggtaggcctcggctgtggttttgggggcacgacctccagaccctgggacccaggctgcgtgcaggcaggttcctcgtgccgaattcgccaccca

SEQ ID NO: 262372 - DNA, 451 bp, Homo Sapiens
tctctacctggtgtggctgtgctctgcagtgagccacatgagcctgaatatactgttggggttccctggttggattccagtgtgccaagggtaaacaggagtatcccgaggtactcggtcacacccagcatgctgctgcctcagggtgtgcatgacctgtctctaaaaaagcccgattatttttaaaggcgatttagaaaggctgaattgatgagcaggaatacagaggtgtgatttgcctctcccacctctgtgctccattcttcactgtgatcattttctcattaggtttaagaaatacaagcaagctgggagccattccaattctttccgcttatccaacggccgcactgaggatgtgggtaaggcattccttaatgtcatggggaaccttcacaaggaaggaaatcaagaaattaggagtttctccatccttttaaaagaataagac

SEQ ID NO: 262373 - DNA, 1423 bp, Homo Sapiens
ttcggaaagcgcccgcaggagctggctcctggtcttccaggttcttttccgcactttcttgcgcatgtagaagatggggcagtccccggctggtgcagatgacgtcttcgtgcaaggctgccctggcagcgctggcactgcgtccagaggcgcgagaagcgctcctccaggggcattcagatgggataccctggtggctgagcactgtgcggcagccaatgcagcagttgcggcgtttggcgaaggccaggaggccgcccaccttgccccgtgagcaccgtcttgcagcgcgtgtggtccccccgcagtagcacagcctcggcacggccctcgcccaggatgggctcgaagatgcgcaggaggggcttggccagctgctgctccaggtagtactgcgtgtcaatgggcaggctgtgctccagcacgaacagcgggtcctccgacttcatgtaggcggccacaccctttggcgggcactgatgatcacgtaggggacgcggtcgcccaggctgggcgcactcccggggtcccgcttcctcatcctctcggccagctccacgtgggcctgcttgccggcatagtcggaggccacgcgggtcagctccttggtgatgaccagctgggagatatcgatgcggttgcacagcaggtccgagatgacgtcctgtgcgtgagccaccgcgccctcagggtctcggtcgatgagcaggcggcgcagtgaggcagtgaccaggttggccacgagggggcagttgtccctgcgcacggcctccaggcccttgcagtccatgcggtcgtgggcgtcgggccgggaggagaagagcaggcccgcgtagcgcttcttgctgataagcaggtatgggaagtagaccttctcaaactccagccggatgggcgacgggaagtgacctgacacccagtccgcgccctcccgccccagggccatcgcctcagccaccgaggacacgccgaatcggcacatgacggagtcagtgtcaccatacaccaccttggcactggtgctgtagccattctccactgtgtacttagactccaccagctgcttggttttctcgatcatctgacgtccgaaccccgtgacgctctgtgagatctccaggcacggcaacttgcccacctgggcgccagtgaagccgtatacggagttggcgctcaccttcagcgccagctgccgtccatccaggacctggcgccggagggggtctgtctccttggccagctcaggccttggccctcttccgggcactgagcaggttctccaggatctggggcagcagccccttccgcactgaggtcttcacaaactcgtccccggtgggggtcctgatgaactgatcctcagtcaggcccagtttctgcgacgcgtgggtcgacgatatcccgaaattccggaccggtacca

SEQ ID NO: 262374 - DNA, 1636 bp, Homo Sapiens
  misc_feature (1509)..(1523): n is a, c, g, or t
ggcgagagattttgtggagcgcatttaaggggtttttgttgtgactgctgccttgtatatatttattttctttcttggaactgggcctcgccctcctcccactgacatgatggcccagtccaaggccaatggctcgcactatgcgctgaccgccatcggcctggggatgctggtccttggggtgatcatggccatgtggaacctggtacccggcttcagcgcggccgagaagccaacagctcagggcagcaacaagaccgaggtgggtggcggcatcctcaagagcaagaccttctctgtggcctacgtgctggtcggggccggggtgatgctgctgctgctttctatctgcctgagtatcagggataagaggaagcagcggcagggcgaggacctggcccatgtccagcacccgacaggcgctgggcctcacgcccaggaggaagacagccaggaggaagaagaggaggatgaggaggctgcctcaaggtactatgttcccagctacgaggaagtgatgaacacaaactactcagaagcaaggggagaggagcagaacccgaggttgagcatctctctcccgtcctatgagtcactgacggggctcgacgagaccacccccacatccaccagggctgacgtggaggccagccctgggaacccccctgacaggcagaactctaagttggccaaacgactgaaaccactgaaagttcgaaggattaaatctgaaaagcttcacctcaaagactttaggatcaacctcccagacaaaaacgtccctcccccctcgatagagcctttgactcccccaccgcaggtatgatgaagtcccaggagaagggcccccgacacccggccgcccgactgaatggccccacttgagccacgctccctcctgtctctcacacctttcacccccaagactctaacaaagccacatgagccacagttgagaagcggaggggccaagctgtgcatggacgccatttggatggcggcgggcggggggggattctctgtatcaggagtgactttgttgccccacacagcctcctagcttgcaggtgctttggaaagagatgctgccttggagctggtgaatctgtggaccacattcaagggtgtggcacaggcatcttcccatccttttcactccgaatcgctggcgacacattctcctttccagctaggaaagagttcctcgcggctggtttagattgtggttgtttgttttgcttctactaagactgttttgtttcaaaaaggaaacaagttttgtgtttgctgtctacgctggagtcctgaactgtgggtagaaaacacgacctggctttgtagaaaggacacagggctgttttatgaactaagcggtgaggctcaggtggcggctctcgcagagcccctgatgctgttgttctttgagggcttaaggcctgatgaacgtaggcacgtgatgcataatagtcttcaatggtacacttaactagtctcttctgtgtaacagcnnnnnnnnnnnnnnncggaagacgaaggaaacctgtggaaatgtccttttggaaattgccttgcagggaggcttttggtactaccctttttttctttgtccaacacaacaacacaagaaaaccaaacg

SEQ ID NO: 262375 - DNA, 900 bp, Homo Sapiens
gggggccctcccgacccgggcttcctgcgtccgcagcgagcagccctctatatccttgcgggacaaagcccagctcaagggtgtgcggtcagaccccctgcagcagtgggagctggtgcccattgaggtattcgaggcacggcaggtgaaggctagcttcaagaagctgctgaaagcatgtgtcccaggctgccccgctgctgagcccagcccagcctccttcctgcgctcactggaggactcagagtggctgatccagatccacaagctgctgcaggtgtctgtgctggtggtggagctcctggattcaggctcctccgtgctggtgggcctggaggatggctgggacatcaccacccaggtggtatccttggtgcagcctgctctcgagaccccttctaccgcacgctggagggctttcgcctgctggtggagaaggagtggctgtccttcggccatcgcttcagccaccgtggagctcacaccctggccgggcagagcagcggcttcacacccgtcttcctgcagttcctggactgcgtacaccacgtccacctgcagttccccatggagtttgagttcagccagttctacctcaagatcctcggctaccaccactctgtcccgccgtttccggaccttgcctgctcgactctgactatgagcgcattgagctggggctgctgtaatgaggagaaggcggaacgcaggggccaggtgccgtgcaggtctgtgtgggagtatgtggcccggcttgaccacaggacgcctgaggtcccacattacatgtatgcccccgcatgaccctgaggtcccaccctgcccttgggcaagagtttcatacccgaggggagaggtgaattcccaccttctaaagaaaacaaagggcccccgtggggg

SEQ ID NO: 262376 - DNA, 990 bp, Homo Sapiens; identical to SEQ ID NO: 98095

SEQ ID NO: 262377 - DNA, 910 bp, Homo Sapiens
  misc_feature (50)..(51): n is a, c, g, or t
  misc_feature (85)..(164): n is a, c, g, or t
  misc_feature (183)..(321): n is a, c, g, or t
  misc_feature (344)..(364): n is a, c, g, or t
aaaaggggtaaaattataaaaagggcaatttatttaaaaaaaccatgagnncccaggtgcagtggctcacgcccctgtaacttgnnnnnnnnnnnnnnnnnnnnnnnnnnnnnnnnnnnnnnnnnnnnnnnnnnnnnnnnnnnnnnnnnnnnnnnnnnnnnnnnctctgtctcttactaaaannnnnnnnnnnnnnnnnnnnnnnnnnnnnnnnnnnnnnnnnnnnnnnnnnnnnnnnnnnnnnnnnnnnnnnnnnnnnnnnnnnnnnnnnnnnnnnnnnnnnnnnnnnnnnnnnnnnnnnnnnnnnnnnnnnnnnnnnnntgacagagtgagactctgtatcnnnnnnnnnnnnnnnnnnnnncatgaatcttgattcagatataatttttctttcaacaagttctgaatgttttaaaattaataaatcacaattctgtattacttttaagattgtttaaaaatgacacatttcaaaattaaccaaagtatatttctgttagaggttagtttatccacgtaacttaagaataaaccacagcgtagctcccttaaccaaagagccaggttttaatgacaagtcagttgccagcaatggacgtgcaggtaactatcgaagaagtcgcaactacaaatcccaaactgcttctatcaatggaaaagccctttgttgagtcacaagcctgaaacgaggcgttggcacatagtcagtgaggatggtctttgacttaggagggaagtgcctctgagtacatgaggatcacagtcttctcatctcgttggttttctatttcattggtagcatcttctttatcataatccatccaactgtttacaaagaatggtaaaatttggaactccaggtggcactgcagctttctgccagaaataaaccagtttctataattca

SEQ ID NO: 262378 - DNA, 1368 bp, Homo Sapiens
  misc_feature (745)..(745): n is a, c, g, or t
  misc_feature (787)..(787): n is a, c, g, or t
  misc_feature (1032)..(1125): n is a, c, g, or t
  misc_feature (1129)..(1129): n is a, c, g, or t
  misc_feature (1132)..(1133): n is a, c, g, or t
  misc_feature (1150)..(1166): n is a, c, g, or t
  misc_feature (1169)..(1170): n is a, c, g, or t
ggcctgggtggcgaattcggcacgaggatctgtcgaagagccctgacatgcagggaagccaccagctgctcgtcgtatcagaggagcagttcaaggtgttcacgctgcccaaggtgagtgccaagctgaagttgaagctgacggccctggagggctcaagagtgcggcgggtcagcgtggcccacttcggcagtcgtcgagccgaggactacggggagcaccacctggcagtccttaccaacctgggcgacatccaggtggtctcgctgcccctgctcaagccccaggtgcgctacagctgcatccgccgggaggacgtcagtggcatcgcctcctgcgtcttcaccaaatatggccaaggcttctacctgatctcaccctcggagtttgagcgcttctctctctccaccaagtggctggtggagccccggtgtctggtggattcagcagaaaccaagaaccaccgccctggtaacggtgcgggccccaagaaggccccgagccgagccaggaactcagggactcagagtgatggcgaggagaagcagcccggcctggtgatggagcgcgctctgctcagtgatgagagagtcctgaaggaaatccagagcacactggagggagaccgcgggagcgggcaactggcgctcacatccagcccccggggggtgcaccctcagcaatggcggagagtgagtggctgagcgtccaggctgcgcgatgagcacacactactactgatggncctttcgggggtccctgccccaaccggaaaggccggtgcaanaagggccccgccagggggctgggggcatcccggcttccacaatgcagctgctctgggcctccgggagaggagagaccccagtcccctgggctgcccttcccgggcctcgtctgtctgggtcctttggtcaatgttgcacagtttttattgctcccatccctttttgtagtgggctgggttttaagttataaatgttaactgcctctgggtgaaaaagtttttaataaacacctattacctcttgnnnnnnnnnnnnnnnnnnnnnnnnnnnnnnnnnnnnnnnnnnnnnnnnnnnnnnnnnnnnnnnnnnnnnnnnnnnnnnnnnnnnnnnnnnnnnncatntcnntagcgcccccggacccnnnnnnnnnnnnnnnnnganngttggggggcccccaggaccaccagggcacagggaaaacgcttgtattttgggcaatagaaaaacgcggggagggaaaccaagtcttgcataataaaacccagaagggccccccgagggacaaataaggggttttttatcacaaggcagtacaagaggggccctggaaattaaatttgggccctaaacccttgcagtt

SEQ ID NO: 262379 - DNA, 1648 bp, Homo Sapiens
  misc_feature (1452)..(1452): n is a, c, g, or t
  misc_feature (1581)..(1581): n is a, c, g, or t
  misc_feature (1601)..(1601): n is a, c, g, or t
  misc_feature (1613)..(1613): n is a, c, g, or t
cgctctgaggcgctactgaggccgcggagccggactgcggttggggcgggaagagccggggccgtggctgacatggagcagccctgctgctgaggccgcgccctccccgccctgaggtgggggcccaccaggatgagcaagctgcccagggagctgacccgagacttggagcgcagcctgcctgccgtggcctccctgggctcctcactgtcccacagccagagcctctcctcgcacctccttccgccgcctgagaagcgaagggccatctctgatgtccgccgcaccttctgtctcttcgtcaccttcgacctgctcttcatctccctgctctggatcatcgaactgaataccaacacaggcatccgtaagaacttggagcaggagatcatccagtacaactttaaaacttccttcttcgacatctttgtcctggccttcttccgcttctctggactgctcctaggctatgccgtgctgcagctccggcactggtgggtgattgcggtcacgacgctggtgtccagtgcattcctcattgtcaaggtcatcctctctgagctgctcagcaaaggggcatttggctacctgctccccatcgtctcttttgtcctcgcctggttggagacctggttccttgacttcaaagtcctaccccaggaagctgaagaggagcgatggtatcttgccgcccaggttgctgttgcccgtggacccctgctgttctccggtgctctgtccgagggacagttctattcacccccagaatcctttgcagggtctgacaatgaatcagatgaagaagttgctggggaagaaaagtttctctgctcaggagcgggagtacatccgccagggggaaggaggccaacggcagtgggtggaccagatcttggcccaggaaagagaactggaaagtttgagaagaataatgaatatggggacaccgtgtacaccattgaagttccctttcacggcaagacgtttatcctgaagaccttcctgccctgtcctgcggagctcgtgtaccaggaggtgatcctgcagcccgagaagatggtgctgtggaacaagacagtgactgcctgccagatcctgcagcgagtggaagacaacaccctcatctcctatgacgtgtctgcaggggctgccgggcggcgtggtctccccaagggacttcgtgaatgtccggcgcattgagcggcgcagggaccgatacttgtcatcagggatcgccacctcacacagtgccaagcccccgacgcacaaatatgtccggggagagaatggccctgggggcttcatcgtgctcaagtcggccagtaacccccgtgtttgcacctttgtctggattcttaatacagatctcaagggccgcctgccccggtacctcatccaccagagcctcgcggccaccatgtttgaatttgcctttcacctgcgacagcgcantcagcgagctgggggcccgggcgtgactgtgccccctcccaccctgcgggccagggtcctgtcgccaccacttccagagccagaaagggtgccagttgggcttcgcactgcccacatggggacctgggncccagggtgttcaacccttncaccgaggccanggagttcctggggagtttgacttgacttgaggcag

SEQ ID NO: 262380 - DNA, 1275 bp, Homo Sapiens
  misc_feature (1005)..(1005): n is a, c, g, or t
  misc_feature (1033)..(1038): n is a, c, g, or t
  misc_feature (1040)..(1088): n is a, c, g, or t
  misc_feature (1090)..(1097): n is a, c, g, or t
  misc_feature (1099)..(1120): n is a, c, g, or t
  misc_feature (1122)..(1122): n is a, c, g, or t
  misc_feature (1127)..(1127): n is a, c, g, or t
aggccgccgcgcgcacacaccgggcccggctcctgagggcgccagcgcggccccggggagcgcgaggagccggcgaagcgcgcggcctgccgttggcggcctggtccgcagcgccctgcgcccacccgccccggacgtggggcccaagcccccgtgaagatggtgtcctggatgatctccagagccgtggtgctggtgtttggaatgctttatcctgcatattattcatacaaagctgtgaaaacaaaaaacgtgaaggaatatgttcgatggatgatgtactggattgtttttgctctctatactgtgattgaaacagtagccgatcaaacagttgcttggtttcccctgtactatgagctgaagattgcttttgtcatatggctgctttctccctataccaaaggagcaagtttaatatatagaaaattccttcatccacttctttcttcaaaggaaagggagattgatgattatattgtacaagcaaaggaacgaggctatgaaaccatggtaaactttggacggcaaggtttaaaccttgcagctactgctgctgttactgcagcagtaaagagccaaggagcaataactgaacgtttaagaagcttcagtatgcatgatttaacaactatccaaggtgatgagcctgtgggacaaagaccataccaacctctaccagaagcaaaaaagaaaagtaaaccagccccccagtgaatcagcaggttatggaattccacttgaaagacggagatgagaaaacagatgaagaagcagaggggccatattcagataatgagatgttaacacacaaagggcttcgaagatcgcaaagcatgaaatctgtgaaaaccaccaaaggccgcaaagaggtgcgggtacgggtcactaaaatacaaagtgaagaaacgaccacaagtgtatttttagtcatctacacgtcaaatatcccaagacagataatgctaaatacatcgacttcatcttctaacatgatatattcangatttacacattaaaatgattatttaannnnnnannnnnnnnnnnnnnnnnnnnnnnnnnnnnnnnnnnnnnnnnnnnnnnnnannnnnnnnannnnnnnnnnnnnnnnnnnnnnanttgtngggcggcctcgggccctaaaaaaatttttcaaaaacatttcttttgggccccggggccccatagggggaaagggaaaagggggcctaaactgttttccccaaaaagaaaacccgggccaaaaacaaaagggctggggattccccccac

SEQ ID NO: 262381 - DNA, 920 bp, Homo Sapiens
ggagctgcctgggttgcgctgccggccacgtccccgcgccgggcctcaggctccttcctactgtccgagggccaccaggccgccgggggcctgctgcgcccggatgcgtctgttactagagtggagagtctaccttcgtctcacatgtgccacaaaggatggcatggcccgggagtgccccaccacgtggctttcaccccctgcaaagccagacttcgcccagcgacacagtgtcaagcccacagctctccaaggaggaagatggtccaggctgggagcatccccttagcagcagcctctgatcccttggccaagcaggagggaaccattagcagcctgaggagctggctggctgggagcctcggggaccgcccagccttgctcccagatcacccacaagatgtggacagctcttgtgctcatttggattttctccttgtccttatctgaaagccatgcggcatccaacgatccacgcaactttgtccctaacaaaatgtggaagggattagtcaagaggaatgcatctgtggaaacagttgataataaaacgtctgaggatgtaaccatggcagcagcttctcctgtcacattgaccaaagggacttcggcagcccacctcaactctatggaagtcacaacagaggacacaagcaggacagatgtgagtgaaccagcaacttcaggaggtgcagctgatggtgtgacctccattgctcccacggctgtggcctccagtacgactgcggcctccattacgactgcggcctccagtatgactgtggcctccagtgctcccacgactgcagcctcccagtacaactgtgggcctccattgctcccacgactacagcctccagaatgactgcgggctccaacactcccatgaaaatttgaactccccgcggccacgtccactt

SEQ ID NO: 262382 - DNA, 1369 bp, Homo Sapiens
tctgtagccgcagctgcgggtccgggattcccagccatggcagattcctccgggcagcaggctcctgactacaggtccattctgagcattagtgacgaggcagccagggcacaagccctgaacgagcacctcagcacgcgtagctatgtccaggggtactcactgtcccaggcagacgtggacgcgttcaggcagctctcggccccgcccgctgacccccagctcttccacgtggctcggtggttcaggcacatagaagcgctcctgggtagcccctgtggcaaaggccagccctgcaggctccaagcaagcaaaggccggcgtgtgcagccccagtggtcccctcctgctgggacccagccatgcagactccacctttacaacagcctcaccaggaacaaggaagtgttcatacctcaagatgggaaaaaggtgacgtggtattgctgtgggccaaccgtctatgacgcatctcacatggggcacgccaggtcctacatctcttttgatatcttgagaagagtgttgaaggattacttcaaatttgatgtcttttattgcatgaacattacggatattgatgacaagatcatcaagagggcccggcagaaccacctgttcgagcagtatcgggagaagaggcctgaagcggcacagctccttggaggatgttcaggccgccctgaagccattttcagtaaaattaaatgagaccacggatcccgataaaaagcagatgctcgaacggattcagcacgcagtgcagcttgccacagagccacttgagaaagctgtgcagtccagactcacggggagaggaagtcaacagctgtgtggaggtgttgctggaagaagccaaggatttgctctctgactggctggattctacacttggctgtgatgtcactgacaattccatcttctccaagctgcccaagttctgggagggggacttccacagagacatggaagctctgaatggtctccctccagatgtcttaacccgggttagtgagtatgtgccagaaattgtgaactttgtccagaagattggtggacaacggttacggctatgtcctccaatggggcctgcctacttttgataccaccggaggtttggctcctagcggagaagcccttcctatggggaaacctggtgccctggagggccggtttggaaaatacaaaaagccccctttccaaaaaggggggaaagggggaccttgtgagcattcttcttggaaaaacccgcccttgaatgagaaaaaaccgcttttcccccccaacggaaatttttgccctttatggggaaaagggccccttctaaaaccccccgggaaaaaacaccggtccctggtggccccggggt

SEQ ID NO: 262383 - DNA, 1431 bp, Homo Sapiens
  misc_feature (103)..(103): n is a, c, g, or t
  misc_feature (212)..(212): n is a, c, g, or t
  misc_feature (390)..(390): n is a, c, g, or t
  misc_feature (393)..(393): n is a, c, g, or t
  misc_feature (397)..(413): n is a, c, g, or t
  misc_feature (416)..(418): n is a, c, g, or t
  misc_feature (422)..(430): n is a, c, g, or t
  misc_feature (432)..(436): n is a, c, g, or t
  misc_feature (438)..(441): n is a, c, g, or t
  misc_feature (444)..(447): n is a, c, g, or t
  misc_feature (450)..(450): n is a, c, g, or t
  misc_feature (452)..(512): n is a, c, g, or t
tcccccccgcttctccccctcgttgtggcggcagggtgttctctccttttaagaagtgggaggagggagaaaaggggcgccccccccttttcctctttttttnaaaggggggtttgtggaggggagagaaaaaacaaggagaaggggggagcccgccccccctccgctaggaggtaacctccccccgagccgcatgtgtgtgtgtgcctctngcccgaagacaaaataacacttccccttctccttttgcctcaacacgatgtgcattccccccccttgggaggggaggagccccccaccctaggtttttggttgggggtttcccccgcgggggccccccaattcttcccaacacaaccagggtttcccctcccaagaaaagcccttttnggncccnnnnnnnnnnnnnnnnnttnnntttnnnnnnnnntnnnnncnnnnccnnnnaangnnnnnnnnnnnnnnnnnnnnnnnnnnnnnnnnnnnnnnnnnnnnnnnnnnnnnnnnnnnnngctctcccgagatgtgcaagcatctctcaggggccttgactcttagccggccctcattctgtgcctcatccttgggctccttgaccacctcctctttgagggcttctccctccttggtggcttcttccttggcccgcctcctccttctcaggttcaggtggggaccacgaccttttcagggaaggctcagtagcatcttataaactctatagccaaaatccctctggagcatctccagaaacagctcggccagcaccatcacctcaaaagagatcctttcctttggcctccgatcctccacaatcccatggaggggacagggtttacacagccagggcgtgcgatgacagcaggttctagggggggtggaggggcctctgggagatcagtgtccgtttcctgctgtgtggtggcctctggagtttctgcgttccgtctagaagtgtctgctgcttgctccaaggcatcaggtgcctgttcagtaggctccgtttccccttgtgcctcctgggttgggggagctgcctctgcagctttctgctggcacagggcctcccactcctccaaagtaggcatgatggtccagacatccggcaggtacaccaccactgtctgaagccgccgggggggtcccggctgcaggtactgaaactcggcaaagcgccaccacttggtacagccgctcaaatcaatgccagtctgggcctgcgcacagcggatggcggtacgcaccagcacctgcgggtcagcctgggggtcgaggccatccagggaaggagaccattcacccccaaccagcactgcctcctcttctttcctgcccagcaaaaacttaatctgcttcagaggatgctctggcgtctcccttggctcagccagtcatccacaaagagccctcgtgccgaattcgccacccagc

SEQ ID NO: 262384 - DNA, 501 bp, Homo Sapiens
ttggataatggaaagttgactagagctacaaaatctgtttcaaaataaaagatctgctcaaacaagaatgtgatgatcacttgctgtattgtacaacaaagtcaaactgctgttagactcaggtgacagtccaaatgttggaggctgtgttgggatgagttgttacaaagcctctttcattcttcccatgccatgtccaggagttcttctctgttaaacctgaagagatgccagccctcctcagaggaaaggtctaaagcccctcgactagtatagtagttgatagaagcctggttccaaatgacgacaagaaagtgcatgcagttacattgagttgtgatggctatctgtttaaaaacaaacaagcaaatattactttcatttgaaagtataatcttcgttaacacatatattttattgaaggtctactctatgcaagacactatgtgtgaataatacttccaaatatagtagttaccttttgaacttttctatagctgt

SEQ ID NO: 262385 - DNA, 1537 bp, Homo Sapiens
  misc_feature (1379)..(1379): n is a, c, g, or t
ggggcagtgggaagctcgcagcagctggggaggagccaaagcctcggcgctcacctaagccgcagggagatacacccaactgggagatgaggaaacagcaacccagagaggagaactaacccacacaggatcatttcgcgaaggagcaaggctgaagaaccagacctggactttcttaggacaaacttactgcagcttgaaggagccaaccatggatttgaggcgtgtgaaggaatatttctcctggctctactatcaataccaaatcattagctgctgtgctgttttagagccctgggagcgatctatgtttaacaccatcttactaaccattattgctatggtggtatacactgcctatgtctttattccaatccacattcgcctggcttgggaatttttctcaaaaatatgtggatatcacagtacaatttctaattgatcctgttcacattcagtgaaatggcattgcatatttatatgttgcttacagcttattgatttaggtaactattgtgtcttccttcactatctgacctgaaaagcactctcttctctatgcactcttatattctgcctttctgcctggagtttgaaatacatgtctctttagtttcttttgcacatgctacattgtgctttagaccggagataatacagtgactttacctcacaaatcatattctgtcaacacaaatctatgaatttagtttatttaaaatcagaacaatttcctacaaaatttttctggaaaatagactcctaacagacctaccagaatcatgcttaaagtgctcccttgacacttattctatactgaaggataaaattttaaaaaatctttataggctactgtcagaagtatcctatccttgtttacgatgtataaaaagatgtgaataaattatatggaccccctaagtcttattttctagtaaactgatgatactggaaattcttttacttcaaatgcaaaagaataagctggaggcaattatttcctttcatacagagttcatgaattgttttaaatgcttcttaaagtctggctttataaccgtttaaaatcaacaatgttgattttagataaccaaggaagtattataatacaaaataattttaagtgtaagaaactaaagtataatcaaagtaaattcagttattgtatttgtggtgttgccttgccttgcatgatgctgggggaaaaagagaaaagaaatggttttctttttgtactttcattcagtgtagagggaaaaaagcatgtattgggccaccggaagacaagctaataaataggctgggagtaatattctaccagcaggaactcaacagctccagttaaatgctttgatataggggctcctttgcagagcccnaacaagatttattaaatttccttcaaactgtttatcttttaaaacaaatataagggttttaattatactggctgaaaccaaaatggggaatgcccaaaagactaatgttttttgcaggtttttgccttttccctccccaataaaattatttaagggga

SEQ ID NO: 262386 - DNA, 779 bp, Homo Sapiens
  misc_feature (411)..(411): n is a, c, g, or t
  misc_feature (706)..(706): n is a, c, g, or t
gagtctacacgtatcatgctggacaagtgggaagagaaagctcgggagggtaagtcctttgacatcttctgcgatgtgggtcacatggcgctgaacacactcatgaagtgcacctttggaagaggagacaccggcctgggccacagcagggacagcagctactaccttgcagtcagcgatctcactctgttgatgcagcagcgccttgtgtccttccagtaccataatgacttcatctactggctcaccccacatggccgccgcttcctgcgggcctgccaggtggcccatgaccatacagaccaggtcatcagggagcggaaggcagccctgcaggatgagaaagtgcggaagaagatccagaaccggaagcacctggacttcctggacattctccctgggtgcccgggnatgaagatgacatcaaactgtcagatgcagacctccgggctgaagtggacacattcatgtttgaaggccatgacaccaccaccagtggtatctcctggtttctctactgcatggccctgtaccctgagcaccagcatcgttgtaaagaggaggtccgcgagatcctagggggaccagggacttcttccagtgggatgatctggggcaaaatgacttatctgacccatggtgcatccagggagagccttcccgcctctaccccaccctgtggcccccagggtgttacccgcccagnctcagccaagccctgtccacccttttgtggggaatggccggggtccttctaccctggcagggaaagcccctga

SEQ ID NO: 262387 - DNA, 1175 bp, Homo Sapiens
  misc_feature (32)..(32): n is a, c, g, or t
aggcaagtggttcttcctggggcccggccgantcctcaggatgcagagaagtcatgtagacccaccagccccaccttgggggaggcgtgccagcctgtgtcaggtgtgcttgtgtattgctgtgctgtcatggggccctctccttgagagccgcctctctgttcttcctgtagtatattcccctttgaaccaccctttcctgtctgaattctactttgcctcctttctcttcctcctctttgcatggtttgtgtgtatagacagtggaacctgaggatggggatctgctcagcctatcttcggggcaattgctgagcttcaggatgggctattaatgtgggataagcccaggtgcaaggggaggagggcaggctgggagcagagcgaagaatgcccatggccctttattccttcttccctcggtccacgaacaggaagaggctgaggccatgctgggcagggtctggatgcccactttccatgcagcagcatttcattgctcaaaaccatccttcctttcccttcgcccttgtttcccacattcccttcgtcctgcccaagggcgggacttgaagagctggaagaaagcagtcagtaccctcccaacggcccccctcgaaggtctccactcttcctctgggctcctccttggcctaatgcagggggtcaccgctggagaagaaccaccactgtcctcgatgtgtcccaagcctgggagcgaatccgtcctcttggctctcccagccctatcacaggaatcattccctgggtttctgtccctctgaggctcaccaggtgtagttggccttgttctttgggggtattagcccttctactttctttctcacccaccctgtaccctcttctgtgtgtctttgctatccccctttcctcccaccacccatgtgcatgagcaaatgtgcaacaaaaccctgggactttgcagtcaaatgaagctgagcttcccacatcccgttcttcggtttgccatgagacgatgtggggtttccactgtgtgtctgtcatcacctctttgtctttttttcctaaccctgatctcatacttgtatagagtaataacaacagttgtacttccaccaaaggcatgtggcatatttaccaatgtcatgtattctgaacaaaggcaaaaaatacaaattcctaccaatgttaaa

SEQ ID NO: 262388 - DNA, 1237 bp, Homo Sapiens
ccctttttcctcaaaacctgagtaattgtcaaagtcaataaatagggggagagaattaaaatgctaaaatatatcggggtcaaataccctatcgggactaaagcagcaagggtttcttcgaatgcagccctctgttttgagatgcgtccggccttatgcttttaaatgaggacttggggcaaaaccctgggcacaaggtaccgccctgtggccgatctgagccatgccttattccaatgactgtaaacaatcaggaaggagtggggcctgacctccttcaccctctcccccatcacaaaaactcttcccttttgaaagtttctgttaaaggcaaaattatagaagcatcatcgagtggaagtcttatttggttggaggtgcttggctgtcccgcggctccgtgctcccctgcagggcactgcggagtcagatgtgtaagaggtcctcgtcgctgtcgtcatggaaggacaccagcttggtggagctcactgtctttctgctgtgcagaagctggacttccctttccttcgccttcttcaccccctgaccagcccccacccctatcgtcctcacgctcctgaagggcattgctctgtgcgtttctcactgggtgggagctctctgccccagctcccctgcccgagtgaactttcacctctgggatggtcagaacctcatcctcactgtcctggtcatccccatgcagggagctgagggctttcactgacttggtggtaatatggccgttctcctgcccttcctttccctgccgtggaggaggcagctggatctcttccatcagccactctgtttcattctcatctgtctcttcttccttattcacctttgagtatttgtaggacacgttggaacttctcctacagcaagtggtcagcttacttatcactgtttccctcctctccttcttgtagagcaacagggccagcaggcagcaggtgagcgccaccagcagcaggctgagcaccgcgccgactgcctggctccgttctgacagccccttgtgcatctgcccgtcgtccccgggattctcgctgtcaaagcccacccccagaggacacacggctgaggtgtaccaagagaagaggtactggcagtcggcagtctcgtgactgaactcggggatcccgtcctccaccagagggtcacagtggaagaagatggtggaagaaacagacttggtcttatcctttccgcacttagaggtagaggcaaacac

SEQ ID NO: 262389 - DNA, 1197 bp, Homo Sapiens
  misc_feature (657)..(680): n is a, c, g, or t
  misc_feature (881)..(881): n is a, c, g, or t
  misc_feature (893)..(893): n is a, c, g, or t
  misc_feature (1097)..(1097): n is a, c, g, or t
tttatggaggctgcttgggcaacaagaacaactaccttcgggaagaagagtgcattctagcctgtcggggtgtgcaaggtgggcctttgagaggcagctctggggctcaggcgactttcccccagggcccctccatggaaaggcgccatccagtgtgctctggcacctgtcagcccacccagttccgctgcagcaatggctgctgcatcgacagtttcctggagtgtgacgacacccccaactgccccgacgcctccgacgaggctgcctgtgaaaaatacacgagtggctttgacgagctccagcgcatccatttccccagtgacaaagggcactgcgtggacctgccagacacaggactctgcaaggagagcatcccgcgctggtactacaaccccttcagcgaacactgcgcccgctttacctatggtggttgttatggcaacaagaacaactttgaggaagagcagcagtgcctcgagtcttgtcgcggcatctccaagaaggatgtgtttggcctgaggcgggaaatccccattcccagcacaggctctgtggagatggctgtcgcagtgttcctggtcatctgcattgtggtggtggtagccatcttgggttactgcttcttcaagaaccagagaaaggacttccacggannnnnnnnnnnnnnnnnnnnnnnncctgccagctccactgtctccactaccgaggacacggagcacctggtctataaccacaccacccggcccctctgagcctgggtctcaccggctctcacctggccctgcttcctgcttgccaaggcagaggcctgggctgggaaaaactttggaaccagactcttgcctgtttcccaggcccactgtgcctcagagaccagnggctccagcccnctcttggagaagtctcagctaagctcacgtcctgagaaagctcaaaggtttggaaggagcagaaaacccttgggccagaagtaccagactagatggacctgcctgcataggagtttggagggaagttggagttttgtttcctctgttcaaagctgcctgtccctaccccatggtgctaaggaaaggaaatgggggtggtgtcanaacccgggaggccccaaccctgtcctcccgaagctcctccttccatgctgggcgccaagggcctgggaagaaagactttccctggggaaattttgtgctg

SEQ ID NO: 262390 - DNA, 1543 bp, Homo Sapiens
tcaccagcaccctcggaacccagaggcccgcgctctgaaggtgacccccctggggaggaaggcgatggcccctgcgaggacgatggcccgcgcccgcctcgccccggccggcatccctgccgtcgccttgtggcttctgtgcacgctcggcctccagggcacccaggccgggccaccgcccgcgccccctgggctgcccgcgggagccgactgcctgaacagctttaccgccggggtgcctggcttcgtgctggacaccaacgcctcggtcagcaacggagctaccttcctggagtcccccaccgtgcgccggggctgggactgcgtgcgcgcctgctgcaccacccagaactgcaacttggcgctagtggagctgcagcccgaccgcggggaggacgccatcgccgcctgcttcctcatcaactgcctctacgagcagaacttcgtgtgcaagttcgcgcccagggagggcttcatcaactacctcacgagggaagtgtaccgctcctaccgccagctgcggacccagggctttggagggtctgggatccccaaggcctgggcaggcatagacttgaaggtacaaccccaggaacccctggtgctgaaggatgtggaaaacacagattggcgcctactgcggggtgacacggaagtcacgggaagagaggaaagacccaaaccaggtggaactgtggggactcaaggaaggcacctacctgttccagctgacagtgactagctcagaccacccagaggacacggccaacgtcacagtcactgtgctgtccaccaagcagacagaagactactgcctcgcatccaacaaggtgggtcgctgccggggctctttcccacgctggtactatgaccccacggagcagatctgcaagagtttcgtttatggaggctgcttgggcaacaagaacaactaccttcgggaagaagagtgcattctagccctgtcgggggtgtgcaaggcccctccatggaaaggcgccatccagtgtgctctggcacctgtcagcccacccagttccgctgcagcaatggctgctgcatcgacagtttcctggagtgtgacgacacccccaactgccccgacgcctccgacgaggctgcctgtgaaaaatacacgagtggctttgacgagctccagcgcatccatttccccagtgacaaagggcactgcgtggacctgccagacacaggactctgcaaggagagcatcccgcgctggtactacaaaccccttcagacgaacactgcgcccgctttacctatggtggttgttatggcaacaagaacaactttgaggaagagcagcagtgcctcgagatcttgtcagcggcatctccaagaaggatgtgttaggcctgaggcgggaaatccccattcccagcacaggctctgtggagatggcatgtcgcaggtgttcctggtcatctgcatagtggttggtggtacgccattcttgggttactgcttcttcaagaaccagaggcaaggacttccacggacaccacagcacacaacaccaaac

SEQ ID NO: 262391 - DNA, 827 bp, Homo Sapiens
  misc_feature (19)..(19): n is a, c, g, or t
  misc_feature (31)..(31): n is a, c, g, or t
  misc_feature (727)..(738): n is a, c, g, or t
cggagggttccctgagganggactttcagcntttctgcggctcattggtgcgtctccctgttgaagtcagctcgtgggtgtgtttgggcacagtggtctgtctgcaggatgtggaagaggctggccatgttaggcccaattttctccatcaaggctgtctctgattgtgctgactgtgtcttcatcacattccagcaggcttcggacaagtctgttatagtatctgttggagaagtgattgggcagctggacgacctcagtgatggcttcagggttccgcttggcgatgctgcacacattcagcttgctgtagcactcttcctgcacctcagcaatcatcctttggaaagtggagcacctccgaatggcgaggaagaccttggaggtgaccccgttggcgatgcattttaagctctctttgacgaatgcttttccctgagtgtcaaatttagcagcgctgtacaagaaggatttacagatgtcatacatcccatctgtgtcacaggtggagttttccaggcatgcaaaagccccgcagccgacctgtagagcactgttgaggcaacgaaccacttcagctgagttttgagccgccactcgggatttcctggggctcacagagtcattctgctccgcctcatgggttgcagaagcactgatcaccagcaccagaagcactgctgagttttggagcattctctgagaagtttccgctaagttgttgggnnnnnnnnnnnncctgcccccctttcctctttccctctcctggcttgagtgaagatgtggatctggatacactgaaagcttaggtgaggatttgatgagga

SEQ ID NO: 262392 - DNA, 880 bp, Homo Sapiens
  misc_feature (18)..(18): n is a, c, g, or t
  misc_feature (85)..(96): n is a, c, g, or t
  misc_feature (507)..(507): n is a, c, g, or t
atcaatcctcacctaagnctttcagtgtatccagatccacatcttcactcaagccaggagagggaaagaggaaaggggggcaggnnnnnnnnnnnncccaacaacttagcggaaacttctcagagaatgctccaaaactcagcagtgcttctggtgctggtgatcagtgcttctgcaacccatgaggcggagcagaatgactctgtgagccccaggaaatcccgagtggcggctcaaaactcaggtaagcagcaaacccaagagcggtttctcccccaaagagctgtcctcatttgcctctcccttttgcaactgtgtctgtgacggctgatcttgataataaatgtgcttcatgcctgatggcaataaactgccagtgtaatccaatagccttaggcagtggagctcctttgtttaataaattgcatgcaactaaacgaagaagctggacgctctgctgagggtatttcattgcataagcctagcctgattgcctgaaatctggcnacgtaccctcttggagggggaggggtgagaggggaggaaaaggcttggaatggttgggcatggcttcaaagcgctctctatactttccagaagctgatctaaggtaagacctggcttgtttgatgctgtccctcttcctttcctcttaagactctacctcttcacttcttgacttctctacctaagagaatacacagaaaagctccctcttcagactgattttcagaaccatagccctcaagtctgacaaatccagggcggattcagagaaaaccctatacatcccacccccaaccctgctgcctgtctccctcctggctctgtagggctccattcagtcgtccctgcagcccgtagccagagagcccctaga

SEQ ID NO: 262393 - DNA, 1262 bp, Homo Sapiens
caggaggccacaaggaaagctggccaccccaagggagccaggtggggctggggacaaggacggagaaaaggctgctgggccagtgacttggcgaagatgtggtccagcaccctctgccggcctgcgtctacccactcaggccaggaagcccaggcttgtgactgagctctagccccagctctacccagtgcagagctgctggagtcccacagaccctcagcagccccgtgcccacagcagaggtgtagagatcccccgcctgcccctcggctacatgaacaagacaggggcctaaacttcggccctggccaaggcttagatttgcccaggaaggaccggaaaggctagaggggccagcccccccacaaccatcccaagcccctgtggacactggagaagcccataggacagtcaggcttctgaggatcccaggacagggccaccagcagggggagcccctcaatacccgggggccatcaggctcaatacctgagcccaaacaacaatgagcagattcccaggctttgctttcactgggtggcccagggacagtgacatggtaggagacatgcaagacagagacagagaagaatggagacatgcagagaccacacagcatgggcggggtctgaggacaaaacgtggtaaaagtgctgcgatgtggtgggcacttcatggaccaggatcattgaggccctgggctcatggtgatacccgcctcctctggaatggtctccagcatctcactctggactgcctgcgtgatgagcgccagctcctggcacagggtctcgtagcggtagcccacgcggatgtctggcacattggtccggcggatgtcattcccctcagggccttccttggtatagttgggtcccagccagtggctctttaccttgtgcgagaagccgctcatgagcacgctgttgcgggccagctcacacatatcgcaggagctgagcttccacacctgggtggcgatgctgtactcctccatcagcggctccttggtgaagtggaactgcaagggatcatcagtggacagggagaccatgaggccgcgggacaggtactccggtagcggattccggtgatagctgaggaagaggctgttgttgctgagcggagacatggcgatgccgatctgggccaggtagtacaggtactgcaggacgggggccttgcgcagaaggagcccgtgggaaatgttctcagccagcatgaaggctgacaccaggtggtggatgggcccagcctcccca

SEQ ID NO: 262394 - DNA, 1117 bp, Homo Sapiens
  misc_feature (896)..(906): n is a, c, g, or t
  misc_feature (953)..(953): n is a, c, g, or t
  misc_feature (1032)..(1032): n is a, c, g, or t
aaggtagcgaggcctgggtggcgaattcggcacgagggaggacagttacgagatcttcatctgtcacgccaacgtcatccgctacatcgtgtgcagagcactgcagtttcctcctgaaggctggctccggctctccctcaataatggcagcatcacccacctggtgatccgacccaacggccgagttgcgctcaggaccctcggggacacggggttcatgcctcccgacaagatcactcgatcctgagggctccggcctctccttccctctgtcctccctgcacaggccgcacacacttaacgttttgttcccaaggagaccggcggaaagtagaaacctgcaatgctgcatctgggaactgacttgtgaccaggctgagaaggggagagttgggatcagacagcctgacttctctgcagggttttatacctgaccatgaacccccaggatggcgtggggtttaaggtgaaagcgtctcacgcacaagtcaggcctgttgtggggacctgaaagaggcctgacccagaccaccatgttcgcacccacagctgacccgtgctgagggtccaggctccattggcaaagccggtcaggcacgagggcgactgaggcacgtggatgaggagggcacccaggttctgttcacaactcacttcacttcatacatccttttaatttcttaaaaccctcttgtcccttaaatatttgtcaattaaagattttctggctggggcacagtggctcacacctgtattccgcttaatcaaggaaggccgggaggggaaaaaaaccctcgggctcacggacccaaagagacaaccgcgaaagcgcacacgccaacaaaaaaacgccccccacaacaacaccccaaatcacaactcggattaaccgtttnnnnnnnnnnnaacacctggggagaattctgttcctcctttcccccaaccgccatggnacttagcacccgcagtcgcccaagaataccccattgcgacgcccgcccgcggtgagacccatatagaccagagccgctnaaccgcacgctgcgatattcgcctgtagcgcacacgaagcgcgcagccgcggccgatcttccaaaatatgcgatgacacgcggcg

SEQ ID NO: 262395 - DNA, 774 bp, Homo Sapiens
  misc_feature (265)..(265): n is a, c, g, or t
  misc_feature (372)..(372): n is a, c, g, or t
  misc_feature (627)..(627): n is a, c, g, or t
  misc_feature (728)..(728): n is a, c, g, or t
cccccgacaaaaagaggctgggtaccggtccggattcccgtcatggcggtaccaagatggactcctcgcgggcccggcagcagctccggcggcgattcctcctcctgccggacgccgaggcccagctggaccgcgagggtgacgccgggccggaaacctccacagctgttgagaaaaaggagaaacctcttccaagacttaatatccattctggattctggattttggcatccattgttgtgacctattatgttgacttctttanaacccttaaagaaaacttccacactagcagctggtttctctgtggcagtgccttgttgcttgtcagtttatcaattgcattttactgcatagtctacctggaatggntatgtggaattggagaatatgatgtcaagtatccagccttgatacccattaccactgcctcctttattgcagcaggaatttgcttcaacattgctttatggcatgtgtggtcgtttttcactccattgttgttgtttacccagtttatgggggttgtcatgtttatcacactccttggatgatttccgaagagacagggtcttctatgttgcccaggctgtctttgaactcctggggatcaagtgatcctcctgncctcagccttcgaagtagttggggactacaagcccacgccaaccgtgcctgggctgggacatgtaaaatttgaagtgaatgggtaaacatccagctagctnaaagcattggcagaccctaaccagaaaagcttacagtgtgtttttt

SEQ ID NO: 262396 - DNA, 1305 bp, Homo Sapiens
tccgcgcggggcgggctccgcgccacgtgactccgcggccgggccgggacgcgacgggacgcgctgggaccggcgtcgggggtcgcggggaccatgcagcggaggtgggtcttcgtgctgctcgacgtgctgtgcttactggtcgcctccctgcccttcgctatcctgacgctggtgaacgccccgtacaagcgaggattttactgcggggatgactccatccggtacccctaccgtccagataccatcacccacgggctcatggctggggtcaccatcacggccaccgtcatccttgtctcggccggggaagcctacctggtgtacacagaccggctctattctcgctcggacttcaacaactacgtggctgctgtatacaaggtgctggggaccttcctgtttggggctgccgtgagccagtctctgacagacctggccaagtacatgattgggcgtctgaggcccaacttcctagccgtctgcgaccccgactggagccgggtcaactgctcggtctatgtgcagctggagaaggtgtgcaggggaaaccctgctgatgtcaccgaggccaggttgtctttctactcgggacactcttcctttgggatgtactgcatggtgttcttggtgctgtatgtgcaggcacgactctgttggaagtgggcacggctgctgcgacccacagtccagttcttcctggtggcctttgccctctacgtgggctacacccgcgtgtctgattacaaacaccactggagcgatgtccttgttggcctcctgcagggggcactggtggctgccctcactgtctgctacatctcagacttcttcaaagcccgacccccacagcactgtctgaaggaggaggagctggaacggaagcccagcctgtcactgacgttgaccctgggcgaggctgaccacaaccactatggatacccgcactcctcctcctgaggccggaccccgcccaggcagggagctgctgtgagtccagctgaggcccacccaggtggtccctccagccctggttaagcactgagggctctggacgggctccaggaaccctgggctgattgggaccacggaccgggctccgcctgcccccctgccactgcaccgggaacccggaattctgggaaatgccctgggatagtccctcagcacttttggcaaggggaaaccctgtttactcattacgagtcacctcagaatttccccactcacctattctattgccggggcacttcggccacttgtcctctttctgtaaggagcgggtaaagcatccccagctcggcc

SEQ ID NO: 262397 - DNA, 1639 bp, Homo Sapiens
caagaagcatgactgatccacagaatatggagttccaggttcctgtaatacttacctcacaggctaatgctcctctgttggctggaaacacttgtcagaatgtagtttctcaggtcacctatgagatagagaccaatgggacttttggaatccagaaagtttctgtcagtttgggacaaaccaacctgactgttgagccagggcgcttccttacagcaacactttcatccttcgcttcaggggcttttcaacagaggcacagctgcttctctcaccagtcctagaagtgggaatcctggctatatagttgggaagccactcttggctctgactgatgatataagttactcaatgaccctcttacagagccagggtaatggaagttgctctgttaaaagacatgaagtgcagtttggagtgaatgcaatatctggatgcaagctcaggttgaagaaggcagactgcagccacttgcagcaggagatttatcagactcttcatggaaggcccagaccagagtatgttgccatctttggtaatgctgacccagcccagaaaggagggtggaccaggatcctcaacagggcactgcagcatttcagctataaactgtacttcctgctgtctcataccagtttccctggagatccaggtattgtgggcatatgtaggtctcctgtccaacccgcaagctcatgtatcaggagttcgattcctataccagtgccagtctatacaggattctcagcaagttacagaagtatctttgacaactcttgtgaactttgtggacattacccagaagccacagcctccaaggggccaacccaaaatggactggaaatggccattcgacttctttcccttcaaagtggcattcagcagaggagtattctctcaaaaatgctcagtctctcccatccttatcctgtgcctcttactacttggagttctcaacctagagactatgtgaagaaaagaaaataatcagatttcagttttccctatgagaaactctgaggcagccacttatcttggctaaatagaacctcacctgctcatgaccagagagcatttaggataatagaggacctaactgaaggaatccttgtatatgaaaggagttattttagaaaagcaataaaaatattttattcatcatagctctctgctttgggctctgcaggccaccagatacacatgaggcccctacttctcaagctgggaaggcctagagccttccttcagcctttctggttatgttacacctagctgaatgtttacaaggtctggatccatcagccctcaggcacagttgggccaagcagaaagagagaaacacttctgctgtcaccttgaaatgaactcaggaatagcttccctctggactgtagaggagctaactgtttggaacagaaaactgctggctgttgattttgtctggttcctttggccaacatctgggcacaccctttgcccagacacgagtggggaaagcagttctttctcctcagtttccaaagtaaatggggaatcccagctttcttttctactagcaaatgaccctaccatttatttctgcctttttcttccgttcattgtgaggaaaaataaaactggttgagagctttgttgtact

SEQ ID NO: 262398 - DNA, 1089 bp, Homo Sapiens
ttaagaagaggaaatgtttgttggtctccatgctcggatgcctccccctgtggagccccctactggagatggagcactcaccagcttcccttcagggcagggccctgggggaggggtctcacgtcccctggggaagcgccggaggccggagccagagcccctgaggaggaggcagaaggggaaagtggaggagctggggccaccctcagcagtgcgcaatcagcccgagccccaggagcagagggagcgggctcatctgcagagggcactgcaggcctcagtgtctccaccatcccccagccctaaccagagttaccagggcagcagcggctacaacttccgggcccacagatgcccgctgccgtgcgccagcagccccagtccggatgtttgcttccttccacccttctgccagctaccgcagggacctctggggacagtggacccccagacaggtcacccctggaacttcacagttggtttccccgacagacatccctaaaagtgcccccgcactcgatgactgcctcatcttcctcagtttcatccccatccccaggtcttcctagacgctcagcacccccgttctccccgtgtgccgtagtttgtctcctgggactgggggaggagtccgaggtggggttggttacctgtcccgagggggccctgtccgggtccttgctcggagagtacggcctgatggctctgtgcagtacctggttgagtggggaggagggggcatcttctgaacagcctgcctctgcccagctccccattcacacacaccggcactttcataccctgacctctgacctcacctacagctgggatgtacctggagagatagggggtagttctccctactgcccaggctggaatccaagagtggggagtggggaagaggccctcttctctaccctccttcatgattcctgacccctcccatccttcccatttcctttgatgttattttgttacagctttttaaatattttttaaaattatttaacccctgggggcagagactgaggagggaggatgataagggatcccggactctgtatgattgaaataaagagaaataaacaa

SEQ ID NO: 262399 - DNA, 422 bp, Homo Sapiens
gctggaccggtccggattcccggcatcgaggaggcagccaaggcggagctgatggctgcgccgagggcggggcggggtgcaggctggagccttcgggcatggcgggctttggggggcattcgctgggggaggagaccccgtttgacccctgacctccgggccctgctgacgtcaggaacttctgacccccgggcccgagtgacttatgggacccccagtctctgggcccggttgtctgttggggtcactgaaccccgagcatgcctgacgtctgggaccccgggtccccgggcacaactgactgcggtgaccccagataccaggacccgggaggcctcagagaactctggaacccgttcgcgcgcgtggctggcggtggcgctgggcgctgggggggcagtgctgttgttgttgtggggcgg

SEQ ID NO: 262400 - DNA, 1072 bp, Homo Sapiens
ccccgcccagcgggcagccagggtggggcagtgggtaccagccactgccatctcaggaagggcactttcagcttcggggttccccaggaagaactgcaggacgcggtcggccaggagccgccagccagaagtccagggagcaggaccttgggcaatgaccaggcttgaacttccacagggaatgtccacgaggccaaaactggctgttgaagtcgggcgaggagccgaggagcagcccaatgatggccaggagtgaaactgccagactcccacaccaggggcttgttctcgggcaggctctccatgaagggcgggcctttgtaattgatggcgaaggtggccatctgcatggccatggccatgatgtagacggtgctgttgaccaggcttggctcaaactccttgtacaagtccacgaactgctcctgcttctcggggctccgggcctgggcctcacggtacaggtagacaaggctcaggaagtgcacaaagaactggagcatgacggtgaggatggtgtacaggttgaagatgttgggcaggggccgttctcgggagagggtcttgaggggcttggaacgggagatgaagaggaagcagccggccagcagcagcccctgtagggtggcctggaagtcactgaacttgactccctccaggtagaggacgctctggctgtaggccaggatgagggcattgagcgccaggatcttgaacatctgtagcgtggtcaccagcgtgcagcggccctgcttgatcacgtggcagatgcactggatggatgagagcttggaggtgaagggtgctgcgatgctggcatcccccagtttcacaatgggcgtactctcgtcctcgaggtctcgcagcacctggctcaggcggtccctctgggaggttggctgctcctcggagggagggagccccgaccgctgcttggctgtcctggaggtggctctgatgccactgttgctcagggttgggctgtcccggggccgccgtcgccgctcgacaacccgctcaggggcattggccaagagcgccacaccctcgtgccgaattcgccacccaggcc

SEQ ID NO: 262401 - DNA, 986 bp, Homo Sapiens; identical to SEQ ID NO: 102245
  misc_feature (16)..(16): n is a, c, g, or t
  misc_feature (967)..(967): n is a, c, g, or t

SEQ ID NO: 262402 - DNA, 895 bp, Homo Sapiens
  misc_feature (800)..(800): n is a, c, g, or t
ttcactgagacgattagaaatcaacatgaaagaaatcaaggaaactttgaggcagtatttaccaccaaaatgcatgcaggagatcccgcaagagcaaatcaaggagatcaagaaggagcagctttcaggatccccgtggattctgctaagggaaaatgaagtcagcacactttataaaggagaataccacagagctccagtggccataaaagtattcaaaaaactccaggctggcagcattgcaatagtgaggcagactttcaataaggagatcaaaaccatgaagaaattcgaatctcccaacatcctgcgtatatttgggatttgcattgatgaaacagtgactccgcctcaattctccattgtcatggagtactgtgaactcgggaccctgagggagctgttggatagggaaaaagacctcacacttggcaagcgcatggtcctagtcctgggggcagcccgaggcctataccggctacaccattcagaagcacctgaactccacggaaaaatcagaagctcaaacttcctggtaactcaaggctaccaagtgaagcttgcaggatttgagttgaggaaaacacagacttccatgagtttgggaactacgagagaaaagacagacagagtcaaatctacagcatatctctcacctcaggaactgggaagatgtattttatcaatatgatgtaaagtctgaaatatacagcctttggaatcgtcctctgggaaatcgccactggagatatccccgttttcaggctgtaatttctgagaagatccgcaaagctggtggnctgtgaaagccggcagcagagcccactgggtggagactgcccttcagagctgcgggagatcattgatgagtgccgggcccatgatccctctgtgc

SEQ ID NO: 262403 - DNA, 1421 bp, Homo Sapiens
  misc_feature (25)..(25): n is a, c, g, or t
  misc_feature (34)..(35): n is a, c, g, or t
ttttttttattcccccgcccccctnttctatacnnccaaagcacgaagcctgggtggcgagagagtcacggcggtgagagggctgagtgacgggttaccccaaaccatgtggctggaggcgcgagctggggttttcgtaacaccccagggcctgtaaggtttggtgtttccctttcaagatgccactttcagactttattctggctctgaaggacaatccctactttggggctggatttgggctggtgggtgtgggcacagccctggccctggcccggaagggtgtccaactgggcctggtggcattccggcgccattacatgatcacactggaagtccctgctcgagacaggagctatgcctggttgcttagctggctcacccgccacagtacccgtactcagcacctcagtgtcgagacttcgtaccttcagcatgagagtggccgcatttccactaagtttgaatttgtccccagccctggaaaccattttatctggtatcgggggaaatggattcgggtagaacgaagtcgagagatgcagatgatagacttgcagacggggactccttgggaatctgtcaccttcacggccctgggcactgaccgaaaggttttcttcaacatcctggaggaagctcgagagctagccttgcagcaggaggaagggaagaccgtgatgtacacagctgtgggctctgaatggcgtccctttggctatccacgccgccggcgaccactgaattctgtggttctacaacagggtctggctgaccgaattgtcagagacgtccaggaattcatcgataaccccaagtggtacactgacagaggcattccttacagacgtggctacctgctttatgggccccctggttgcggaaagagcagttttatcacagccctggctggggaactggagcacagcatctgcctgctgagcctcacggactccagcctctctgatgaccgactcaaccacctgctgagcgtggccccgcagcagagcctggtactcctggaggatgtggatgctgcttttctcagtcgagacttggctgtggagaacccagtaaagtaccaaggcctaggtcgcctcaccttcagtggactgctcaatgccttggatggtgtggcttccaccgaggcccgcatcgtgttcatgaccaccaaccacgttgacaggctggaccctgccctgatacgcccggggcgagtggacctgaaagagtacgtgggctactgctcaccctggcagctgacccagatgttccagaggttctatccagggcaggcaacttccttaactgagaaacttgcagaacatgtcccttccaacctacaaccgaatcagttcctggccaggtgccggggctacttcatgctggataaaaaagacctgtaaggggcaatttccaag

SEQ ID NO: 262404 - DNA, 773 bp, Homo Sapiens
  misc_feature (42)..(42): n is a, c, g, or t
  misc_feature (57)..(57): n is a, c, g, or t
tctcccgacctgctgagtgccaggacatgctaggacgtttgntgtattactgcatanaggaagaaaaagatatggctgtacgggaccgaggtctcttctattatcgcctcctcttagttggcattgatgaagttaagcggattctgtgtagccctaaatctgaccctactcttggacttttggaggatccggcagaaagacctgtgaatagctgggcctcagacttcaacacactggtgccagtgtatggcaaagcccactgggaaactatctctaaatgccagggggcagagcgttgtgacccagagcttcctaaaacttcatcctttgccgcatcaggacccttgattcctgaaagagaacaaggagagggtacaagaactccctgattctgggagccctcatgctagtccccaatcgccagcttactgctgattattttgagaaaacttggcttagccttaaagttgctcatcagcaagtgttgccttggcggggagaattccatcctgacaccctccagatggctcttcaagtagtgaacatccagaccatcgcaatgagtagggctgggtctcggccatggaaagcatacctcagtgctcaggatgatactggctgtctgttcttaacagaactgctattgagcctggaaactcagaaatgcagatctctgtgaaacaaaatgaagcaagaacggagacgctgaatagttttatttctgtattagaaactgtgattggaacaattgaagaaataaaatcataacagag

SEQ ID NO: 262405 - DNA, 760 bp, Homo Sapiens
ggcacgaggcgttgtgacccagagcttcctaaaacttcatcctttgccgcatcaggtaaaaacagtccttaccttaaatcttgtcatgataaatctttaccttttcaatgattggtggaaagtagagtatcttagcactaaacctcagactgttgcctgaatttgaagcatttgtgagcaagaaagaggttcgtcactggttatttcagccatttgtccaaaaataaaagtcacattgtgtacatttgggaatttggataaaaaacttagctcctacagattaagaacatctttcacacaagttttctgtctctttaggacccttgattcctgaagagaacaaggagagggtacaagaactccctgattctggagccctcatgctagtccccaatcgccagcttactgctgattattttgagaaaacttggcttagccttaaagttgctcatcagcaagtgttgccttggcggggagaattccatcctgacaccctccagatggctcttcaagtagtgaacatccagaccatcgcaatgagtagggctgggtctcggccatggaaagcatacctcagtgctcaggatgatactggctgtctgttcttaacagaactgctattggagcctggaaactcagaaatgcagatctctgtgaaacaaaatgaagcaagaacggagacgctgaatagttttatttctgtattagaaactgtgattggaacaattgaagaaataaaatcataacagagtcttaaaaa

SEQ ID NO: 262406 - DNA, 524 bp, Homo Sapiens
  misc_feature (372)..(385): n is a, c, g, or t
cccgaaccttgtctcctgggcaggctttgtacaacatcatcagcacctggcctcatttcaaacactgagagaagccccaggtccttctgagactgctttccctcccctgtcaggtctctcctgtcctaaccatccagcttggctcaacaccttttgccctcctcccctgccacacagtcctgtgcctcctttttcaggttgggatgatcatgccctctcctgccaacatcctccaagggcctccaaacctcatagctggacattcacagccctctgagtctgagtccagatttcttctctccttaccttcctctcccttggaaacccaactcctcagccaggtgagacaatgggctggttcttgtttcattnnnnnnnnnnnnnncattcccctctgcctggtgagccttcccctggtgtctgtctggcagcccccacctcccacctatcacccctcacccataactcaggtcaacgtgaccacccttccttgcttacacataaacttgtatatatttggatgt

SEQ ID NO: 262407 - DNA, 1416 bp, Homo Sapiens
  misc_feature (730)..(730): n is a, c, g, or t
  misc_feature (756)..(756): n is a, c, g, or t
  misc_feature (1396)..(1396): n is a, c, g, or t
tgcgctgtaccagctccccagactacctggtgagcagggcccaggaggccttggatgccgtgagcaccctggaggagggccacgcccagtacctgacctccttggcagacgcctccgccctggtggcagctctgacccgcttctcccacctggctgcggataccatcatcaatggcggtgccacctcgcacctggctcccaccgaccctgccgaccgcctcatagacacctgcagggagtgcggggcccgggctctggagctcatggggcagctgcaggaccagcaggctctgcggcacatgcaggccagcctggtgcggacacccctgcagggcatccttcagctgggccaggaactgaaacccaagagcctagatgtgcggcaggaggagctgggggccgtggtcgacaaggagatggcggccacatccgcagccattgaagatgctgtgcggaggattgaggacatgatgaaccaggcacgccacgccagctcgggggtgaagctggaggtgaacgagaggatcctcaactcctgcacagacctgatgaaggctatccggctcctggtgacgacatccactagcctgcagaaggagatcgtggagagcggcaggggggcagccacgcagcaggaattttacgccaagaactcgcgctggaccgaaggcctcatctcggcctcccaaggctgtggggctggggagccacacagcttggtggaggcagnctgacaagggtggtgcttcacacggngcaagtatgaaggagctcatcgtctggctcccaccgagatcgcagccagcacggcccagctggtggcggcctccaaggtgaaggccaacaagcacagcccccacctgagccgcctgcaggaatgttctcgcacagtcaatgagagggctgccaatgtggtggcctccaccaagtcaggccaggagcagattgaggacagagacaccatggatttctccggcctgtccctcatcaagctgaagaagcaggagatggagacgcaggtgcgtgtcctggagctggagaagacgctggaggctgaacgcatgcggctgggggagttgcggaagcaacactacgtgctggctggggcatcaggcagccctggagaggaggtggccatccggcccagcactgccccccgaagtgtaaccaccaagaaaccacccctggcccagaagcccagcgtggcccccagacaggaccaccagcttgacaaaaaggatggcatctacccagctcaactcgtgaactactaggccccccagggtccaacaaggttggctgggtgaaggccctgggcctctgcaactgccctgacaagaaccgaaaggccttgccccctccacctgggtgcccaagcctcccggccccaacgggntgggatccatgggcctccat

SEQ ID NO: 262408 - DNA, 1730 bp, Homo Sapiens
  misc_feature (78)..(160): n is a, c, g, or t
cgcgcgcagcgacctgtacttcgtgccactggagggctccaggctggccaagaagcgggccgacctggtggagaaggnnnnnnnnnnnnnnnnnnnnnnnnnnnnnnnnnnnnnnnnnnnnnnnnnnnnnnnnnnnnnnnnnnnnnnnnnnnnnnnnnnnaaggagcgcgagcttgaacgcagcgtgaagttggctcaggagggccgtgctccggtggaatgcccatctctgggcccagtgccccatcgccctccatttgaaccgggcagtgcggtggctacagtgcccccctacctgggtcctgacactccagccttgcgcactctcagtgaatatgcccggcctcatgtcatgtctcctggcaatcgcaaccatccattctacgtgcccctgggggcagtggacccggggctcctgggttacaatgtcccggacctgtacagcagtgatccagctgcccgggagagggaacgggaagcccgtgaacgagacctccgtgaccgcctcaagcctggcttagaggtgaagcctagtgagctggaacccctacatggggtccctgggccgggcttggatccctttccccgacatgggggcctggctctgcagcctggcccacctggcctgcaccctttcccctttcatccgagcctggggcccctggagcgagaacgtctagcgctggcagctgggccagccctgcggcctgacatgtcctatgctgagcggctggcagctgagaggcagcacgcagaaagggtggcggccctgggcaatgacccactggcccggctgcagatgctcaatgtgactccccatcaccaccagcactcccacatccactcgcacctgcacctgcaccagcaagatgctatccatgcagcctctgcctcggtgcaccctctcattgaccccctggcctcagggtctcaccttacccggatcccctacccagctggaactctccctaaccccctgcttcctcaccctctgcacgagaacgaagttcttcgtcaccagctctttgctgccccttaccgggacctgccggcctccctttctgccccgatgtcagcagctcatcagctgcaggccatgcacgcacagtcagctgagctgcagcgcttggcgctggaacagcagcagtggctgcatgcccatcacccgctgcacagtgtgccgctgcctgcccaggaggactactacagtcacctgaagaaggaaagcgacaagccactgtagaacctgcgatcaagagagcaccatggctcctacattggaccttggagcaccccacaccctccccccaccgtgcccttggcctgccacccagagccaagagggtgctgctcagttgcagggcctccgcagctggacagagagtgggggagggagggacagacagaaggccaaggcccgatgtggtgtgcagaggtggggaggtggcgaggatggggacagaaagcgcacagaatcttggaccaggtctctcttccttgtcccccctgcttttctcctcccccatgcccaacccctgtggccgccgcccctcccctgccccgttggtgtgattatttcatctgttagatgtggctgttttgcgtagcatcgtgtgccacccctgccccctccccgatccctgtgtgcgcgccccctctgcaatgtatgccccttgccccttccccacactaataatttatatatataaatatctataaggacgcctctt

SEQ ID NO: 262409 - DNA, 896 bp, Homo Sapiens
gcgcggtaccagcgcgactacgaggagatggccagtcggctgggccgcctggatgctgtgctgcagcgcatccgcacgggcagcgcgctggtgcagaggatgaagtgctacgcctcggaccaggaggtgctggacatgcacggtttcctgcgccaggcgctctgccgcctgcgccaggaggagccccagagcctgcaagctgccgtgcgcaccgatggcttcgacgagttcaaggtgcgcctgcaggacctcagctcttgcatcacccaggggaaagatgcagctgtatccaagaaagccagcccagaggctgccagcactcccagggaccctattgacgttggacctggatgtctccaatacaacgtacagcccagaagaggaagtgcagccagacccagtgccccaggaaggtcatcaagatggagtctgaggaggggaaggaggcaaggttggctcggagctccccggagcagcccaggcccagcacctccaaggcagtctcaccaccccacctggatggaccgcctagccccaggagccccgtcataggaagtgaggtcttcctgcccaacagcaaccacgtggccagtggcgccggggaggcagaggaacgcgttgtggtgatcagcagctcggaagactcagatgccgaaaactcgtcctcccgagagctggatgacagcagcagtgagtccagtgacctccagctggaaggccccagcaccctcaggggtctggacgagaaccttgctgacccccagcagaagacagacttctggttttctttggactcagattgaccaatgaaagggggttctccctggggctacccccacccctttcaaattagttctcggagtcccaaaaagaaatgcaaggcaaagccatctggc

SEQ ID NO: 262410 - DNA, 1111 bp, Homo Sapiens
cccgtcagggagccccgtgctggccagctacaagccagcgccccccaaagacaagctacccgaaacgcctcgccgccgcatgaaaaagagcctctcagcccccttgcacccggaatttgaagaggtctacagattcggggcagagagcaggaaactccttttgcgggaaccagtggatgctatgcccgaccccaccccatttctgctggctagggagtccgccgaggtccacctcatcaaagagaggcccctcgtcatcccccccatcgcctccgaccgaagcggcgagcagcacagcccggcccgcgaaaagccgcacaaggcccacgtcggggtggcacatcggatccaccacgccaccccgccgcaggcccagcccgaggtgaagaccctggcggtcgaccaggtgaacggaggcaaggtggtgaggaagcactcagggacggacagaactgtgtgaagcccgccgtgccccaccccgcgctgtccatgcactgtgagcaccactgggaaatctcagccacaccttttctgtttaatcccatgcatgccaaacacttttcacacctaccgacccattctccttctgcttctcttgccctcttcttcacaccaaaatatgatcgtgtccctgccgcagaatatgtatttcctaattgctgtggccaaacgcctgtgtgccgaatcgcttgcttctgatcccgctccgtgtaacctaagtgcgctgcaggcaaagcccaggccacggctgcgtcactactgatgttcacgatgccacacagtcacacacctaattcattctcaagtcggagcaacacataccaaccttgaccttatcctcaagctcccagggcagcctggccgagcagcccctgctccctcctggagacccttgtcacctcccgagctcctcctggagacccctgtcacctcctgaccaacctttcccagggcggcaccgatcaccgagcagccgtgcgtgtatctcaaggaactaaataagatgacgctactcctcatagcaccacaacctgaatgtgtgttcatatttttttgttagttttatccaaaatgtttaagatcccaacaaactttattttctaaacctgca

SEQ ID NO: 262411 - DNA, 1023 bp, Homo Sapiens
gggcactgctgccatcggtacccggaaacccatcaatatttttcacatcggcagtaggagcactccacggggatggaagacatctcaaccatgggccaagcctgtgcatgaggaggtagcccagacaaaggcactgggaaggaggggtcagcccatcatggtgtctaaaaacatatttagcattatctttctctgctgtgaaaaacaggtgcggactgagtgctctgtgtaaccaaaagatggcccttcaaagacagctgttgggagcttcagaacttccttcagaaactggtcaaacttgctaaatatcattaagccattggaatctgacatctgggagaaaacatatctcaatttgtccagcatttttccaccacacatggttgctaacatagctttaactgaaaataccgtcaacttgcctcggccctcactgtcatatgcagcaatcataaagttgaggaggaggctgatagattgttccacactaatttggtgagtagaaggaaggcgcttgttcaactgatagtagatggaggagatgacagtttcgaggcgggacacactgatctcggtggtatggtccagtgtattaaggccattgtctcggaaggcttcaatcatgttccagatatcaacaagatgaaggttgcatcgtttttgtacaaatcgtaatttgcaggctgttctgtaagttgatagtcgtatgacatcaaaattctgagcacgcatttctatgaacagctgcctcttctctgccatggtcttccgcttgttcccactttcctcaatcatccttgctcacttccccgccggagcaggggtcgtcgggaaggtctcctgcggcctcactcctccgcacgctccggcccagccccctcggctgaggcagcggcagcgcctactcaggccccggagccacccccgcggcgaacgttcgcagcgcccggctcgcgccgcttctccgcccggcacgcgcagcgcccgcccccggcgcctcgtgccgaattcgccactcaggcc

SEQ ID NO: 262412 - DNA, 1035 bp, Homo Sapiens; identical to SEQ ID NO: 102247
  misc_feature (793)..(808): n is a, c, g, or t
  misc_feature (945)..(945): n is a, c, g, or t
  misc_feature (957)..(957): n is a, c, g, or t
  misc_feature (961)..(961): n is a, c, g, or t
  misc_feature (965)..(965): n is a, c, g, or t
  misc_feature (978)..(978): n is a, c, g, or t

SEQ ID NO: 262413 - DNA, 1087 bp, Homo Sapiens
gtggagggaggaaatagtaaatgagcttcttatgcttacagcatatctgatttcatcctcttccattccctccttccttatttttttcttctgctagatttctaacgacccaagtccaggatacaacattgaacagatggcaaagcgaggcaagaagctggttgagctgccatacactgtaaaggggatggacgtctcattctcagggatcctgtctttcattgaggatgtagcccatcggatgctggccacaggcgagtgtactcctgaggatctgtgtttctccctgcaggtaatgcagtaaaaaactgggacagaaagttggggctgaaggttttatattgtagagcagaactaatctgggatgcccctctaatattttctccttatctgtccctgacaggaaactgtgtttgcaatgctggtagagatcacagagcgagccatggcacattgtggctcccaggaggccctcattgtgggaggagtggggtgtatgtattattgaaaagtgttcctctttcctattcttaacactatgcgtcttcctcctggtactctaaatcattaagcgtttggagtaggcttcccaatccttgcccctaatcccctatgtcattgttctaagtgagtgcacatgacgtgttctgctggacccatgaagagatgcctaaaactaagcttaatccctgttcccctgcctctttgtaggtaatgtgaggctacaggagatgatggcaacaatgtgccaggaacgtggagcccggctttttgctacagatgagagattctgtattgacaatggagcgatgatagcccaggctggctgggagatgtttcgggctggacacaggaccccactcagtgattctggggttacacagaggtatcggacagatgaagtagaggtgacctggagggactaataagatcaacagaatcagagtagatagttccttaatcggaacccaaaggaccccgtgcctcaatctctatcctgatgtcatgggagtcctagcaaagctatagactacaagcaaggcttggggtcctttatggaaccccaggatgactcagcaataaaata

SEQ ID NO: 262414 - DNA, 927 bp, Homo Sapiens
gaacagcgttttttcggcgtcttgcattaattccggcccagtacttgacttcggacctgggtccccatctgttgccaaaaagcttcccggaggccaaggggtctggggcctgcgtagactaagggggtggtggggccccggttctcaaaaagggcagagcgggatccccgccagggggcaagggtccctctaggccccccaaagtgaataaaggccggtcccagcgattccgaggaatcgggagcctcaaagcgcaagcgtaagggcctccaggagttcgggagagtaaaaggcaccgggacccatgcttggcagattcctctgaatcccggagtcacaagagctggagactccgcagccccggattcttctcgctccagttccttgggtacgtcggcctgggcacttccatttactacagagtccgcagtatgcagttccctgaggacgctgctgcccgccgcctgggctctcccgtcctcctcagcgcgtggccgccaactcacactgacgttccggccagggttctcgttcgcgcccgccacctgaggtcccgcgatcgggccgccgggccgtacgcagtagaccaggcagagcggggtgcgcgccgcccgtgccaggcagtagagctcgtaacggaaacctttgatgtagttaagcgagtccaggatgaccacgtcgtggcgactcaggcgccgttccacggaggctcgcagagctccacgcaatgccttctcacgggcagaatcgccgtacaccgctgggtcctctgcgcccaggacagctgcgtcgtccaccacgtacaccgcgcggccctcggcagccagcgccacgcgcaactcttcagcacgccggctcttgccgctgtacggcagcccgcaaaacaccacgagcggcatcctctcagggagcgaccattgcaaccgc

SEQ ID NO: 262415 - DNA, 862 bp, Homo Sapiens
ttctcttccgccgaagccgctccccttgcgaagaactggggcctcccgggaggagagagggctttgccttgaaacccgggacgccaggggcgctcccgcaagtgggggtcctccgggacttggaacgccccggctgggtggtgtccgggcgtcctttccccgcttcttcccacctcggctggtcccgtttcctcctgcgcccagtgcggacctgtctcggcgcccgctgccctctcaccgccccacgcaggatcccggcctggtcaccgggcagtgtgatgcttcccgactgccgcggggacagcgaggcacacacagggcttgggccgcgccggaggccacacggcctggctgagttgctcctggtctcccgcctctcccaggcgacccggaggtagcatttcccaggaggcacggtcccccccagggggatgggcacagccacgccagatggacgagaagaccaagaaagcagaggaaatggccctgagcctcacccgagcagtggcgggcggggatgaacaggtggcaatgaagtgtgccatctggctggcagagcaacgggtgcccctgagtgtgcaactgaagcctgaggtctccccaacgcaggacatcaggctgtgggtgagcgtggaggatgctcagatgcacaaccgtcaccatcttggctcacagtggcgccctgatatgacagtggcgtctctcaaggacatggttattctggactatggcttcccaccagtcttgcagcagtgggtgattgggcagcggctggcacgagaccaggagacctgaactcccatggggtgcggcacaatggggacagtgcctaactctatctgtgtcagcccgcaaaactccc

SEQ ID NO: 262416 - DNA, 1040 bp, Homo Sapiens
  misc_feature (945)..(945): n is a, c, g, or t
acggcagtaactctaacggtgctaaggtagcgaggctgggtggcgaattcggcacgagggccgcgccggaggcccacggcctggctgagttgctcctggtctcccgcctctcccaggcgacccggaggtagcatttcccaggaggcacggtcccccccagggggatgggcacagccacgccagatggacgagaagaccaagaaagcagaggaaatggccctgagcctcacccgagcagtggcgggcggggatgaacaggtggcaatgaagtgtgccatctggctggcagagcaacgggtgcccctgagtgtgcaactgaagcctgaggtctccccaacgcaggacatcaggctgtgggtgagcgtggaggatgctcagatgcacaccgtcaccatctggctcacagtgcgccctgatatgacagtggcgtctctcaaggacatggtttttctggactatggcttcccaccagtcttgcagcagtgggtgattgggcagcggctggcacgagaccaggagaccctgcactcccatggggtgcggcagaatggggacagtgcctacctctatctgctgtcagcccgcaacacctccctcaaccctcaggagctgcagcgggagcggcagctgcggatgctggaagatctgggcttcaaggacctcacgctgcagccgcggggccctctggagccaggccccccaaagcccggggtcccccaggaaccccggacgggggcagccagatgcagtgcctgagcccccaccggggggctggcagtgccccgggggcaccttcatcaacaagcccacgcggcctggcctgggagatggggctgccgggcgcgcccccaagggcctaccagggccccgcctcataccaaccccgacgaggagagagcgactcgtcctgcgggcgcaaggagggggccttgcttcaatacccgnagcgggaagaaacggcgtctagagggggaactcccttgccaccgccctcggtggcaccgcaaggaactcgggcgtgaacgcccggaccccgcccc

SEQ ID NO: 262417 - DNA, 1069 bp, Homo Sapiens
ctgagggtccggtctccagtttgcctcctgctatatccattggaagagaaaagtttgtgacttgggcccccaagttttgagagaactgggctttcggcgcggggggacagaggaggctcgtggggagctttccccatggagcttacccagcctgcagaagacctcatccagacccagcagacccctgcctcagaacttggggaccctgaagaccccggagaggaggctgcagatggctcagacactgtggtcctcagtctctttccctgcacccctgagcctgtgaatcctgaaccggatgccagtgtttcctctccacaggcaggcagctccctgaagcactccaccactcttcaccaaccggcagcgagggaacgaggtgttcagctctgccggccaccctagaattccctgttccatccaccagctcgcagcacagggggagctggaccagctgaaggagcatttgcggaaaggtgacaacctcgtcaacaagccagacgagcgcggcttcacccccctcatctgggcctccgcctttggagagattgagaccgttcgcttcctgctggagtggggtgccaacccccacatcctggcaaaagagcgagagagcgccctgtcgctggccagcacaggcggctacacagacattgtggggctgctgctggagcgtgacgtggacatcaacatctatgattggaatggagggacgccactgctgtacgctgtgcgcgggaaccacgtgaaatgcgttgaggccttgctggcccgaggcgctgacctcaccactgaagccgactctggctacaccccgatggaccttgccgtggccctgggataccggaaagtgcaacaggtgatcgagaaccacatcctcaagctcttccagagcaacctggtgcccgctgaccctgagtgaaggccgcctgccggggactcagacactcagggaacaaaatggtcagccagagctggggaaacccagaactgacttcaaaggcagcttctggacaggtggtgggaggggacccttcccaagaggaaccaataaaccttctgtgcagaa

SEQ ID NO: 262418 - DNA, 420 bp, Homo Sapiens
ttctgcacagaaggtttattggttcctcttgggaagggtcccctcccaccacctgtccagaagctgcctttgaagtcagttctgggtttccccagctctggctgaccattttgttccctgagtgtctgagtccccggcagcggccttcactcagggtcagcgggcaccagggttgctctggaagactttgaggatgtggttctcgatcacctgttgcactttccggtatcccagggccacggcaaggtccatcggggtgtagccagagtcggcttcagtgggtgaggtcagcgcctcgggccagcaaggcttcaacgcatttcacgtgggttcccgcgcacaggtaacagcagtgggcgttccctccattctggtcgtggggtagggggcaggagaaaccaaaggtttaaccttttcctt

SEQ ID NO: 262419 - DNA, 918 bp, Homo Sapiens
ggggaagtcctgcgagcgacgcgcggcggggcggcgagaggaaacgcggcgccgggccgggccctggagatggtccccggcgccgcgggctggtgttgtctcgtgctctggctccccgcgtgcgtcgcggcccacggcttccgtatccatgattatttgtactttcaagtgctgagtcctggggacattcgatacatcttcacagccacacctgccaaggactttggtggtatctttcacacaaggtatgagcagattcaccttgtccccgctgaacctccagaggcctgcggggaactcagcaacggtttcttcatccaggaccagattgctctggtggagagggggggctgctccttcctctccaagactcgggtggtccaggagcacggcgggcgggcggtgatcatctctgacaacgcagttgacaatgacagcttctacgtggagatgatccaggacagtacccagcgcacagctgacatccccgccctcttcctgctcggccgagacggctacatgatccgccgctctctggaacagcatgggctgccatgggccatcatttccatcccagtcaatgtcaccagcatccccacctttgagctgctgcaaccgccctggaccttctggtagaagagtttgtcccacattccagccataagtgactctgagctgggaaaggggaaacccagggaattttgctacttggaatttggagatagcatctgggggacaagtggagccaggtagaggaaaaagggtttgggcgttgctaaggctgaaagggaagccacaccactggccttcccttccccagggccccccaagggtggtctccatgctacaagaagaaggcaagaaacaggcccccagggctttctgggctaaaaacccaaaaccaaaagggaccgtgaa

SEQ ID NO: 262420 - DNA, 916 bp, Homo Sapiens
aggctggaccggccggattcccgggatctcggacagcggaaatcacttcttggaggtgccctgcacgccggtcctgggagcaggcggcctcccgggggtgcgggagccccactcctccgtggtgtgttccatttgcttcccacatctggaggagctgacgtgccagcctcccccagcaccacccagggacgggaggcatgagccggtcaaggcacctgggcaaaatccggaagcgtctggaagatgtcaagagccagtgggtccggccagccagggctgactttagtgacaacgagagtgcccggctggccacggacgccctcttggatgggggttctgaagcctactggcgggtgctcagccaggaaggcgaggtggacttcttgtcctcggtggaggcccagtacatccaggcccaggccagggagcccccgtgtcccccagacaccctgggaggggcggaagcaggccctaagggactggactccagctccctacagtccggcacctacttccctgtggcctcagagggcagcgagccggccctactgcacagctgggcctcagctgagaagccctacctgaaggaaaaatccagcgccactgtgtacttccagaccgtcaagcacaacaacatcagagacctcgtccgccgctgcatcacccggactagccaggtcctggtcatccctgatggatgggttcacgggatgtgggagatcttctgtgacattctaaaggcagccaacaagcctggggggttcggtttgtgggcctcctggaaacaggggaggtgtgaaacctctttccagaagatgtgtggacaaagtcccagaactcctacagtcaccctcaagaaacttttcccatccggaatggtggaagggaaaaatatacctgtggccaaagtccagca

SEQ ID NO: 262421 - DNA, 1295 bp, Homo Sapiens
  misc_feature (763)..(763): n is a, c, g, or t
tatgcgcccctgcttaccacgaaaaaaataaaggggcgcccttcgttggagacccctttccgggttctttggaatttttcagacaggggcccccaaattccgggagatggcccaaattccaagatcctgggttgatttattccccagaaccccccttttatggcaaatccagggttccctgaacggttccaatgtccagccatgcaagtggggaatggttggggcctgattcgggggaggtgtttcatttaggagataaaaggtagccagatcttctggtggagaaaggtgtatcatggtctggcccaggcagtgaaattcagatgggaaatatgggcgcacctctctggtctgaatatcttcaggggttcattgccctcaccacaaagcctttcagctgctgcattctcacaagagccagtcgaagtctgttgctgaccattgttgttttgcataggatgttgggccaaatagcgctggcatttgattttttctccttctacttcttgagtcatcatggctatcactgtggatttttgctcccaaatcatctgccagaagtctccaacagttgtaggcagtggtccttggcaggcaatgtaaacgaactcttctttccccaactggtatcttaatgaagctggcattgatatagccaccttcatctccaagaggcactcttgtagcatcatagggaagtatatttttatatctgttcttccttctgttttccttagtttgcccaattagacactgatccaanaggttttaattcttgaagattctccagctccttagaaggaattccttgatctagcaaaccccgcaggactcgaatgactgattttaagttggcacccgtgtatttaccagagggaagcactttgacgacagggagtacagcgagctcatcgtttgtcagaaaggaatgatctttatcagaatcttcatggtttgttatctctattggcaactcatcatttccccatgttatttcatcatcatcagtcttcttttcttgtggcttctgaattaagctttcactttttactttttcttcacaatattcttcacagccattcattttggtggcctcagtaaaatactcaggtaaaggtgaaccatcgcagtctgtatcttctgttctctcttctgataacttcccattcatctttaatgtacctggaccacaggagtctcctgctgcattattttcgtttaaaagattctgggcttcctcatccacaacatccagcagagactggataacttcagcttcttgggaatcatcatcc

SEQ ID NO: 262422 - DNA, 972 bp, Homo Sapiens
  misc_feature (217)..(244): n is a, c, g, or t
  misc_feature (848)..(848): n is a, c, g, or t
  misc_feature (916)..(916): n is a, c, g, or t
  misc_feature (927)..(927): n is a, c, g, or t
gggaaggagcctctctcttcagaagcatgtcaggatatctttggtaggcatcatgttctgtttacttgaaccagtgagaagatggccgagcaagcaaggataagtttttgagtatccgaggagcccaggaggaggaacccacagacccccagctgatgcggctggacaacatgctgttagcggaaggcgtggcggggcctgagaagggcggagggtnnnnnnnnnnnnnnnnnnnnnnnnnnnnttctggaggggcaggttcagacaactcagtggagcattcagattacagagccaaactctcacagatcagacaaatctaccatacggagctggagaaatacgagcaggcctgcaacgagttcaccacccacgtgatgaatctcctgcgagagcaaagccggaccaggcccatctccccaaaggagattgagcggatggtcagcatcatccaccgcaagttcagctccatccagatgcagctcaagcagagcacgtgcgaggcggtgatgatcctgcgttcccgatttctggatgcgcggcggaagagacggaatttcaacaagcaagcgacagaaatcctgaatgaatatttctattcccatctcagcaacccttaccccagtgaggaagccaaagaggagttagccaagaagtgtggcatcacagtctcccaggtatcaaactggtttgggaaataagcgaatccggtacaagaagaacataggtaatttcaagaggaaagccatatttatgctgccaaaacagctgtcactgctaccaatgtgtcagcccatggaagccaagctaactcgccctcaactcccaactcggctggttcttccagntctttttacatgtcaaactctggaagattgttcatgagcgtgcagtcactcaatggggatcctaccangggggcccagnttggacccacgtgcaatcccagggtggatacctttcgccatgttc

SEQ ID NO: 262423 - DNA, 1661 bp, Homo Sapiens
  misc_feature (826)..(826): n is a, c, g, or t
cggacgcgtggggtggtaaagctgaacatgaaaatctttttcgtgagaatgattgcattgtcaggattaatgatggcgaccttcgaaatagaagatttgaacaagcacaacatatgtttcgccaagccatgcgtacacccatcatttggttccatgtggttcctgcagcaaataaagagcagtatgaacaactatcccaaagtgagaagaacaattactattcaagccgttttagccctgacagccagtatattgacaacaggagtgtgaacagtgcagggcttcacacggtgcagagagcaccccgactgaaccacccgcctgagcagatagactctcactcaagactacctcatagcgcacacccctcgggaaaaccaccatccgctccagcctcggcacctcagaatgtatttagtacgactgtaagcagtggttataacaccaaaaaaataggcaagaggcttaatatccagcttaagaaaggtacagaaggtttgggattcagcatcacttccagagatgtaacaataggtggctcagctccaatctatgtgaaaaacattctcccccggggggcggccattcaggatggccgacttaaggcaggagacagacttatagaggtaaatggagtagatttagtgggcaaatcccaagaggaagttgtttcgctgttgagaagcaccaagatggaaggaactgtgagccttctggtctttcgccaggaagacgccttccacccaagggaactgaaagcagaagatgaggatattgttcttacacctgatggcaccagggaatttctgacatttgaagtcccacnttaatgattcaggatctgcaggcccttggtgtcagtgtcaaaggtaaccggtcaaaagagaaccacccagatttgggaatcttttgtcaagtccattatttaatggaggagcagcatccaaagatggaaggcttcgggtgaatgatcaactgatagcagtaaatggagaatccctgttgggcaagacaaaccaagatgccatggaaaccctaagaaggtctatgtctactgaaggcaataaacgaggaatgatccagcttatggttgcaaggagaataagcaagtgcaatgagctgaagtcacctgggagcccccctgggacctgagctgcccattgaaacagcgttgggatgatagagaacgaaggaatttcccattccctcttacagtgggattgaggggcttgatgaatcgcccagcagaaatgctgccctcagtaggataatgggtaaataccagctggtccctacagtgaatatggcccaagatgacactgtcattatagaagatgacggtggccagtgcttctccacatctttctgaccagtctctccgctcccgtgatgatgtgggcttggtgacgggcgatgctggaccttgggcaggtgtgcaatcggattcgccgatgccttggtcccgatgtgacagtctgcttcacgacaggttgcgtccagttgcgagaccaagcattcgctccgtcatggtgtgaacgacacacagcggtcggcgcgccacaccccgggcgcagctccactggtctcgtcagacctgcgacccggaggggtctgcgcgacgcggcgaccccgtgtgttcgtcctctcacgcgctcctgccg

SEQ ID NO: 262424 - DNA, 983 bp, Homo Sapiens
cgctgtgcagccgctgctgcccaggccccacggcgctttgagtgtggcacctgtggcaagaaagtgggctcagctgctcgactgcaggcacacgaggcggcccatgcagctgctgggcctggagaggtcctggctaaggagccccctgcccctcgagccccacgggccactcgtgcaccagttgcctctccagcagcccttggaagcactgctacagcatcccctgcggcccctgcccgccgccggggtctagagtgcagcgagtgcaagaagctgttcagcacagagacgtcactgcaggtgcaccggcgcatccacacaggtgagcggccatacccatgtccagactgtggcaaagcgttccgtcagagtacccacctgaaagaccaccggcgcctgcacacaggtgagcggccctttgcctgtgaagtgtgtggcaaggcctttgccatctccatgcgcctggcagaacatcgccgcatccacacaggcgaacgaccctactcctgccctgactgtggcaagagctaccgctccttctccaacctctggaagcaccgcaagacccatcagcagcagcatcaggcagctggggcggcagcaactggcaaaaggcggaggctgcccgttggcctggccgtcatggagactgctgtggaggcgctacccctggtggaagccattgagatctaccctctggccgaggctgagggggtccagatcagtggctgactctgcccgacttcctctttggcacctccattccctgttgctgaaggccctccagcatccccttaagcatctgtacatactgtgtcccttcctcttcccatccccaccaccttgtaagttctaaattggatttattctctcgtgaggggggtgctctggggtccttgacacacataaaggtgcccccccaccttccacctcttagcactggtgaccccaaaaatgaaaccatcaataaagactgagttgcc

SEQ ID NO: 262425 - DNA, 2194 bp, Homo Sapiens
  misc_feature (16)..(16): n is a, c, g, or t
  misc_feature (1364)..(1479): n is a, c, g, or t
  misc_feature (2003)..(2003): n is a, c, g, or t
ccattctttcctcccncactcctcccactttccttcctccgcctgtacaaaaagcagggctggggtaccggatccggaattcagggatggccaggctggggcaggtttaccagcagaggcctcgctcgggcgcccagtggtcctgccgcctggtctcacctcgccatggttcgtctgcctctgcagtgcgtcctctggggctgcttgctgaccgctgtccatccagaaccacccactgcatgcagagaaaaacagtacctaataaacagtcagtgctgttctttgtgccagccaggacagaaactggtgagtgactgcacagagttcactgaaacggaatgccttccttgcggtgaaagcgaattcctagacacctggaacagagagacacactgccaccagcacaaatactgcgaccccaacctagggcttcgggtccagcagaagggcacctcagaaacagacaccatctgcacctgtgaagaaggctggcactgtacgagtgaggcctgtgagagctgtgtcctgcaccgctcatgctcgcccggctttggggtcaagcagattgctacaggggtttctgataccatctgcgagccctgcccagtcggcttcttctccaatgtgtcatctgctttcgaaaaatgtcaccccttggacaagctgtgagaccaaagacctggttgtgcaacaggcaggcacaaacaagactgatgttgtctgtggtccccaggatcggctgagaaccctggtggtgatccccatcatcttcgggatcctggtttgccatcctctgggggctggtctttatcaaaaaggtggccaagaagccaaccaataaggccccccaccccaagcaggaaccccaggagatcaattttcccgacgatcttcctggctccaacactgctgctccagtgcaagagacctttacatggatgccaaccgggtcacccaggaggaaggcaaagagagtcgcatctcagtgcaggagagacagtgaggctgcacccacccaggagtgtggccacgtgggcaaacaggcagttggccagagagcctggtgctgctgctgctgtggcgtgagggtgaggggctggcactgactgggcatagctccccgcttctgcctgcacccctgcagtttgagacaggagacctggcactggatgcagaaacagttcaccttgaagaacctctcacttcaccctggagcccatccagtctcccaacttgtattaaagacagaggcagaagtttggtggtggtggtgtaggggtatggtttagtaatatccaccagaccttccgatccagcagtttggtgcccagagaggcatcatggtggcttccctgcgcccagcnnnnnnnnnnnnnnnnnnnnnnnnnnnnnnnnnnnnnnnnnnnnnnnnnnnnnnnnnnnnnnnnnnnnnnnnnnnnnnnnnnnnnnnnnnnnnnnnnnnnnnnnnnnnnnnnnnnncacacgggacgtacaacagacgagacgggtaaaaaccctgggcgggccgccttgggccccctcgcaaaaagccttttcaaaaaccccttcagttctgggcgccgccggggccccaagttagcgcgacaactgtggaaaacactgggtccacttaagtgttgtctatccccttaaagaaaaaaaccccgtgggagaccaggtgggacattgaatgggggcttttcgggcaattgccctttcccacccccatctacttaagcacctaaaacgcccacccccctctgtggcggcggggcccccacaccctcccgcgaaccgcgcgtgttcttatgcgcaacgccccccgatcttcccccgccataacatcacgtgaaacgcatgtcatcttacacaccaaacccccctctattaaaactcgcggcagacacgctttaatgccgcacaccaccggggcgagcggccccacatccatgaggagacaggctctcccccgatagagcctctcagcgtcgttaacggcatcncccccggcaccccctaggcgcccaggcttcagcacttgagtcaggtgagggccggtgcgcgcggcgcgacagagagtcatatactacaacccagctcgttctcttggctccggggaatacgggggaggaagaccgagagtaagcagaaaaccgcgatacctccgccgatgatgatgctcgggcaaaacgca

SEQ ID NO: 262426 - DNA, 1632 bp, Homo Sapiens
  misc_feature (1389)..(1530): n is a, c, g, or t
  misc_feature (1543)..(1557): n is a, c, g, or t
  misc_feature (1585)..(1593): n is a, c, g, or t
gggatcctcccccgctgcctccgctgctcccgacgcggagcccggagcccgcgccgagcccctggcctcgcggtgccatgctgccccggcggcggcgctgaaggatggcgacgccgctgcctccgccctccccgcggcacctgcggctgctgcggctgctgctctccggcctcgtcctcggcgccgccctgcgtggagccgccgccggccacccggatgtagccgcctgtcccgggagcctggactgtgccctgaagaggcgggcaaggtgtcctcctggtgcacatgcctgtgggccctgccttcagcccttccaggaggaccagcaagggctctgtgtgcccaggatgcgccggcctccaggcgggggccggccccagcccagactggaagatgagattgacttcctggcccaggagcttgcccggaaggagcctggacactcaactccgcccctacccaaggaccgacagcggctcccggagcctgccaccctgggcttctcggcacgggggcaggggctggagctgggcctcccctccactccaggaacccccacgcccacgccccacacctccctgggctcccctgtgtcatccgacccggtgcacatgtcgcccctggagccccggggagggcaaggcgacggcctcgcccttgtgctgatcctggcgttctgtgtggccggtgcagccgccctctccgtagcctccctctgctggtgcaggctgcagcgtgagatccgcctgactcagaaggccgactacgccactgcgaaggcccctggctcacctgcagctccccggatctcgcctggggaccagcggctggcacagagcgcggagatgtaccactaccagcaccaacggcaacagatgctgtgcctggagcggcataaagagccacccaaggagctggacacggccctcctcggatgaggagaatgacgacggagacttcacggcgtacgagtgcccgggactggccccgaacggggaaaatggaggtgcgcaaccctctgttcgaccacgccgcactgtccgcgcccctgccggcccccagctcaccgcctgcactgccatgacctggaggcagacagacgcccacctgctccccgacctcgaggcccccggggaggggcagggcctggagcttcccactaaaaacatgttttgatgctgtgtgcttttggctgggccttgggctccaggccctgggaccccttgccagggagacccccgaacctttgtgccaggacacctcctggtcccctgcacctctcctgttcggtttagacccccaaactggagggggcatggagaaccgtagagcgcaggaacgggtgggtaattctagagacaaaagccaattaaagtccatttcagaatnnnnnnnnnnnnnnnnnnnnnnnnnnnnnnnnnnnnnnnnnnnnnnnnnnnnnnnnnnnnnnnnnnnnnnnnnnnnnnnnnnnnnnnnnnnnnnnnnnnnnnnnnnnnnnnnnnnnnnnnnnnnnnnnnnnnnnnnnnnnnntttcttggggcgnnnnnnnnnnnnnnntaaaaaatttttcaaacccctttcgttnnnnnnnnncccccaaaagaaaaggcaaaggggccaccttttttcccc

SEQ ID NO: 262427 - DNA, 1198 bp, Homo Sapiens
tggcgaattcggcacgaggagaggacgtttctgctacacaagagtattgacgtaacaggtgacccaaagtctctgagacccaagcagaccttggagaaggatctgaaggaaaacagggaagagaacccaggactgacatccccagagcctcagcttccaaagagtcccacagatctggtgagagcaaaggaggggaaggaccccccaaaaatagcctctgtggaaaatgtggatgctgacacaccttctgcctgcgttgtggagagagaagcttcgactcacagcgggaacagaggagacgctctgaatctgagcagtcccaaaagaagcaaaccagatgcctcctccatttcccaagaagagcctcaaggagaagccacacctgtgggcaacagagaatccccaggacaagctgggatgaattcaattcattccccaggccctgcgagcccagtcagtcacccggatggccaagaagccaaggcactgccgccctttgcatgtgacgtgtgcgagaagaggtttacgtgtaattccaagctagtcatccacaagagatcacacacaggcgagagactctttcaatgtaatctctgtgggaagcgcttcatgcagcttattagcctccaatttcaccagcgaacccacactggcgagaggccctacacgtgtgacgtctgccagaagcagttcacccagaagtcctacttgaagtgtcacaagagaagccacacaggggagaagcccttcgaatgtaaagactgcaagaaagttttcacctacagggggagcctgaaaggagcaccagcgcatccactcccggagagaaaccctacaaatgttccaaagggtccaagagcccttcagtcggctggaaatggttaagaccgccaccagaaaacacatccagaagctacttctcagtgattgcataatccggtctatgccttctgcaccaagaagaagtgaatgatatttttcatcaatgttatcagatgacatttgacacatgcaagggcgtctgacacacagagggagtgccctagatatgaattgccaggatgtttgagtaaatatgtgtcctccccactgagctttgttttctgtttcattatgtccattgttttcttataggtttattttggtttgtgttgctgttcttccaataaacgatcatcttattagttttcaatattgt

SEQ ID NO: 262428 - DNA, 536 bp, Homo Sapiens
ccttcttatgacccatccagtccacaaaccagccagcctaacggcagtggtcaagtagtagggaaagtgcctggccatttcactcctgtcttggcaccctctccccatcccagtgcagtgcgacctgtgaccctgagcatgacagatactaaacccatcactacatccactgaaggtgaggcagcttcacctacagcaaccacctacacagcttcaggcacatctcaagccaatcgatatgtgggactaagcccaagagacccatccttcctacatcagcaacagctgaggatttgtgactggaccatgaatcaaaacggcaggcatttataccccagtaccagtgaggatacattgggaattacttggcaaagtcctggtacctgggctagcttggttcctttccaagtgtcaaataggacacccatcttaccggccaatgtccaaaattacggtttgaacataattggagaacctttccttcaagcagaaacaagcaactgagggaaaaagaaacacaacaatagtttaagaaa

SEQ ID NO: 262429 - DNA, 1282 bp, Homo Sapiens
  misc_feature (788)..(984): n is a, c, g, or t
gggttcctttctatcccactttcaaggagggaatggctttggaagactatcagaggatgcttggttaccaagtaaaggattccaaagtggagcagcaagacaactttctaaaacgcatgtcagggatgatccgtctctacgctgctatcatccagctccggtggccatatggaaaccgacaggagattcaccctcatggcttaaatcatggatggcgctggttggcacagatcttaaacatggagcccttgtcagatgtgacagccaccctcctctttgacttcctggaggtgtgtgggaatgccctcatgaagcaataccaggttcagttctggaagatgctaattctcatcaaagaggactactttcccagaattgaagctatcacaagctcaggacagatgggctccttcatacgcctcaagcagttcttggagaaatgtttgcaacacaaggacattcctgtccccaagggctttctgacttcctccttctggcgctcctgatgtcactccatcacccaccatcaccgctgctgcaaagaggcaataataaaggaactgaagacagctgtatttgggagaagtcatgtcagattcagaaatttgccattatgtatttttatgtatttatgcccttgtgactaggagaggagattttcatgggtcacaaaattcttggaggtcccttagtagatttggtagttcccttaagagatccacgtgaataaaataaatggagttggccttttcttggttttttgcaaaagtgataaaaggtctttagcnnnnnnnnnnnnnnnnnnnnnnnnnnnnnnnnnnnnnnnnnnnnnnnnnnnnnnnnnnnnnnnnnnnnnnnnnnnnnnnnnnnnnnnnnnnnnnnnnnnnnnnnnnnnnnnnnnnnnnnnnnnnnnnnnnnnnnnnnnnnnnnnnnnnnnnnnnnnnnnnnnnnnnnnnnnnnnnnnnnnnnnnnnnnnnnnnnnnnagaaaagggggcgccccattggggcggggcctataataaaaatacgggcgcgggcccccctttttttaccaccgccccgggcggggggaaaaacaactgtccccccggggagacttttctggcaagaaaacccctcttttctttgggggggcgggcccccaatttggtggacaaaaccccctccccgcgaaaatattttaccgccctcctcggagcgcaacaaaaataaacctatttctccacccgtgtttaaagagggcggataaaaacaaaaaccggtacaaaaaagcgctgcggg

SEQ ID NO: 262430 - DNA, 1052 bp, Homo Sapiens
ggtcactgtgctgaacgagtacgagcgggccctggacgtggcggcagagcccaagcacgagcggcagcgccgagcccagatacgcaagaacatcacggagactctggtgtccctgagggtccacactgtggatgacatccagcagatcgctgctgcgctggcccagtgcatggggcccagcagggagctcgtatgccgctcgtgcctgaagcagacgctgcacaagctggaggccatgatgcgcatcctgcaggcagagaccaccgcgggcaccgtgacgcccaccgccatcggagacagcatcctcaacatcacaggagacctcatccacctggccagctcagacgtgcgggcaccacagcgctcagagctgggagccgagtcaccatcgcggatggtggcgtcccaggcctacaacctgacctctgccctcacgcccatcgtcacgcgctcccgcgtgctcaacgaggagcccctgacgctggcgggctttcagcagggccccggccaacctcagtgacgtggtgcagctcatctttctggtggactccaatccctttccctttggctatatcagcaactacaccgtctccaccaaggtgggcctcgatggcgttccagacacaggccggcgcccagatccccatcgagcggctggcctcagagcgcgcctcaccgtgaaggccgctacctgtctgaggaacccgagccctacctggcagtctacctgcactcggagccccggcccaatgagcgcaactgctcggctagcaggaggatccgcccagagtccctccagggtgccgaccaccggccctacaccttcttcatttccccggggaccagagacccagtggggagttaccgtctgaacctctccagccacttccgctggtcggcgctggaggtgtccgtgggcttgtacacgtccctgtgccagtacttcagcgaggaggacgtggtgtggcggacagaggggctgctgcccctggaggagacctcgccccgccaggccgtctgcctcacccgccacctcaccgccttcggcacca

SEQ ID NO: 262431 - DNA, 1100 bp, Homo Sapiens
  misc_feature (460)..(510): n is a, c, g, or t
  misc_feature (775)..(775): n is a, c, g, or t
  misc_feature (779)..(779): n is a, c, g, or t
ggtgccgtcttctgatcttgcggatgaaaaggttgaaactgtttctcaaccatctgaaagcccaaaagataccatagataaaaccaaaaagcctcgtactcgaagatctagatttcattctccatctacaacttggtcacccaacaaagacactccacaagaaaagaagcggccccagtctccatctcccagaagagaaactgggaaagaaagcaggaagtctcaatcaccatctcctaagaatgagtcagccagaggccggaaaaaatcccgttctcagtccccaaaaaaggatattgcaagagaaaggaggcaatctcagtctcggtctccaaaaagggatactactagggaaagcagaagatctgaatcactgtccccaagaagagaaacttctagagagaacaaaagatctcagccaagagtgaaagattcttccccaggagaaaaatccaggtcnnnnnnnnnnnnnnnnnnnnnnnnnnnnnnnnnnnnnnnnnnnnnnnnnnnaaggagaaccagaaagtggtctaggtccagatctcattctaggtccccctcaagatgtagaacaaaaagtaagagttcatcatttggtagaattgacagagatagttactctccccggtggaagggaagatgggcaaatgatggttggagatgtccacgaggaaatgatcggtacagaaagaatgacccagagaaacagaatgaaaatacaagaaaagaaaaaaatgacatccatctagatgctgatgatccaaattctgctgancaancatagaaatgactgtccccattggaataacagaaaaaataaactctggggcctgatcccaagaaccagaaaatccagaaaaagtgaaagagtctcatttgggaggaaaatagaaattgaaaatttcggggaaattccttggaattaaaaaaacttttgggtcttggttggggaatctaacccgggggaaaaaggccaaaggccaaccgtgggccaaaggccctttaccgaaagaattttttgccccttttaaagtccccaaatgggaaatccggggggggaaaaatccaaaaaccccccccttcgggggaatttcaaacct

SEQ ID NO: 262432 - DNA, 1132 bp, Homo Sapiens
cgcggaggagcaggacgcttggtccggacggagctcggcgctgggaagaagccgggagcttccctgatggtgccgccgcctccgagccggggaggagctgccaggggccagctgggcaggagcctgggtccgctgctgctgctcctggcgttgggacacacgtggacctacagagaggagccggaggacggcgacagagaaatctgctcagagagcaaaatcgcgacgactaaatacccgtgtctgaagtcttcaggcgagctcaccacatgctacaggaaaaagtgctgcaaaggatataaatttgttcttggacaatgcatcccagaagattacgacgtttgtgccgaggctccctgtgaacagcagtgcacggacaactttggccgagtgctgtgtacttgttatccgggataccgatatgaccgggagagacaccggaagcgggagaagccatactgtctggatattgatgagtgtgccagcagcaatgggacgctgtgtgcccacatctgcatcaataccttgggcagctaccgctgcgagtgccgggaaggctacatccgggaagatgatgggaagacatgtaccaggggagacaaatatcccaatgacactggccatgagaagtctgaagaacatggtgaaagccggaacttgctgtgccacatgcaaggagttctaccagatgaagcagaccgtgctgcagctgaagcaaaagattgctctgctccccaacaatgcagctgacctgggcaagtatatcactggtgacaaggtgctggcctcaaacacctaccttccaggacctcctggcctgcctgggggccagggccctcccggctcaccaggaccaaagggaagcccaggcttccccggtatgccaggccctcctgggcagcccggcccacggggctcaatgggacccatgggaccatctcctgatctgtcccacattaagcaaggccggaggggccctgtgggtccaccaggggcaccaggaagagatggttctaagggggagacgaggagcgcctgggcccagagggtctccaggaaccccctggtctttcgaacttcctgctacttatgcttggtgacattcgcaatgacatcactgagctgcaggaac

SEQ ID NO: 262433 - DNA, 1189 bp, Homo Sapiens
  misc_feature (1098)..(1115): n is a, c, g, or t
tccagtctctcacccctgtgcgtgctgctctggagggaactcacaggcatccagccaggcacatccctgctcaccctgatgggcttcaggctggagggcattttcccagcggcgctgctgcccctgttgctgaccatgattcttttcctgggcccactgatgcagctctctatggattgcccttgtgacctggcagatgggctgaaggttgtcctggccccccgctcctgggcccgctgcctcacagacatgcgttggctgcggaaccaagtgatcgccccgctgacagaggagctggtgttccgggcctgtatgctgcccatgttagcaccgtgcatgggcctgggccctgctgtgttcacctgcccgctcttttttggagttgcccattttcaccatattattgagcagctgcgtttccgccagagcagcgtggggaacatcttcttgtctgctgcgttccagttctcctacacagctgtcttcggtgcctacactgctttcctcttcatccgcacaggacacctgattgggccggttctctgccattccttctgcaattacatgggtttcccagctgtttgcgcggccttggagcacccacagaggcggcccctgctggcaggctatgccctgggtgtgggactcttcctgcttctgctccagcccctcacggaccccaagctctacggcagccttcccctttgtgtgcttttggagcgggcaggggactcagaggctcccctgtgctcctgacctatgctcctggatacgctatgaactctcaccggctccccagccctccccaccaaggggtacctgcaggggaagggctggctgggggtccccgagatctcaggaatttttgtaggggattgaagccagagctagttggcgtccccagggaccaagagaaagaagcagatatccaaagggtgcagccccttttgaaaggggtgtttacgagcagctgtgagtgaggggacaaggggcaggtcccaggagccacacactcccttcctcactttggactgctgcttctcttagctcctctgcctctgaaaagctgctcggggttttttatttataaaacctctnnnnnnnnnnnnnnnnnnaacttcctgggttttctcattgtctttttgcatcagtactttgtattgggatattaaagagatttaacttgggt

SEQ ID NO: 262434 - DNA, 1238 bp, Homo Sapiens
  misc_feature (981)..(981): n is a, c, g, or t
  misc_feature (992)..(992): n is a, c, g, or t
  misc_feature (1001)..(1001): n is a, c, g, or t
gactgggtgcagctggaccggcctttcgaagatttcattgacaggaagacgacccctcggatgccatggcgggacgttggggtggtcgtccatggcctaccggcccgggaccttgcccggcacttcatccagcgctggaacttcaccaagaccaccaaggccaagtacaagactcccacatacccctacctgcttcccaagtctaccagcacggccaatcagctccccttcacacttccaggagggcagtgcaccaccgtacaggtcttgcgatcagtggaccgctggtcagcagggactctggagaactccatcctcaatgcctacctgcacaccatcagggagagccagcacttcctctacattgagaatcagttcttcattagctgctcagatgggcggacggttctgaacaaggtgggcgatgagattgtggacagaatcctgaaggcccacaaacaggggtggtgttaccgagtctacgtgcttttgcccttactccctggcttcgagggtgacatctccacgggcggtggcaactccatccaggccattctgcactttacttacaggaccctgtgtcgtggggagtattcaatcctgcatcgccttaaagcagccatggggacagcatggcgggactatatttccatctgcgggcttcgtacacacggagagctgggcgggcaccccgtctcggagctcatctacatccacagcaaggtgctcatcgcagatgaccggacagtcatcattggttctgcaaacatcaatgaccggagcttgctggggaagcgggacagtgagctggccgtgctgatcgaggacacagagacggaaccatccctcatgaatggggcagagtatcaggcgggcaggtttgccttgagtctgcggaagcactgccttcggtgtgattcttggagcaaatacccggccagacttggatcttccgagaccccatctgttgatgaattcttnccagttgtggncaagacatnggctgagagcaacgccaatatctatgagcagatcttccgctgcctgccatccaatgccacgcgttccctgcggactctccgggagtacgtggccgtggagcccttggccacggtcagtccccccttggctcggtctgagctcacccaggtccagggccacctggtccacttccccctcaagttcctagaggatgagtctttgctgcccccgctgggtagcaaggagggcatgatccc

SEQ ID NO: 262435 - DNA, 956 bp, Homo Sapiens
  misc_feature (517)..(878): n is a, c, g, or t
aagatggacgctgcatttcccggtttcgcggctacacctgcgcttgcgactctggcttccggctcagcccccagggcacccgatgcattgatgtggacgaatgtcgccgcgtgcccccgccctgtgctcccgggcgctgcgagaactcaccaggcagcttccgctgcgtgtgcggcccgggcttccgagccggcccacgggctgcggaatgcctggatgtggacgagtgccaccgcgtgccgccgccgtgtgacctcgggcgctgcgagaacacgccaggcagcttcctgtgcgtgtgccccgccgggtaccaggctgcaccgcacggagccagctgccaggatgtggatgagtgtgcccgaagccccccaccctgcacctacggccggtgtgagaacacagaaggcagcttccagtgtgtctgccccatgggcttccaacccaacactgctggctccgagtgcgagggtgaggccggggagggagggaggagtgtggatgggtgagggggcacccnnnnnnnnnnnnnnnnnnnnnnnnnnnnnnnnnnnnnnnnnnnnnnnnnnnnnnnnnnnnnnnnnnnnnnnnnnnnnnnnnnnnnnnnnnnnnnnnnnnnnnnnnnnnnnnnnnnnnnnnnnnnnnnnnnnnnnnnnnnnnnnnnnnnnnnnnnnnnnnnnnnnnnnnnnnnnnnnnnnnnnnnnnnnnnnnnnnnnnnnnnnnnnnnnnnnnnnnnnnnnnnnnnnnnnnnnnnnnnnnnnnnnnnnnnnnnnnnnnnnnnnnnnnnnnnnnnnnnnnnnnnnnnnnnnnnnnnnnnnnnnnnnnnnnnnnnnnnnnnnnnnnnnnnnnnnnnnnnnnnnnnnnnnnnnnnnnnnnnnnnnaccacttctttcctccctcccacctttctcatccgcctccctccccccagcctcccttccctcccaccttctcacctt

SEQ ID NO: 262436 - DNA, 1224 bp, Homo Sapiens
  misc_feature (75)..(75): n is a, c, g, or t
  misc_feature (100)..(100): n is a, c, g, or t
  misc_feature (293)..(293): n is a, c, g, or t
  misc_feature (1076)..(1092): n is a, c, g, or t
  misc_feature (1099)..(1099): n is a, c, g, or t
  misc_feature (1111)..(1119): n is a, c, g, or t
aaggcctgggcgagcggaagggtgggagagaggggctaggccggggagggaagcgctggggccggggccggcttntccaggagccggcgggagcggggtngcgtaagaggcgggcgaggaagaaccggcgggcaacgggaagggcagaggtggatctctccctcagcgacccctctcgccgagtgaagggtcgagggtttggggcacaaagggcgcagaacgttttttcctgttgagaggaacattaagactcctgggagggctggggctaacgcctccgagagccccacctnggtcagccttagggttagacgtgtacccaggatgctcgtgaggtggctcgctgatggacctggcatatgaggggaaaaggaacgcttcatcgaggctgccacaagccgtgcactgctgcggaatacccaccacactactagcgtggcacggaggtccgctagcaccgctataggtattcgcagcctggccatgtagagacgcaggaagccctaggggacttggagggcaaacacaggcctttgcaagggaaagaagtatcggccttacctgtaattcttggggatgggctcgccctcacaacgaaaactaacgacgcactctcccgggattggaggaccggccctggcctttcgtctcacggtgggctggctaggccgtacctttccccatggtgaagcgcggactggaaacgtataaaccaccggactcggctcctcgatagggcaatgccgcgtgcaaaacttgggtgcagccaatggcgaaccctccggaagaattggcccgaacttccggccccgggttgattgttaccagggtggggaaagggaaaggtggaagaaccccggggggggctttccgaaacggcggttgttccccgggaaacccaggggggttcccggtgccccccgctttttaaagagtgggcatttaaacttgggcctgtgggagaaagggaaaaggctttctctcctttaaggcccactctggtgggaaatagggggcccggggccctacctttgggagatcaacccggggagccccccccgcaaacaaaaatggtnnnnnnnnnnnnnnnnnatctctnggaacaggggannnnnnnnnaaaagaaatagggttgatgggcacacacgaaaaaccccccgcggggggggagggcttggtattatataaggggggagaatctcccctctcaaagaaaaatagtgt

SEQ ID NO: 262437 - DNA, 444 bp, Homo Sapiens
  misc_feature (184)..(184): n is a, c, g, or t
  misc_feature (272)..(272): n is a, c, g, or t
  misc_feature (275)..(275): n is a, c, g, or t
  misc_feature (330)..(330): n is a, c, g, or t
  misc_feature (335)..(335): n is a, c, g, or t
  misc_feature (420)..(420): n is a, c, g, or t
  misc_feature (428)..(428): n is a, c, g, or t
ggcacctgccagccgctggtcagacgagaaggacctgacccagctcttcatgttcgcccggaatgccttcaccgtgctggccatgatggactacccctaccccactgacttcctgggtcccctccctgccaaccccgtcaaggtgggctgtgatcggctgctgagtgaggcccagaggatcaanggggctgcgagcactggcagggctggtctacaacgcctcgggcttccgagcactgctacgacatctaccggctctaccacagctgtgnganccccactgggctgcggcaccggccccgaacggccagggcctggggacttaccagntttgncaaccgagatcaaacctggacctttcggccagcaaacaattgtggaaccgatatgtttcccccgaacctggccttttcaattganggaggttncgtcagtggttaattg

SEQ ID NO: 262438 - DNA, 902 bp, Homo Sapiens
gaatgcagtagcagtatagactccgtgaagagactggagcacaaactgaaggaggaagaggagagccttcctggctttgttaacctgcatagtaccgaaacccaaacggctggtgtgattgaccgatgggagcttctccaggcccaggcattgagcaaggagttgaggatgaagcagaacctccagaagtggcagcagtttaactcagacttgaacagcatctgggcctggctgggggacacggaggaggagttggaacagctccagcgtctggaactcagcactgacatccagaccatcgagctccagatcaaaaagctcaaggagctccagaaagctgtggaccaccgcaaagccatcatcctctccatcaatctctgcagccctgagttcacccaggctgacagcaaggagagccgggacctgcaggatcgcttgtcgcagatgaatgggcgctgggaccgagtgtgctctctgctggaggagtggcggggcctgctgcaggatgccctgatgcagtgccagggtttccatgaaatgagccatggtttgcttcttatgctggagaacattgacagaaggaaaaatgaaattgtccctattgattctaaccttgatgcagagatacttcaggaccatcacaaacagcttatgcaaataaagcatgagctgttggaatcccaactcagagtagcctctttgcaagacatgtcttgccaactactggtgaatgctgaaggaacagactgtttagaagccaaagaaaaagtccatgttattggaaatcggctcaaacttctctttgaaagaggtcagtcgtcatatcaaggaaactgggagaaagttattagaacgtgtcaagtagtcagccaggatttgtcttcctgggtcttctgccttga

SEQ ID NO: 262439 - DNA, 1348 bp, Homo Sapiens
  misc_feature (1291)..(1291): n is a, c, g, or t
ttccccagcgagcaccacaaggaagcctatgaggtcaagctgggggcccaccagctagactcctactccgaggacgccaaggtcagcaccctgaaggacatcatcccccaccccagctacctccaggagggctcccagggcgacattgcactcctccaactcagcagacccatcaccttctcccgctacatccggcccatctgcctccctgcagccaacgcctccttccccaacggcctccactgcactgtcactggctggggtcatgtggccccctcagtgagcctcctgacgcccaagccactgcagcaactcgaggtgcctctgatcagtcgtgagacgtgtaactgcctgtacaacatcgacgccaagcctgaggagccgcactttgtccaagaggacatggtgtgtgctggctatgtggaggggggcaaggacgcctgccagggtgactctgggggcccactctcctgccctgtggagggtctctggtacctgacgggcattgtgagctggggagatgcctgtggggcccgcaacaggcctggtgtgtacactctggcctccagctatgcctcctggatccaaagcaaggtgacagaactccagcctcgtgtggtgccccaaacccaggagtcccagcccgacagcaacctctgtggcagccacctggccttcagctctgccccagcccagggccttgctgaggcccatccttttcctgcctctgggcctggctctgggcctcctctccccatggctcagcgagcactgagctggccctacttccaggatggatgcatcacactcaaggacaggagcctggtccttccctgatggcctttggacccagggcctgacttgagccactccttccttcaggactctgcgggaggctggggccccatcttgatctttgagcccattcttctgggtgtgctttttgggaccatcactgagagtcaggagttttactgcctgtagcaatggccagagcctctggcccctcacccaccatggaccagcccattggccgaagctcctggggagctcctgggacccttggctatgaaaatgagccctggctcccacctgtttctggaagactgctcccggcccgcctgcccagactgatgagcacatctctctgccctctccctgtgttctggctggggccacctttgtgcagcttcgaggacaggaaaagccccaatcttcccacttgccgctgaacgcccccgagccctgactcctggactccggaggactgagcccccaccggaacttggcnggcgcttggatctggggtgggagtaacagggcagaaatgattaaaatgtttgagcac

SEQ ID NO: 262440 - DNA, 1142 bp, Homo Sapiens
  misc_feature (1118)..(1118): n is a, c, g, or t
ctcaacctcacctcgcgggcgctcgacccggcaggtaatgagagtgcatacccgcccaacggcgtggagtgctacagctgtgtgggcctgagccgggaggcgtgccagggtacatcgccgccggtcgtgagctgctacaacgccagcgatcatgtctacaagggctgcttcgacggcaacgtcaccttgacggcagctaatgtgactgtgtccttgcctgtccggggctgtgtccaggatgaattctgcactcgggatggagtaacaggcccagggttcacgctcagtggctcctgttgccaggggtcccgctgtaactctgacctccgcaacaagacctacttctcccctcgaatcccaccccttgtccggctgccccctccagagcccacgactgtggcctcaaccacatctgtcaccacttctacctcggccccagtgagacccacatccaccaccaaacccatgccagcgccaaccagtcagactccgagacagggagtagaacacgaggcctcccgggatgaggagcccaggttgactggaggcgccgctggccaccaggaccgcagcaattcagggcagtatcctgcaaaaggggggccccagcagccccataataaaggctgtgtggctcccacagctggattggcagcccttctgttggccgtggctgctggtgtcctactgtgagcttctccacctggaaatttccctctcacctacttctctggccctgggtacccctcttctcatcacttcctgttcccaccactgggactgggctggcccagcccctgttttttccaacattccccagtatccccagcttctgctgcgctggtttgcggctttgggaaataaaataccggttgtatatattctgccaggggtgttctagctttttgaggacagctcctgtatccttctcatccttgtctctccgcttgtcctcttgtgatgttaggacagagtgagagaagtcagctgtcacggggaaggtgagagagaggatgctaagcttcctactcactttctcctagccagcctggactttggagcgtggggtgggtgggacaatggatccccactctaaggactgcctcccctactccccngcatctttggggaaatcggttccc

SEQ ID NO: 262441 - DNA, 818 bp, Homo Sapiens
gggagaggaggtggcggtggtggccctcgcctgtggcccccgtgctgcttgcactcgaactcgtcgccatggaggagctccaggagcctctgagaggacagctccggctctgcttcacgcaagctgcccggactagcctcttactgctcaggctcaacgacgctgccctgcgggcgctgcaagagtgtcagcggcaacaggtacggccggtgattgctttccaaggccaccgagggtatctgagactcccaggccctggttggtcctgcctcttctccttcatagtgtcccagtgttgtcaggagggcgctggtggtagcttggaccttgtgtgccaacgcttcctcaggtctgggcctaacagcctccactgcctgggctcactcagggagcgcctcattatttgggcagccatggattctatccccagccccatcatcagttcagggacacaacctgactgaagatgccagacatcctgagagttgccagaacacaggaagctattctgaaggagatgcagtatcacagccacagatggcacctagagggaggtgtcagttgtcagatccactgggcaagcaacccaagggacaagtcccttccccaggatccctcaagggggaacaacatggcccccggtgggggaaaatgggagaagccccgaacccattggttcccaaacaaaaagaaccctggtttcagggggactggccctttcccttctggcccggcgccggaaaaactgcctgggaaacaagaaaaaaggtttccgggtgggccctttaaaaaccaccctggtttaagaaccttggggg

SEQ ID NO: 262442 - DNA, 1465 bp, Homo Sapiens
  misc_feature (103)..(103): n is a, c, g, or t
cctcccatagcgaaaaaattcacgggaacaacagaaacaaggggtgccctagttccctctctgcaggcgggtggggactgggtgagagcccaggggcctccanacgcaggcggcagagacgtgagcagtgcttggctctgtctcctagacaacgggcatcaggaccaggacaggacatgagcgtgacagggagagcggggaggtgcctaggccgggagtgggaacccagcaccggccagaaggggctgccgggcggtacagaggccaatgcattggaggctgagggtagctgcgacctctggggcaggggacactgctgtgtggagcccagggtgggcgcccacatgggtgcctggccgcggtgtgtctgcctttcttgtctctgtttctagaagactgaaggacagggctttgtctgcatgaaccagaactcagcctccaaaactggacacagaaatagccaagaggccacactgcccagaggccaggcctggtgagctaggggagatgccggcaccccccaaccctggggctgttccctggctcaggatggtgtctcagggctaggattatggtcaggagtccatcggggcctcaagcacctcctgggaggaatcacccaccttgcccagatcccccaccccctcccagtgccaccctacggctgagtttccactctgcaaaccctaaggcagagacataagcccacaggggttggttttcacgaatgtcacaagccccatgtgtctgggcagctgtccggcttcagtgcaagtctgtcgtagcaatgaggttccaagtctcagtagctctgtttccccagggtctgcgcccttggggcaggagaaaggaaggctcctgccttcccccagctccttaaaaaatcatcttagtggtgtcaagttgacccaaaatttaagtttaaaaaaaatatatatataagtaaacaaaggagggaagggaaaaagggcccaaggagaccaaaagctgctcctgggcaggagcacaggcacacctgggtccctggccctcagttgagggatgagattcgtaccagagttttcacagcagcctccactgcccgacctgggagggacggcgagggactgggatgggcagctgagctgtgggttgcggggaaccggagtgggttcgaggaggtgatctactttaactggcctctgcgcatgctcctccggcagccactcggcctcctggctatgtctcctgggggaccacctgcatgagcttctgacacaggacggtcgtggagaagatgccctggaggagccacttgggcttgtttttccaccagaccccgaagaagtagacgggcagcccgctgaggatgatggtgaagccgatgccacactccacgggtgtcttccagaaggagacggcgatcaggaagaggcaggccaggatgaagaacacaggcagggccaggttcacctggggcagagga

SEQ ID NO: 262443 - DNA, 1756 bp, Homo Sapiens
  misc_feature (721)..(721): n is a, c, g, or t
  misc_feature (1113)..(1129): n is a, c, g, or t
  misc_feature (1492)..(1518): n is a, c, g, or t
gcccataaatttaatcaggagatggaccagcttttgggaaatatgattgaaatgtgggttgatcgaatggacaacattacccagcctgaaagaagaaaactttcagctttggctttgctctctcttctgccatctgataatagtgttatccaagataaattctgtgggattataaacatttcagtagaaggcctgcatgatgtcatgacggaagatcctgaaacaggaacttataaagactgtatgttgatgtctcatcttgaggaaccaaaagtaacagaagatgaagaaccacccacagaacaagataagaggaaaaagatgctggccctgaaggaccctgttcatacagtgtcactgcagcagttcatctacgagaagctcaaggcacagcaggagatgctaggagaacaaggtttccagtccctcatggaaacagtggatacggagattgtcacccagctacaggagtttttgcaaggattctaagagcacatgacatgtggctgcctcccctttcagaaacaagctgagtaacccagcctgccgtttgtatgtgagagcctgctgagatgaagaaatcacttcatgaaaataagcaaagaccacacattttttactacaaaatgtaaaggataaatgtaaatcctgcataactaaaatcacaaacctattcctcaaaagaatttaattttatatttatgagggggcccttcactanaaagtacatgtaaaaagtacatttgatgacaatagctgcttagtttcctgttaagagaagaaactttatcttttaattatgtgctcttaatatttgaagatgagagttaatacctgagatgtttttctgcaaccaaaactcattaaatttggctgccttatcctttttttaagctaatgaaactacaggtttgaaaaatgacaaagctgttcagatgatgctattaaaggaaatgtgtgtactaaggcaaaaatatataaatagtgacaaatacacattaccaagcttatcttgcaagggagttattttcatctaacatagaaagtgtgttttatcagacaaatgcttttattttcattctaataatttgatacagaaattagtaaaggcannnnnnnnnnnnnnnnnccagtaaatacattgggtctataaatgtgcatttgtaagggccacaaaagtgaacgtgtggtactgtagtaccacgtgggagacctctggttatggtttagtcctagttcctttgttactcctgtgagcaccgagaagaactgggcgactcccagtcccacctgtgctggtgacagtcccacgtggctatgacagactgtttagtacttacccttctcaggttcctcagtgcaggggtgcatcagggcctcaataataggggtatacctgggaggatccagcagtaatccccagggtactaggattactagtactctgatggaactagtcttccttccttattcctcgaacatgcagtacatnnnnnnnnnnnnnnnnnnnnnnnnnnnccttactttgttttacttgccatttattgtaaggaaactttaaagcattttttaggaaatactcaaaagcaaggttggaaaatgttttatctttctatagaaagttgggtacagtatgtaactgcgggaaacccactgcccctttgtaagctgtggaacccaaactgtatggggatatttgatgttttcagaaagaggaagaaaatatggtccaaattaaattttccaaagatacctc

SEQ ID NO: 262444 - DNA, 923 bp, Homo Sapiens
tgggcagaccctggcagaaggggcacggggcagggtgtgagttccccactagtagggccaggtgagctatggtgctgcacctactgctcttcttgctgctgaccccacagggtgggcacagctgccaggggctggagctggcccgggaacttgttctggccaaggtgagggccctgttcttggatgccttggggccccccgcggtgaccagggaaggtggggaccctggagtcaggcggctgccccgaagacatgccctggggggcttcacacacaggggctctgagcccgaggaagaggaggatgtctcccaagccatccttttcccagccacagatgccagctgtgaggacaagtcagctgccagagggctggcccaggaggctgaggagggcctcttcagatacatgttccggccatcccagcatacacgcagccgccaggtgacttcagcccagctgtggttccacaccgggctggacaggcagggcacagcagcctccaatagctctgagcccctgctaggcctgctggcactgtcaccgggaggacccgtggctgtgcccatgtctttgggccatgctccccctcactgggccgtgctgcacctggccacctctgctctctctctgctgacccaccccgtcctggtgctgctgctgcgctgtcccctctgtacctgctcagcccggcctgaggccacgcccccttcctggtgggcccacacctcggacccagacaacccagtggaaggggaagagaagcccgacgctcaactccccctgatgtccctggcccttggtctccctctggctctgcgccttgctggcaaagggccttccggaagaaaaccggcctgccccatggccaactggccaccggagtaaccacctggaaccttctccctttccacggaagctggg

SEQ ID NO: 262445 - DNA, 1051 bp, Homo Sapiens
  misc_feature (107)..(146): n is a, c, g, or t
  misc_feature (186)..(219): n is a, c, g, or t
  misc_feature (237)..(474): n is a, c, g, or t
cattggtgtaaaaataatctacacctcatggaaagaatgaagagccagaaatagattctattctgtagaaaatcttacacaataaaggacttcaaaataagggtaannnnnnnnnnnnnnnnnnnnnnnnnnnnnnnnnnnnnnnnaaaatttgggaaaaaagtcatactatgtgccacccctgcnnnnnnnnnnnnnnnnnnnnnnnnnnnnnnnnnngagatggagtctcactgnnnnnnnnnnnnnnnnnnnnnnnnnnnnnnnnnnnnnnnnnnnnnnnnnnnnnnnnnnnnnnnnnnnnnnnnnnnnnnnnnnnnnnnnnnnnnnnnnnnnnnnnnnnnnnnnnnnnnnnnnnnnnnnnnnnnnnnnnnnnnnnnnnnnnnnnnnnnnnnnnnnnnnnnnnnnnnnnnnnnnnnnnnnnnnnnnnnnnnnnnnnnnnnnnnnnnnnnnnnnnnnnnnnnnnnnnnnnnntgggccacggcgcttggcccacccctgcatttattgagttaaattttaaaaatcctatcctaggaaattggtggtggggctcagaaaatgataccccaaagtatgaagctgtgggaggctgaatgctttgaactaaagtatctgaccatcgctcactccttttccctcccaaaaccctcctgaagcgcagggaggggccttctctgatgttctcttttgtttctaagggaagttcctgcagaaggaatgccattgtcttgagccctttccctagcatctcataaaacatggacaattaactcacaggaaaggatactgaaggtgataccatctcttctgaggactgggctgcttgagaggttttatctgcatgacaagacagcctttgtttgccatgcatttcctcccctcaacctcctagcgtctgctgccacctcctcccagaaacctcaggccccagtttttgggagctcaaatgctatttagacttcatcagtctgggcccttactagagtctcacattttgtggggactcctgtgcatgtatgtaataaatttgcatgccttttctcctatt

SEQ ID NO: 262446 - DNA, 1127 bp, Homo Sapiens
  misc_feature (583)..(649): n is a, c, g, or t
  misc_feature (699)..(709): n is a, c, g, or t
gctgggtggcgaattcggcacgagggtaccacggaaaactctgaagatgataagaagaggggacgttccacagacagtgaagtcagccagtctccagccaaaaacggctccaagcctgtccacagcaaccagcaccctcagtccccagctgtgccgcccacctacccctccggccccccgcctgctgcctctgccttgagcaccactcctggcaacaatggggtccccgcccccgcagcacccccaagtgccctgggccccaaggccagtccagctcccagccacaactcgggcacccctgctccctatgcccaggctgtggccccaccagctcccagtgggcccagcacgacccagccccggccccccagcgtccagcctagcggaggcggaggcggcggcagcggaggcggagggagcagcagcagtagtaacagcagtgccggtggaagggctggcaagcagaatggcgccaccagttacagctcagtttgtggcaagacagccccggcagaagtgggcttttgaagcaaccagtgggggggccaacaattgcccaacccagccaaggccctttgggggnnnnnnnnnnnnnnnnnnnnnnnnnnnnnnnnnnnnnnnnnnnnnnnnnnnnnnnnnnnnnnnnnnnagggaaaaacccccaagaggggcgcggggaaaagccccccccaaaaacannnnnnnnnnncctcttgtggcaggggggggcccacccataaccaacccccacccaccataaatccgtcatctcagcttggtggagagctacacaacactattagtcaatagaaagccgagcgacacatatcccgcaagcgacgcacccatatcaacgcgtcactgagcactcacaactgctatatatggacgaacacagctaaagataaataatcgcccaaaatagtactaaccacgccacccgtcacgtgtcctaccgagagagagaaacttccttagatatgacttggcatcgaagaacggttataagcgacgagagactccgcacgaagaggttcaactctgagttgctataattgaagacacaaccgactataaaagtgcaggacagaaacaaagcagggctaaatgtcaaacacaaacccaaa

SEQ ID NO: 262447 - DNA, 838 bp, Homo Sapiens
  misc_feature (41)..(76): n is a, c, g, or t
  misc_feature (119)..(231): n is a, c, g, or t
  misc_feature (233)..(269): n is a, c, g, or t
acgacgagcgcagcgagtccagtgagcgaggaagcggccgnnnnnnnnnnnnnnnnnnnnnnnnnnnnnnnnnnnnagtcgacggtaccggacatatgcccgggaattcggccattacnnnnnnnnnnnnnnnnnnnnnnnnnnnnnnnnnnnnnnnnnnnnnnnnnnnnnnnnnnnnnnnnnnnnnnnnnnnnnnnnnnnnnnnnnnnnnnnnnnnnnnnnnnnnnnnnngnnnnnnnnnnnnnnnnnnnnnnnnnnnnnnnnnnnnngtcatcaatgtcaacataaatgagctccccactccaactgatttcctcaaaatttcagctccaaattaaaaatattattatattttattgtaaggatctcacttacccagtggtgtttcaaagtaaggtgtaggatttggagaccaagactgaggcacaatactatagaccgagtactgttggtgaggattatatacaggctgcataaagactggggaggcatactgtgcttgagtttgaatggggtgactatagatactagaatccattaatcgataaccattcttagcaaaaaatgtattgatggcttttatccttgcctagaagaggaacacattatagcaacaaagaattaagtgtatattttaacaaaatacatttaatttacatttttaacatatattttacatgactatactatttctgcctacaagtagaatcagtagagcaaaagaaaagaaaatgacagctttaattacttaactaaataatacaaacgttttcatggtataaaaaaccatagtaaacaaggtaaaaccccccccggcaaacaaacacacgtcaaaata

SEQ ID NO: 262448 - DNA, 1086 bp, Homo Sapiens
acgagaaggtggggcagcacccatgctgcgtgcggctggagcaggcctgggaggagggcggcatcctgtacctgcagacggagctgtgcgggcccagcctgcagcaacactgtgaggcctggggtgccagcctgcctgaggcccaggtctggggctacctgcgggacacgctgcttgccctggcccatctgcacagccagggcctggtgcaccttgatgtcaagcctgccaacatcttcctggggccccggggccgctgcaagctgggtgacttcggactgctggtggagctgggtacagcaggagctggtgaggtccaggagggagacccccgctacatggcccccgagctgctgcagggctcctatgggacagcagcggatgtgttcagtctgggcctcaccatcctggaagtggcatgcaacatggagctgccccacggtggggagggctggcagcagctgcgccagggctacctgccccctgagttcactgccggtctgtcttccgagctgcgttctgtccttgacatgatgctggagccagaccccaagctgcgggccacggccgaggccctgctggcactgcctgtgttgaggcagccgcgggcctgcggtgtgccgtggtgcatggccagcggaggccctgagccgagggtgggccctgtggcaggccctgcttgcccttgctcttgctggctctggcatgggctggctcaccctgccagctggctacagcccctgggcccgccagcaccccgctgggtcacacctgcagtttgctcctggacagcagcctctccagcaactggggatagacagacaagctaggggccttcactctcccctgaggctgtcctggccggactggtgggggagaacctccaaacccccggaacaggtgcaaacccagggatgcctggaccttaagtgacatcaactcagaggctccttcggggctctttccctcctttgagcttcggaactctcagctgttggaggaaccctagaaccaactgagcccagattggctctggactttaactttatctggtgtttccgtgcctgaaagctgggcctcgggatc

SEQ ID NO: 262449 - DNA, 1168 bp, Homo Sapiens
  misc_feature (31)..(32): n is a, c, g, or t
  misc_feature (70)..(111): n is a, c, g, or t
  misc_feature (443)..(443): n is a, c, g, or t
acagggtattgggggatagcggatcggcgannggtcaaaaaaggcttatttattgagagcagcgagtgtnnnnnnnnnnnnnnnnnnnnnnnnnnnnnnnnnnnnnnnnnngacaacaataaaagtgtggggtaaggatggcccaccctcctcatctccagggcccacccctacctcccatgcccacccaccccacgctgcaattacatataaaagccgcccgtggtgcatacaaaaagggcggtttatatagtgtcaaaagctcctgaaaactccttcatctgccaggcacttaggatgaggaaaggagagaagggtggggaagacgtgggtctgggtcagtggtgcacaagcccagagtggggaggactcacttgctgtggtcctctataatcctggtctagacccccaagtgggaccagtgggccaagagactcattaanccctgtgtgcccagaacttgagaatattaaggaactccccacaaacccagctcatcccaagcctagccctccccaggcaaagttggcagatgagtggcagagttggacccggtcaaggggagaagttgaaggccagaaattggggttacctgtggcacccacactgtccctgatagaggaagaggtggcagggaaaactgcccagctcaaagccctagtcgcccagtttgggtccaagtcagcctcccaaaggatgagggtgaggaagaggaggaaaggccaggccctgctcagacctcagcaatgcctgttgcactagggcaggggcctcagggcccaggaggacagggatcttgcccatcatgctgtgagcttccctctagagatgtcctcccctgcccaggccatcctgagcgggctccctcctcacggcttgctgtccacggtgctgtctcccagggcgctggcaatctcactgaaggagggccggtccttggggctgagggcccagcagcgctgcatcagccgatagagtttggaagggcagccctcgggctgaggaagtctagccttcccagcctgcaaatctgccagtacttcatcatctgcctgcccaccatggggcatctctccatgtgtaaacacttcccacatcagcgatatcccgggattccgaccggtaccagcctgctttttttacaaactgttcttatagtcctaatgct

SEQ ID NO: 262450 - DNA, 1302 bp, Homo Sapiens
  misc_feature (1017)..(1017): n is a, c, g, or t
gctgttgcaattctttgtaaccatcagagggcaccaccaaaaacttttgagaagtctatgatgaacttgcaaactaagattgatgccaagaaggaacagctagcagatgcccggagagacctgaaaagtgctaaggctgatgccaaggtcatgaaggatgcaaagacgaagaaggtagtagagtcaaagaagaaggctgttcagagactggaggaacagttgatgaagctggaagttcaagccacagaccgagaggaaaataaacagattgccctgggaacctccaaactcaattatctggaccctaggatcacagtggcttggtgcaagaagtggggtgtcccaattgagaagatttacaacaaaacccagcgggagaagtttgcctgggccattgacatggctgatgaagactatgagttttagccagtctcaagaggcagagttctgtgaagaggaacagtgtggtttgggaaagatggataaactgagcctcacttgccctcgtgcctgggggagagaggcagcaagtcttaacaaaccaacatctttgcgaaaagataaacctggagatattataagggagagctgagccagttgtcctatggacaacttatttaaaaatatttcagatatcaaaattctagctgtatgatttgttttgaattttgtttttattttcaagagggcaagtggatgggaatttgtcagcgttctaccaggcaaattcactgtttcactgaaatgtttggattctcttagctactgtatgcaaagtccgattatattggtgcgtttttacagttagggttttgcaataacttctatattttaatagaaataaattcctaaactcccttccctctctcccatttcaggaatttaaaattaagtagaacaaaaaacccagcgcacctgttagagtcgtcactctctattgtcatggggatcaattttcattaaacttgaagcagtcgtggctttggcagtgttttggttcagacacctgttcacagnaaaagcatgatgggaaaatatttcctgacttgagtgttcctttttaaatgtgaatttttatttctttttaagtattctaaaatatttaaacctttttcgtgatcttaaagatcgtgtaaattgcgggttggggaagggattaaaggccaatcgccaccacaggacactcgaatcaaccatagactccagcccacctcatccccgggaccatttaggaccgaaaaatttagtaccacccctataacaaataccactcccattctgcccgtgaaccacaaaatacaa

SEQ ID NO: 262451 - DNA, 858 bp, Homo Sapiens
aggctggaccggtccggatacttcggatgagcgaacctcaggatgaagtgaaagcagtccaacttgccattcagacattattcaccaattcagatggcaaccctggaagcaggtccgactcaagtgctgattgccagtggttagatactctgaggatgcggcagattgcatccaacacttctttacagcgttcccagagcaatcctattctggggtcaccgttcttctcacactttgatggccaggattcctacgctgctgctgtgagacggccccaggtgcccattaagtatcaacagattacacctgtgaaccagtccagaagctcgtctcctactcagtatggactgaccaaaaacttctcttccctacatctcaactctagggacagtggcttttccagtggcaatactgacacctcttcagagaggggtcgatactcagacagaagcaggaacaaatatggacgtggtagtatatcactcaattcttctcctagaggaagatacagtggaaagagtcagcattccactccttcaagaggaagataccctggaaagttctacagggtttctcagtcagcactcaatcctcaccagtcgcctgacttcaagagaagccccagggacctccaccaacccaacaccataccagggatgcctttgcaccctgagactgactcaagagccagtgaagaggacagcaaagtcagcgaagggggctggacaaaagtggaataccggaaaaagccccacaggccatctcccgccaaaaccaataaagagagagccagaggggaccaccgtggatggagaaacttttgatgaattgaactacatagcttttctaagcaggtta

SEQ ID NO: 262452 - DNA, 999 bp, Homo Sapiens
  misc_feature (147)..(210): n is a, c, g, or t
  misc_feature (433)..(527): n is a, c, g, or t
  misc_feature (610)..(673): n is a, c, g, or t
gcgcttacccgttgcgggggtcttcctctccctgggggcacccgtcctcccgcagctccacacggtgcccacctgcgtccctggcgggattcccagcgggacgacgcgcaaccgcagggcgccacactccaccgtggcgctgtagcnnnnnnnnnnnnnnnnnnnnnnnnnnnnnnnnnnnnnnnnnnnnnnnnnnnnnnnnnnnnnnnntgcgggggccctcagggccatctcccgaggcccggttcctcaccggcccttccgcggttcagccgcagacgcgtgccctcctgaaacacaggttggcaggccagtctcggcagtcgagagccagccaatagatggaatggaggcctgcacctgcgtctaacttttgacgctataaataggttcaagaaactaataaaacgttctggttttcttctttgacaannnnnnnnnnnnnnnnnnnnnnnnnnnnnnnnnnnnnnnnnnnnnnnnnnnnnnnnnnnnnnnnnnnnnnnnnnnnnnnnnnnnnnnnnnnnnnncccttgtccgccccctccgccccccaaaaagtttttaaaacatttttttgggcccggggccccaaaaggaaaggaaactgggnnnnnnnnnnnnnnnnnnnnnnnnnnnnnnnnnnnnnnnnnnnnnnnnnnnnnnnnnnnnnnnnccccgggggaaacccaacggttttgaacaaaacccaaaggaagtttggaggggctttacgggatctatccaagggggggtccaaagcgaagccccaaataaaaatttaagcccccgcccctgggcctttttattggaaaaaaccgggtgggaacttcacttaaaagatatttctcgcccgcacttgggagaaccccttttcccaaaagggggatgggaagaaaacccttaaaaccccccccacgggggcttattccaaccccctttggtcgccccctttgggaaaataaaatttttccccccactgggggaaaaacacgggggggc

SEQ ID NO: 262453 - DNA, 2173 bp, Homo Sapiens
ctcccccggaagggggggcccccctgcccttatggggggagtccccaaggaggaccgaggggacctcccccccttggggtccccaaggctcacgggggctcaaaccttggggaggtccgtcggaaaccggggccccgggaaaagccccaagggtcaggacccctcctagtaaaggggccacacgtacttttcccggggccccaaggtatggggcggtccaggccccgcgggccctggggtccctggacatgctcagaagagcccctggggtatttaaccgaactgcaggaggggagacccgagctttgtaaccaaagcggtcctctgtatgaaagggtggatcaatggcagcctcaggggagagtgaagccaggctgtgagggtcaggggccctgcctgactaggacctgcccctatgaacccccaagagcatctgaagaaccaaagcgggggtgatgcctagtgaccaggctgcaaggggagactcacaggccagacccatggaccgctggtctcctcccatctttaggggcagagagtggaggtaggacagagccacccccggtggccacctctctgctccttggaagaaggggctaggaggcactgggagggccatggctgatggctgacggctgagggagggcaggtcccatgagggcagggtgctatgggggagatgtgaagagaaaaaggagaggagaaagggagaaagatccaacatggggtccgtgagcagtgcatacaccagcctctcggacacccctcagaacaaaagcccatcattcctctggccatcaccccacctgcaccccttccccacggtgtcccgggggctgtggcttcatttgtgaaggtaggcgtccagccacagcttcccagacttcttcagggacctgatgatgtccagcagggccctcagtagcggcttctcctggtattcaatgccatgcttggcacatagagacttcaccagcggggcgatcttgtgtaagttgtgccggggcatggtggggaagaggtggtgctcaatctggaagttaaggtgtccactgaaccagtcgttgaagaaggactgctccacgttgcaggtggctgtcagctggctactgaaccagtcacggtaggcctcctggtcaatctccatgacgatgtgattcatctgtgtgacccacacaaaccagtggctctccaggaacctgatgaagttgaggaaaaggagggctcccaggatgccgtagaaagggatgtaggtgatgaagaaccggatgtagtagctgacggcccaggccaggtccacccagttcttatggacgatcatggtcatgatgatctggtactggaaatacatggggatgagcagcggcggcccaatcaggaagaagtattcgtgctggtgattgtagggcaggtatttcagcttcttcttgccgtactcgatgggctgccattcgcccagaacaaacacgtgcagcatgttcacatcgggatccttgtggaagatgttaggcttggcgtggtgctggaagtggcgatgattccaccagttggcagaggcaccctttaagtggccaatgacgaatttgtggacaaggtggttccacttgggttttctgtagacagacaggtggccataatcatgttgcagccatccagcttgggcctgagaggtagcaaggacaaaggccgtgatgagggtaggaatccagccattgccaaagtaaaagacagtgaaccatgcaatgctctccagggcgatgatgtgggccaggaggaggaggaagaacacgtggttggtcttgaacaggttcatgtcctcagccgtcttcctcagggcccggaagtcctcagtgatctttgagttcttgccgtggtcctggctgggctcctccggggccagttcaccaatcagcaggggtttcaagaacttgcccacgaattccaggtcagggtggaaggcgcggaaggcatcctgttgcccggtgattgggtgtcctgcggatgcgggatgaaaaggcgggagagaggcctggagaagtggagtctggggagtggggatggaggccaacaacacgcacacacaaacaaagggtcccgcctccctgccgtgcattccatctgcagccccgagcctcaggtctctgggcggggacagaaccccgagctgggtagg

SEQ ID NO: 262454 - DNA, 1005 bp, Homo Sapiens
gtggcggcccagaaaaagcgccccccccggaggcttagggggatttgggaaggaagtaaggtttttggggtaaaaaaccagattttggccccgcggatttcccagcctaatggtaagtgggggggcccgaagccggtcccgcgggggcccccaggggagagtgcaaaagggggaataggccccccccaaaagggcctccgggaatctacagggggccccggctttccccgggggatttcaccgtccccccccgtggggacccagggagttcgttcgaggccttggccgggcccaccccgggtgggcaaataactcagggcacacggccctagctggccctgttcccccgcagcccaagggtgtagaggtcaccatcagctgtcagcatcaccaagtggtcgtttcctgaggccacctgtaccacaggcacatccagctgcacctgcacaggcaccatgctcttcttcatgggctccaacagtccaatcacaccgttattgtcccggaaggagccccagaggaagacacggccatcatcggtgagggctgctgtgtgactgtctcctgctgacacctgtaccaccttctcttgcagctccactttcccagggaccatctccgagccctccactgatgtgtcccttcccagggcaccctcatcattgcagccgaaggaatagacctggccacttttgcttagacacacggtgtgcatgcccccagcctcagcctgcacaacatcctccggaatggataccagggccggcttcttcctctccatcacattctcacccagccccagctggcccacgtcgccctggcctagtgtcagcaccaagccgggttctgtgctgtgggacctgtgtgagaccttcaccttcttgcttttggggatggcatctgctgggggggaccttcttttagctatgcgcttgggtgacatcttcctgtccttggtgcacgtcggccacaaggaaccctcgtgccgaattcgccacccaggcc

SEQ ID NO: 262455 - DNA, 1445 bp, Homo Sapiens
  misc_feature (965)..(965): n is a, c, g, or t
  misc_feature (971)..(971): n is a, c, g, or t
gcatcgccctgggtctctcgagcctgctgcctgctcccccgccccaccagccatggtggtttctggagcgcccccagccctgggtgggggctgtctcggcaccttcacctccctgctgctgctggcgtcgacagccatcctcaatgcggccaggatacctgttcccccagcctgtgggaagccccagcagctgaaccgggttgtgggcggcgaggacagcactgacagcgagtggccctggatcgtgagcatccagaagaatgggacccaccactgcgcaggttctctgctcaccagccgctgggtgatcactgctgcccactgtttcaaggacaacctgaacaaaccatacctgttctctgtgctgctgggggcctggcagctggggaaccctggctctcggtcccagaaggtgggtgttgcctgggtggagccccaccctgtgtattcctggaaggaaggtgcctgtgcagacattgccctggtgcgtctcgagcgctccatacagttctcagagcgggtcctgcccatctgcctacctgatgcctctatccacctccctccaaacacccactgctggatctcaggctgggggagcatccaagatggagttcccttgccccaccctcagaccctgcagaagctgaaggttcctatcatcgactcggaagtctgcagccatctgtactgggcggggagcaggacagggacccatcactgaggacatgctgtgtgccggctacttggaagggggaccggaatgcttgtcctgggcgaatccgggggccccctcatgtgccaggggggacggcccctggcttgctggccggcatcatcagctggggcgagggctgtgccgagcgcaacaggcccggggtctacatcagcctctctgcgcaccgctcctgggtggagaagatcgtgcaaggggtgcagctccgcgggcgcgctcaggggggtggggncctcanggcaccgagccagggctctggggccgccgcgcgctcctagggcgcagcgggatgcggggctcggatctgaaaggcggccagatccacatctggatctggatctgcgggggcctccggcggattcccccgccgccaagagggctcatctacctttgggggccccgggactgactgctgctggacagggaaagcaccagcctcaacgtgcccaaaaaaacccgcgggcgcgcgccgtcgatagcgcccagactcccccccaagcaccgggaacccggcataagagcccttccaaagtttgatgcccaccccattcgaaccccgaactcctccctccgcaacataaccccccccaaacaagagttcaacccggataatagtgtgtgacgctcatgacccaccaatgcagaagcgcggagccgacatgcaacgggtgagcccgagagcgctcgaaaacactcgtcgcgacagatccca

SEQ ID NO: 262456 - DNA, 1190 bp, Homo Sapiens
  misc_feature (168)..(168): n is a, c, g, or t
  misc_feature (221)..(221): n is a, c, g, or t
aagtatttcgtgagatcacccaacaccaatttcttcaccactgctcatgtgaggtgaagcagctaaccctagaaaaaaaggactcagcccagggcactgaggacgcacctgataacagcagcctggagctcctagcagataccagcgggcaagcagaaaacaagaggnctcaagaggggcagcccccagcatagaggagatgcgagcttctgcgctctgcncagggccccgagcccgtccagtaggacgccccgcgccagccctggaagccaccgcggcccccctcactcctagaggaagggagcaccgcgaggctcacggcagggccctggcgccgggcagggcgagcctcggaagccgcctggaggacgtgctgtggctgcaggaggtctccaacctgtcagagtggctgagtcccagccctgggccctgagccgggtccccttccgcaagcgcccaccgatccggagcctgcgggcagccgttatcccgtggtttaataaagctgccgcgcgctcaccaagtcctcttccgcgtctgcttccgcgtcgggcccgggcggggcggggcggggcgtggagccgcgccgcggcctgacgtcacccacacctccctgggactgcgtcactggtgcgcgccgcgggtcagggcgcaatggcggcgctgggcggggatgggctgcgactgctgtcggtgtcgcggccggagcggccgcccgagtcagcggcgctgggcggcctgggccccgggctgtgctgctgggtcgtagagtacacctgaccgtcacctctggtgaccctacgggagcggcctgtatatctgaacatagccattgttgatggtacattcttagatctggcagaggcattgccccaatctgcagttcgggtccacatattcctcaataaaaggatattcccgattgcccctggggggccacgagaatattgggaattccaggtatgaccttaaataaggaccatttaaaggtgtaatccccctgaatgtttttaaacattaaaaacttcacccaagggaaattttggacatgggtccccttggcccctatgggaaagggtaccctatacatgaaaaatcatccagtttccggcgctccccttgggcggctacattccccgggaagggaactggccctgggtattttctccggactcccgaagcctttcaga

SEQ ID NO: 262457 - DNA, 1078 bp, Homo Sapiens
  misc_feature (1047)..(1047): n is a, c, g, or t
ggggagttttcttcgaacatttggggctccgcgatacagttaggatggctgtagtacctctgctgttgttggggggtttgtggagcgctgtgggagcgtccagcctgggtgtcgttacttgcggctccgtggtgaagctactcaatacgcgccacaacgtccgactgcactcacacgacgtgcgctatgggtcaggtagtgggcagcagtcagtgacaggtgtaacctctgtggatgacagcaacagttactggaggatacgggggaagagtgccacagtgtgtgagaggggaacccccatcaagtgtggccagcccatccggctgacacatgtcaacactggccgaaacctccatagtcaccacttcacttcacctctttctggaaaccaggaagtgagtgcttttggtgaggaaggtgaaggtgattatctggatgactggacagtgctctgtaatggaccctactgggtgagagatggtgaggtgcggttcaaacactcttccactgaggtactgctgtctgtcacaggagaacaatatggtcgacctatcagtgggcaaaaagaggtgcatggcatggcccagccaagtcagaacaactactggaaagccatggaaggcatcttcatgaagcccagtgagttgttgaaggcagaagcccaccatgcagagctgtgaatctagaggctctgagccactgttaacgcacaatgttcacagacatctgttgctgcctcaccttgggatccctgccacaagttccttgggcagtggccatgtcaccattgagatgaagatatacaacagaaaatagtggctgtgtttggaagcttcagccctgcacatttgaactagtcactctcccagacttgcgtgggtcagttctttctgagtagaggacttgctggtaaaggggcagatggctttttattagtactggataaaacaaactgaagggaaacatcccctctttagctggggaaaactttttacctctttcagggaggcttgggccatccatgggacctggtttaaatggtatggntggattttttccccccccttaattttgtctc

SEQ ID NO: 262458 - DNA, 815 bp, Homo Sapiens
attgtcaccgatggtggcaactcgctgaggcgtccgacgaggcgaagagtaattagcgaggaatcgggtccgcataacgtcgtctaacaatacattatatcgagtttatcattcgacggtaccggacatctgcccgggacttcggccattacggccggggtgggaacccccgatcaagtgtggccgcgcccatcccggactgacaactatgtcaatccactgttgccgcatcccttacacactgcacatgcactcacctctttctgcaacacgagacattcgtcgacctatccagtgggcaaaagagaagtgcatggcatggcccagccaagtcagaacaactactggaaagccatggaaggcatcttcatgaagcccagtgagttgttgaaggcagaagcccaccatgcagagccgtgaatctagaggctctgagccactgttaacgcacaatgttcacagacatctgttgctgcctcaccttgggatccctgccacaagttccttgggcagtggccatgtcaccattgagatgaagatatacaacagaaaatagtggctgtgtttggaagcttcagccctgcacatttgaactagtcactctcccagacttgcgtgggtcagttctttctgagtagaggacttgctggtaaaggggcagatgctttttattagtactgataaaacaaactgagggaaacatccctcttagctgggaaacttttactcttcaggagcttggcatcatggactgttaatgtatgtgattttccccctattttctctctccaaaatgataaaaacaataattttga

SEQ ID NO: 262459 - DNA, 1671 bp, Homo Sapiens
  misc_feature (955)..(964): n is a, c, g, or t
aacaaatgctctggaatgcgtttcccccttcaggaagagaactcagttacacatcacgaagtcaaatgccaggggaaaccattagccggaatctacaggaaacgagaagagaaaagaaatgctgggaacgcagtacggagcgccatgaagtccgaggaacagaagatcaaagacgccaggaaaggtcccctggtaccttttccaaaccaaaaatctgaagcagcagaacctccaaaaactccaccctcatcttgtgattccaccaatgcagccatcgccaagcaagccctgaaaaagcccatcaagggcaaaacaggccccccgaaaaaaaggctcaaggaaaaacgcaacagaatcgcaaacttacggatttctaccctgtccgaaggagctccaggaagagcaaagccgagctgcagtctgaagaaaggaaaagaatagatgaattgattgaaagtgggaaggaagaaggaatgaagattgacctcatcgatggcaaaggcaggggtgtgattgccaccaagcagttctcccggggtgactttgtggtggaataccacggggacctcatcgagatcaccgacgccaagaaacgggaggctctgtacgcacaggacccttccacgggctgctacatgtactattttcagtatctgagcaaaacctactgcgtggatgcaactagagagacaaatcgcctaggaagactgatcaatcacagcaaatgtgggaactgccaaaccaaactgcacgacatcgacggcgtacctcacctcatcctcatcgcctcccgagacatcgcggctggggaggagctcctgtatgactatggggaccgcagcaaggcttccattgaagcccacccgtggctgaagcattaaccggtgggccccgtgccctccccgccccactttcccttcttcaaaggacaaagtgccctcaaagggaattgaannnnnnnnnnacacacttaatcttagcggattacttcagatgtttttaaaaagtatattaagatgccttttcactgtagtatttaaatatctgttacaggtttccaaggtggacttgaacagatggccttatattaccaaaacttttatattctagttgtttttgtactttttttgcatacaagccgaacgtttgtgcttcccgtgcatgcagtcaaagactcagcacaggttttagaggaaatagtcaaacatgaactaggaagccaggtgagtctcctttctccagtggaagagccgggaccttccccctgcacccccgacatccagggacggggtgtgaggaagacgctgcctcccaatggcctggacgggatgtttccaagctcttgttcccctaacgtctcaacaggcgctcactgaagtgtatgaatattttttaaaaaggtttttgcagtaagctagtcttcccctctgctttctcgaaagcttactgagccctgggccccaagcacgggccgggcatagatttcctcttccacaagctgccgcttttctgggcaccttgaagcatcagggcgtgaaatcaaactagatgtgggcagggagagtgttgcttacctgccctgctggggcagggtttcctgaaactgggttaattctttatagaaatgtgaacactagaaattattttaaaaaataataataacaattttac

SEQ ID NO: 262460 - DNA, 405 bp, Homo Sapiens
  misc_feature (15)..(15): n is a, c, g, or t
ccccgggaacggggnttgtgaggaaaaacgcctgccctcccccaatggccccggacgggatgtttcccaagctcttgttcccccctaacgtcctcaacaggcgcctcactgaagtgtatgaatattttttaaaaaggtttttgcagtaagcctagtcttcccctctgctttctcgaaagcttactgagccctgggccccaagcacgggccgggcatagatttcctcttcccaacaagtgccgcttttctgggcaccttgaagcatcagggcgtgaaatcaaactagatgtgggcagggagagggttgcttaacctgcctgctggggcagggtttcctgaaactgggttaattctttatagaaatgtgaacactgaatttattttaaaaaataataataaaaattt

SEQ ID NO: 262461 - DNA, 1378 bp, Homo Sapiens
  misc_feature (371)..(371): n is a, c, g, or t
  misc_feature (804)..(818): n is a, c, g, or t
agttcgtcgcgagagcggcggtgcgctagggcctagcgcctccgtcgtcccgcgtgaccgtctctctctcccccgatgcgctgcctggtggcgcacagctagagcaggtgtgtttgtctactgtttgagcgtgggcatgactggagtatcttccgccgtgcgctgtctgtgcgggagggtccttgtcgatgtgtgtgtcaggtcctcaactcacactcctcacccccaccgatcgcgggggcggtggtggagtggggtatagaggggtggacagaccagtgattgtcggcgctgcgctccgactcggcataggctggtgccgaccgcgttgcatgcgttgtgatttgttttgcagatcgcggacttgttcnaaaggggcgcacgaggtagtgggaaggaggtgcaggcggttcacgcggctctggcagttgtcgggtgagggtgacgccagctcgaggtcagtgtctcggcttagtgcgcgcgggaactcggcgccgctgccggtgccgggagggggctagtgggccgtgcgcctggatgcgcgggcccgactgctggtggtgcctgttgcggggaccgcttttcgtatccacagaacggggggcctaatgttgggggctcggggccccctccaaggctcctgcccccttccgttccccgcaatggactggattggagtccccagaggcccaccctcacctaggagcggggcgcgctggccacccagcgcccccgccaccaggtggggatacttcatcctcaggtaggcaacgaggattctcccccccactcttttcctccaannnnnnnnnnnnnnncttttggggccccgaggtcgcgtcgtagcgcgcggagcagctctgcgaagtcggccaggccctgctccaccgtcagcagctccgtgtgcccgcgctgcgtggactgcgcaccgaacggcagcgacttcccgtagtagcggtgctccgcgaagaccagtagagccacccgctcggcccagccagctccgcgacgaagcccgagttgttggcgaaggcccacacgtcgccctcgttcccagtgtagaagaagatgggcccctcgccccggacccagaacccgacaccaggaagcgcttcgagggaagtgctcaagcgctcgaaagaatgtcaaacctacgaaagaacgtcctgaagccggtcggtgacctcaggatatgggggggacgcgaacgtccagagcgaggcccgggaccgtgggaatgcggccgggcgggcagcacgccacatcacacaccacagccttggaggcacgcgcagcaccgagcagccagcaagcaggacacgggccaagggagcgagccccgacgcgtggtcacaatcccggaattcagaggccgtca

SEQ ID NO: 262462 - DNA, 900 bp, Homo Sapiens
  misc_feature (879)..(879): n is a, c, g, or t
  misc_feature (890)..(890): n is a, c, g, or t
gggactcctgagagcagagctggccgcagccatgaccccgcagcttctcctggcccttgtcctctgggccagctgcccgccctgcagtggaaggaaagggcccccagcagctctgacactgccccgggtgcaatgccgagcctctcggtacccgatcgccgtggattgctcctggaccctgccgcctgctccaaactccaccagccccgtgtccttcattgccacgtacaggctcggcatggctgcccggggccacagctggccctgcctgcagcagacgccaacgtccaccagctgcaccatcacggatgtccagctgttctccatggctccctacgtgctcaatgtcaccgccgtccacccctggggctccagcagcagcttcgtgcctttcataacagagcacatcatcaagcccgaccctccagaaggcgtgcgcctaagccccctcgctgagcgccagctacaggtgcagtgggagcctcccgggtcctggcccttcccagagatcttctcactgaagtactggatccgttacaagcgtcagggagctgcgcgcttccaccgggtggggcccattgaagccacgtccttcatcctcagggctgtgcggccccgagccaggtactacgtccaagtggcggctcaggacctcacagactacggggaactgagtgactggagtctccccgccactgccacaatgagcctgggcaagtagcaagggcttcccgctgcctccagacagcacctgggtcctcgccacccctaagccccgggacaccttgttggagggcggatgggatcttggcttagccttgggctggaattctttgctttgctgctgcttagctgccggggcaaactcagatgaacgantttttcctttnaagctcaatt

SEQ ID NO: 262463 - DNA, 1224 bp, Homo Sapiens
gacgtacgagtacatcatcaaagacaagcacatcctcgccaagatccgttggaagtacatgattgtggacgaaggtcaccgcatgaagaaccaccactgcaagctgacgcaggtgctcaacacgcactatgtggcaccccgccgcctgctgctgacgggcacaccgctgcagaacaagcttcccgagctctgggcgctgctcaacttcctgctgcccaccatcttcaagagctgcagcaccttcgagcagtggtttaacgcaccctttgccatgaccggggaaaaggtggacctgaatgagggaggaaaccattctcatcatccggcgtctccacaaagtgctgcggcccttcttgctccgacgactcaagaaaggaagtcgaggcccagttgcccgaaaaggtggagtacgtcatcaagtgcgacatgtctgcgctgcagcgagtgctctaccgccacatgcaggccaagggcgtgctgctgactgatggctccgagaaggacaagaagggcaaaggcggcaccaagaccctgatgaacaccatcatgcagctgcggaagatctgcaaccacccctacatgttccagcacatcgaggagtccttttccgagcacttggggttcactggcggcattgtccaagggctggacctgtaccgagcctcgggtaaatttgagcttcttgatagaattcttcccaaactccgagcaaccaaccacaaagtgctgctgttctgccaaatgacctccctcatgaccatcatggaagattactttgcgtatcgcgggctttaaatacctcagggcttgatgggaaccacgaaggcggaggaccggggcatgctgctgaaaaccttcaacgagcccggctctgagtacttcatcttcctgctcagcaccgggggctggggggctcggcctgaacctccagtcggcagacactgtgatcatttttgacagcgactggaatcctcaccaggacctgcaagcgcaggaccgagcccaccgcatcgggcagcagaacgaggtgcgtgtgctccgcctctgcaccgtcaacagcgtggaggagaagatcctagctgcagccaagtacaagctccacgtggaccagaaggtgatccaggcccggcattttcgaccagaaatccctccagccatgaacggcgcgcccttcctgcaggccctccctggagccaccaggaacaggaatgagggaagaagaac

SEQ ID NO: 262464 - DNA, 1404 bp, Homo Sapiens
caggctggtacggcccggagttacgggatatcgtcgaccacgcgtcggtcagcctttaagcaagctcccccgccatcacccacttgtgctgcaggagtgtgtcagtgatgatgagacatctgaacagctgacccctgaggaagaggctgaggagacagaggcctgggccaagcctctgagccaactgtggcagaaccgacctccaaactttgaggctgagaaggaattcaatgagaccatggcccaacaggcccctcactgcgctgtctgtatgatcttccagacttatcatcaggttgaatttggaggctttaatcagaactgtggaaatgcttcagatttagccccccagaagcagaggaccaagccattgattccagaaatgtgcttcacttcgactggctgcagcacggacatcaacctttctactccttatcttgaggaggatggcaccagcatactcgtttcctgcaagaagtgcagcgtccgggtccatgccagttgctatggggtcccccctgcaaaggcttctgaagactggatgtgttctcggtgttcagccaatgccctagaggaggactgctgtttatgctcattacgaggaggggccctgcagagagcaaatgatgacaggtgggtccacgtttcatgtgctgtggcaattctggaagcaaggtttgtcaacatggcagaaaggaagtccggtggatggtgagcaaaaaccccctggccccgcttcaagactgaaatgtattcttctgtaagaagcggaggaaaagaactgctggctgctgtgtgcagtgttctcacggccgctgcccaacttgccttccatgtgagctgcgcccaggctgccggtgtgatgatgcagcctgacgactggccttttgtggtcttcattacctgctttcggcacaagattcctaatttggagcgtgccaagggggccttgcaaagcatcactgcaggccagaaagtcattagcaagcataagaacgggcgcttctaccagtgtgaagtggtcaggctcaccaccgagaccttctatgaagtcaactttgatgatggctccttcagcgacaatctttatcctgaggacatagtgagccaggactgtctccagtttggtcctcctgctgaaggggaagtggtccaagtgagatggacagacggccaagtctatggagccaagtttgtggcctcccaccctatccaaatgtaccaggtggagtttgaggatggctcacaacttgtgggttaagagagatgatgtatacacactgggattgaagagcttccccaagagagtcaaatctaagactgtcaggtagccctcagacatgcgccttcaatggaaattttccccgaagaaagacggttaagccaagaaataagaaaccgccc

SEQ ID NO: 262465 - DNA, 1044 bp, Homo Sapiens
  misc_feature (284)..(284): n is a, c, g, or t
  misc_feature (454)..(454): n is a, c, g, or t
  misc_feature (477)..(477): n is a, c, g, or t
  misc_feature (927)..(927): n is a, c, g, or t
  misc_feature (972)..(972): n is a, c, g, or t
gccccgtggggggtttaaagggcagaaagggcccactcccctccgtttggcccccggctggggaggggtgcctgtctcttcagggaaggaggtggggagactaacaggtttccctccaagctcaggtctacactgacttcagtcgtaactcggttccagcatccctcaacccagttttatcacgcggtctaggcccaaggtccagggctctgggactccctccgatgctcccacccctggcccctgcaccttctggcttctgcagggaccgctgggccctggantgaggcctctcccacctcgctggaagaccagagacaccttcggatgccaccttgacgctggagcggattctggacctagcccagcagctcccaagtgactgtgtttccagcagcctgatccttggttgaggcccagggaagtgtcccagggccccgacttgccagacganggctctattccgggctgctgcangccccacttttctcctttaattaaaataaaataatcattctgtgctgtacacgtcccaagcagcaggggcaggcagcccgggtggcctgcgtggcaggggagcagctgggcagcccctcacttgggcgactcccggcctggggagagggctcgctggctctccagcccactcaccagtctctggatgctctgcagttcattggccgccttccttggccgagccacttgggcgacagggcaccgcgggatggggccccttacttttgcggagagccagcttcgggcagggggcttaggcttcccggctgtttccaccagcggccttggagccctcagaggccagcccggtggtgaggaggctagtgctaggcgggatggtgaccgggatctgataggggctgaaacgcagtcggggccgcactgcccaggaaggggctccgggagagggancggcggctgcggcggcggcagctgcagcactagtggcggcaaaancgaggcggctgcggctgctgctgccatgtaggtgtaggggtaggggaagaggcctccgaaagtgggcaattg

SEQ ID NO: 262466 - DNA, 1026 bp, Homo Sapiens
  misc_feature (639)..(690): n is a, c, g, or t
  misc_feature (714)..(737): n is a, c, g, or t
  misc_feature (784)..(793): n is a, c, g, or t
  misc_feature (856)..(884): n is a, c, g, or t
gggtggcgaattcggcacgaggggacggcctcctggaggcgctgaggaaggagctagctgcagtgtgtggggacccgtccacagatcccccgctgctgacccgagcaaggcaccagcaccacctccagggttgcctggatgccctcggccactacaagcagtcaaaagacctggccctggcggcagaggcgctgcgggtggcccggggtcacctgacccggctcacaggtggagggggtaccgaggagatcctggacatcatcttccaggacttctgtgtgggcaagtgacgggatccagggaagtcgcacccaagctgcgtggagacccaggagcctcgggggatctggaaacagtttaggccaattgggattctcattcgcctgggaaagaacttgattctcaaatagtgaagcaacacagctgagaggtagtgagatccctgcagggactccctggagattcaggccctggaatggggctgaatggaggtcccgttcgacccttgatgctggggcatccgggttgggatggagataggaggatctcagtatatttgtttcgtagttttttatttattttgcaaataccaaaggaatgtaaaaaaaacgtcaggtgatctagaaatgtttattttcnnnnnnnnnnnnnnnnnnnnnnnnnnnnnnnnnnnnnnnnnnnnnnnnnnnngtacccgaaacatccccccaagtnnnnnnnnnnnnnnnnnnnnnnnnccccagccggcggcagcagcgagagcaaagcgtcgtctcacccggcnnnnnnnnnnccgcggtattccaaatggcggcggccggcggcgggcctgcgtgaacacaacctgggagagacnnnnnnnnnnnnnnnnnnnnnnnnnnnnnaggaccacccgctagacggcggagaccacacccctcggcggcggggcggaaacggtgcggcaacagggcgggggcgggcgggcacaaccaaactcccccggttcgtgcccgccctgtgactcgcagcaggcgtgctcgctca

SEQ ID NO: 262467 - DNA, 839 bp, Homo Sapiens
  misc_feature (17)..(17): n is a, c, g, or t
agaggtggtctccagangacagtcagacaaataacagagccttagaaataaaaccttttgggctgggtggacaaggatcgcaattcatgcctctacaggaaagtctttgggttcggaggattccagaaacatgaaggagaagttggaggacatggagagtgtcctcaaggacctgacagaggagaagagaaaagatgtgctaaactccctcgctaagtgcctcggcaaggaggatattcggcaggatctagagcaaagagtatctgaggtcctgatttccggggagctacacatggaggacccagacaagcctctcctaagcagcctttttaatgctgctggggtcttggtagaagcgcgtgcaaaagccattctggacttcctggatgccctgctagagctgtctgaagagcagcagtttgtggctgaggccctggagaaggggacccttcctctgttgaaggaccaggtgaaatctgtcatggagcagaactgggatgagctggccagcagtcctcctgacatggactatgaccctgaggcacgaattctctgtgcgctgtatgttgttgtctctatcctgctggagctggctgaggggcctacctctgtctcttcctaactacaaaagccctttctccccacaagcctctgggttttccctttaccagtctgtcctcactgccatcgccactaccatcctgtcaccagtgggacctctttaaaacaagcagccaaccattctttgatgtatcccattcgctccatgttaacatccaaaaccagcctggatttcatacatggacttctgattaaaagtggcaggttgtgcatgttaa

SEQ ID NO: 262468 - DNA, 2141 bp, Homo Sapiens
  misc_feature (1895)..(1896): n is a, c, g, or t
gtcattcgagccttcgaggagcaggagcgcttcatccaccagagtgacctgaaggtggacgagaaccagaaggcctattaccccagcatcgtggccaacaggtggctggccgtgcggctggagtgtgtgggcaactgcatcgttctgtttgctgccctgtttgcggtgatctccaggcacagcctcagtgctggcttggtgggcctctcagtgtcttactcattgcaggtcaccacgtacttgaactggctggttcggatgtcatctgaaatggaaaccaacatcgtggccgtggagaggctcaaggagtattcagagactgagaaggaggcgccctggcaaatccaggagacagctccgcccagcagctggccccaggtgggccgagtggaattccggaactactgcctgcgctaccgagaggacctggacttcgttctcaggcacatcaatgtcacgatcaatgggggagaaaaggtcggcatcgtggggcggacgggagctgggaagtcgtccctgaccctgggcttatttcggatcaacgagtctgccgaaggagagatcatcatcgatggcatcaacatcgccaagatcggcctgcacgacctccgcttcaagatcaccatcatcccccaggaccctgttttgttttcgggttccctccgaatgaacctggacccattcagccagtactcggatgaagaagtctggacgtccctggagctggcccacctgaaggacttcgtgtcagcccttcctgacaagctagaccatgaatgtgcagaaggcggggagaacctcagtgtcgggcagcgccagcttgtgtgcctagcccgggccctgctgaggaagacgaagatccttgtgttggatgaggccacggcagccgtggacctggaaacggacgacctcatccagtccaccatccggacacagttcgaggactgcaccgtcctcaccatcgcccaccggctcaacaccatcatggactacacaagggtgatcgtcttggacaaaggagaaatccaggagtacggcgccccatcggacctcctgcagcagagaggtcttttctacagcatggccaaagaacgccggcttggtgtgagccccagagctggcatatctggtcagaactgcagggcctatatgccagcgcccaggggaggagtcagtacccctggtaaaccaagcctcccacactgaaaccaaaacataaaaaccaaacccagacaaccaaaacatattcaaagcagcagccaccgccatccggtcccctgcctggaactggctgtgaagaccaggagagacagagatgcgaaccacccaaaacacgcacaccctgcccctggtgccctgagacagacacacagcctcacgccccccagaaatggcaagtggttttcctggtgcttcccacggaggagttttggcagccagacttctggaggaattggttgtatagaagatcctagtgaccaaattcagcctactgcctcggatctctccagccgaagtctgtggactgcaagtctttgagatgcttctggctcccatcacctctaacatccttgtctgggtctaccaggaacgcttcatttccttggggctgcagttttgtggttgaggggcctggagaaaatcattttctccccttggcagtgtcccagggccctggatggtcctcttaccaacatctggtcttccaggcactcaaaagctgggaaccagcatctcagcgccagctctaccagttctcgttttgggccagaggcagcctctgcactcccacgcctgtcctcctggaagggacctggttggactaacggctaacctggacctggaactgtagggccaggggattgtctcagggccgacgttccacctgggggttnncctccccacccacccccacttcaggcttttcccttttttcttttggtccacattgtaagaaaacatcatgctgttattactggtcccaccatgatttgatgtgggggtaataattaagggagatgggcctcatggggaatttgaccctggactagaaaatagagactgaagagtggagccacccagcctggaaaggtaactattgccagtccctagccagaaaaaaatggggtttagggggcccg

SEQ ID NO: 262469 - DNA, 1141 bp, Homo Sapiens
  misc_feature (585)..(585): n is a, c, g, or t
gggggcattgtgacagctgaggacctgaacactaccgtgctgagctgatcgagcacccgctgaacatcagcctgggagacgcggtgctgtacatgcccagtgcgccgctcagcgggcccgtgctggccctcatcctcaacatcctcaaagggtacaacttctcccgggagagcgtggagagccccgagcagaagggcctgacgtaccaccgcatcgtagaggctttccggtttgcctacgccaagaggaccctgcttggggaccccaagtttgtggatgtgactgaggtggtccgcaacatgacctccgagttcttcgctgcccagctccgggcccagatctctgacgacaccactcacccgatctcctactacaagcccgagttctacacgccggatgacgggggcactgctcacctgtctgtcgtcgcagaggacggcagtgctgtgtccgccaccagcaccatcaacctctactttggctccaaggtccgctccccggtcagcgggatcctgttcaataatgaaatggacgacttcagctctccaagcatcaccaacgagttttggggtacccccctcaccntgccaatttcatccagccagggaagcagccgctctcgtccatgtgcccgacgatcatggtgggccaggacggcaaggtccggatggtggtgggagctgctgggggcacacagatcaccacggccactgcactggccatcatctacaacctctggttcggctatgacgtgaagcgggccgtggaggagccccggctgcacaaccagcttctgcccaacgtcacgacagtggagagaaacattgaccaggcagtgactgcagccctggagacccggcaccatcacacccagatcgcgtccaccttcatcgctgtggtgcaagccatcgtccgcacggctggtggctgggcagctgcctcggactccaggaaaggcggggagcctgccggctactgagtgctccaggaggacaaggctgacaagcaatccagggacaagatactcaccaggaccaggaaggggactctgggggaccggcttcccctgtgagcagcagagcagcacaataaatgaggccactgtgccaggctccaggtggcctccctggcctgtctcccc

SEQ ID NO: 262470 - DNA, 628 bp, Homo Sapiens
gccctcatcctcaacatcctcaaagggtacaacttctcccgggagagcgtggagacccccgagcagaagggcctgacgtaccaccgcatcgtagaggctttccggttggcctacgccaagaggaccctgcttggggaccccaagtttgtggatgtgactgaggccagctctggggtctcagcaggtggtccgcaacatgacctctgagttcttcgcggcccagctccggtcccagatctcggaccacaccactcacccgatctcctactacaagcccgagttctacacgccggatgacgggggcactgctcacctgtctgtcgtcgcagaggacggcagtgctgtgtccgccaccagcaccatcaacctctactttggctccaaggtctgctccccggtcagtgggatcctgttcaataatgaatggacgacttcagctctcccagcatcaccaatgagtttggggcacccccctcacctgccaatttcatccagccagggaagcagccgctcttgtccatgtgcccgacgatcatggtgggccaggacggccaggtccgaatggaggtgggagctgctgggggcacgcagatcaccacagacactgcactggccatcatctacaacc

SEQ ID NO: 262471 - DNA, 1007 bp, Homo Sapiens
ggggtcggcgggcggggcgaggccctggacggcggcggcagtggggctcctccttctgtttcccagaccgagagccgcgccggcaccatgtcagcttaccctaaaagctacaatccgttcgacgacgacggggaggacgaaggcgcccggccggccccttggagggacgcccgagacctccccgacgggcccgacgcgcccgcggacaggcagcagtacttgcggcaggaggtcctccgcagggctgaggccacggccgccagcaccagcaggtccctggccctcatgtacgagtccgagaaggttggggtcgcctcttccgaggagctcgcccgtcagcgaggagtcctggagcgcacagagaagatggtggacaagatggaccaagatttgaagatcagccagaaacacatcaatagcattaagagcgtgtttggggggctggtcaattacttcaaatccaaaccagtagagaccccacctgaacagaatggcaccctcacctcccagcccaacaacagattgaaagaagctataagtacaagtaaagaacaggaagcaaagtaccaggccagccacccaaaccttagaaagctggatgatacagaccctgtccccagaggggctggttctgccatgagtactgatgcttacccaaagaacccacaccttcgagcctatcaccagaagatcgacagcaacctagatgagctgtccatgggactgggtcgtctgaaggacatagcccctggggatgcagacagaaattgaggagcaagatgacattcttgaccggctgacaaccaaagtggacaagttagatgtcaacataaaaagcacagaaagaaaagttcgacaactctgaaaacagacggatttccacttctatggtgatggaaaagattggaaagatctttttttgaacttccaagaaatttcatttactattttagtatgtaaattaatgtgtgtttgcaaatgttataatagagtaggtcttaagacaa

SEQ ID NO: 262472 - DNA, 1216 bp, Homo Sapiens
  misc_feature (951)..(951): n is a, c, g, or t
  misc_feature (983)..(983): n is a, c, g, or t
  misc_feature (1008)..(1008): n is a, c, g, or t
  misc_feature (1011)..(1011): n is a, c, g, or t
ggcctgctgctggagaccaggacgcgctgtacgtggcgctggagctggtcatcgccgcgctttcggtggcgggcaacgtgctggtgtgcgccgcggtgggcacggcgaacactctgcagacgcccaccaactacttcctggtgtccctggctgcggccgacgtggccgtggggctcttcgccatcccctttgccatcaccatcagcctgggcttctgcactgacttctacggctgcctcttcctcgcctgcttcgtgctggtgctcacgcagagctccatcttcagccttctggccgtggcagtcgacagatacctggccatctgtgtcccgctcaggtataaaagtttggtcacggggacccgagcaagaggggtcattgctgtcctctgggtccttgcctttggcatcggattgactccattcctggggtggaacagtaaagacagtgccaccaacaactgcacagaaccctgggatgcaaccacgaatgaaagctgctgccttgtgaagtgtctctttgagaatgtggtccccatgagctacatggtatatttcaatttctttgggtgtgttctgcccccactgcttataatgctggtgatctacattaagatcttcctggtggcctgcaggcagcttcagcgcactgagctgatggaccactcgaggaccaccctccagcgggagatccatgcagccaagtcactggccatgattgtggggatttttgccctgtgctggttacctgtgcatgctgttaactgtgtcactcttttccagccagctcagggtaaaaataagcccaagtgggcaatgaatatggccattctttctgtcacatgccaattcagttgtcaatcccattgtctatgcttaccggaaccgagacttccgctacacttttcacaaaattatctccaggtatcttctctgccaagcagatgtcaangagtgggaaatggtcaggctggggtacagccntgctctcggtgtgggcctatgatcntangctctcgcctcttcccaggagaagatacaaatccacaagagaacaaagagaacacggctggttttcattgtgaaagatagctacacctcacaaggaaatggactgcctctcttgagcacttccctggagctaccacgtatctagctaatatgtatgtgtcagtagtaggctccaaggattgacaaatatatttatgatctattca

SEQ ID NO: 262473 - DNA, 1324 bp, Homo Sapiens
  misc_feature (403)..(448): n is a, c, g, or t
gcaggactgcagcagcatcaaggctggccgccgctcctcctacctgctggccatcaccacggagcgctccaagtcctgcgatgatggactcaacaccttccgcgacgagggccgggttctgcggcgcctgccaaaccgcatacccagcctgcggatgctccggagcttcttcaccgacgggtccttggatagctggggcacctctgaagatgctgacgctccttctaagcgacactcaacctctgacctctcagatgcgaccttcagcgatatcaggagagaaggctggttgtattataagcagattctcaccaagaaggggaagaaagcgggcagcggcctgcgccagtggaagcgggtgtacgccgcgctgcgggcgcgctcgctctcgctgagcaaggannnnnnnnnnnnnnnnnnnnnnnnnnnnnnnnnnnnnnnnnnnnnngcaggtgaggacgaggcggcgcccgtctgcatcggctcctgcctcgtggacatctcctacagcgagaccaagaggaggcacgtgttccggctgaccaccgctgacttctgtgaatatctctttcaggctgaggaccgggatgacatgctgggctggatcagagcgatccgggagaacagcagggccgagggcgaggaccccggctgtgccaaccaagctctgatcagcaagaagcttaatgattatcgcaaagtgagccatagctctgggcccaaagctgattcctcccccaaaggctctcgcggcctggggggcctcaagtctgagttcctcaagcagagtgcggcacgtggcctcaggactcaggacctgcccgcagggagcaaggatgacagtgctgcagcccccaaaaccccctggggcatcaacatcatcaagaaaaataagaaggccgctccgagggcgtttggggtcaggctggaggagtgccagccagccacggagaaccagcgcgtccccttaatcgtggctgcatgctgtcgcattgtggaggcacgagggctggagtccacaggcatttaccgagtgcccggcaacaatgcagtggtgtccagcctacaggagcagctcaaccgcgggcctggtgacatcaacctgcaggatgagcgctggcaagacctcaatgtgatcagcagcctgctcaagtccttcttccgaaagctgcccgagcctcttttcactgatgacaaatacaacgacttcatcgaggccaaccgcattgaggacgcgcgggagcgaatgaggacgctgcggaagctgatccgggatctcccaggacactactatgaaacgctcaaattccttgtgggccatctc

SEQ ID NO: 262474 - DNA, 996 bp, Homo Sapiens
  misc_feature (18)..(18): n is a, c, g, or t
  misc_feature (23)..(23): n is a, c, g, or t
  misc_feature (31)..(31): n is a, c, g, or t
  misc_feature (53)..(53): n is a, c, g, or t
  misc_feature (142)..(142): n is a, c, g, or t
  misc_feature (209)..(209): n is a, c, g, or t
  misc_feature (553)..(604): n is a, c, g, or t
  misc_feature (690)..(776): n is a, c, g, or t
  misc_feature (946)..(947): n is a, c, g, or t
cgtatccctttgatagtnccccnggagtttnaagaagtttagatagtttgccnggagatgtttttgtaagtgaccgtataggttatgtcctcctaatcccatgccctgcttaccctagattattaaatgtggagcaagatgncccagacaggattaaattttattgaattacagttacaagtggaaaaaatgactgacttactgcatgngagaagtattatgtcaacctgttaaaagctatggaaattaaaatgttcatgtatatacaaaatataaatgacatgtaaggtaaaattacagtgatcaatttacaacaaagaaattaacagtagttttccagcttgtttgattaatcaagcaggtttactcttgaatccatagcatttctacaatttaatttggacaaagttctattccagatcagccagggttttaaaactggaaatgtgttaagggtgggattgttaggcttccccaggattggtgtggatgataaatactttttttaaaaattaattattattgtttataagacatggattccagctgtctnnnnnnnnnnnnnnnnnnnnnnnnnnnnnnnnnnnnnnnnnnnnnnnnnnnntggacttaaacgatcctcctgcatcagcctctgaaatggctgggactacaggtgtgtgccagcatgcctagctaatttttaaacannnnnnnnnnnnnnnnnnnnnnnnnnnnnnnnnnnnnnnnnnnnnnnnnnnnnnnnnnnnnnnnnnnnnnnnnnnnnnnnnnnnnnntagcgggattacaggtgtgagccactgtgtctgacaagaatttatacttaagcataggagatggttctggaaattctaagaaattctgctctcagtaagagtagaggtttggagctttacctcttggcagtatccccttggaagggagctctgagaattaaatgtaatcnnaaacacttattgagaagcttttctatgggaccaggccactacacctaga

SEQ ID NO: 262475 - DNA, 1131 bp, Homo Sapiens
  misc_feature (628)..(628): n is a, c, g, or t
tggatttggtgttgacttctctcaagccacggaggacgtgggttcgggggttgccctcgtggcccggaggatcctgtcgcacggcgtcacctccttctgccccaccctggtcacttccccaccggaggtttatcacaagggctgcacctggagggccccttcatcagccgggagaagcggggcgcgcaccccgaggcccacctccgctccttcgaggccgatgccttccaggacttgctggccacctacgggcccctggacaatgtccgcatcgtgacgctggccccagagttgggccgtagccacgaagtgatccgggcgctgacggcccgtggcatctgcgtgtccctagggcactcagtggctgacctgcgggcggcagaggatgctgtgtggagcggagccaccttcatcacccacctcttcaacgccatgctgcctttccaccaccgcgacccaggcatcgtggggctcctgaccagcgaccggctgcccgcaggccgctgcatcttctatgggatgattgcagatggcacgcacaccaaccccgccgccctgcggatcgcccaccgtgcccatccccaggggctggtgctggtcaccgatgccatccctgccttgggcctgngcaacggccggcacacgctgggacagcaggaagtggaagtggacggtctgacggcctacgtggcaggcaccaagacgctgagtggcagcatagccccaatggacgtctgtgtccggcacttcctgcaggccacaggctgcagcatggagtcggcccctggaggctgcatccctgcaccccgcccagttgcctggggctggagaagagtaaggggaccctggactttggtgctgacgcagacttcgtggtgctcgacgactcccttcacgtccaggccacctacatctcgggtgagctggtgtggcaggcggacgcagctaggcagtgacaaggacctcggctgagaggacacctggccgcagcgggatgccatcagggccgggtggttggggagctggtttccagggagtgagtcgggagccctgctggattgatgcccagggcctgtgcggccgccctggaggcggtggctgggataaacgtgcccccagcaggaaaaaaaa

SEQ ID NO: 262476 - DNA, 969 bp, Homo Sapiens
  misc_feature (909)..(909): n is a, c, g, or t
gggatgacaagacagtcaaagtgtggtcaactcatcgccagagattcctgttttccctgacccagcacatcaactgggtccgctgtgccaagttctcccccgacgggcggctcatcgtgtctgccagtgatgacaagactgtcaagctgtgggacaagaccagccgggaatgtatccactcatactgtgagcacggcggctttgtcacctacgtggacttccaccccagtgggacctgcattgccgctgccggcatggacaacacagtgaaggtgtgggacgcgcggactcaccggctgctgcagcattatcagttacacagtgcagcagtgaacgccctctccttccacccatcgggaaactacctcatcacagcctccagtgactcaaccctgaagatcctggacctgatggagggccggctgctctacacactccacgggcaccagggaccagccaccaccgttgccttttcaagaacgggggagtatttcgcttctggaggctccgatgaacaagtgatggtctggaagagtaactttgacattgttgatcatggagaagtcacgaaagtgccgaggcccccagccacactggccagctccatggggaatctgccagaagtggacttccctgtccccccaggcagaggcaggagtgtggagtctgtgcagagccagccccaggagcccgtgagtgtgccccagacactgactagcacgctggagcacattgtgggccagctggatgtcctcactcagacagtctccattctggagcagcggttgacactgacagaagacaagctgaagcagtgtctggagaaccagcagctaatcatgcagagagcaacaccatgatcaggggagcaggaatcaagagctcggtgggatttgcaaggtggcaggnccaggggatttgtacccgtgggaacttggggtaaattaaagggggactggaacttctgtg

SEQ ID NO: 262477 - DNA, 917 bp, Homo Sapiens
ggggcggaggcggcggtgcagcgctccggtggaatgaatcttacttgttgaatatcttctggttactagttggattcatttgtgaaagaatcattttcccctgtgtggaagacacttagtggcatatttaaattataagtccacggatcaaaaagctttttgatttcccaaaggagggacataccactatatcagataagcttgacattacagccaagatggtgctgtcccagagacaacgagatgaactaaatcgagctatagcagattatcttcgttcaaatggctatgaagaggcatattcagtttttaaaaaggaagctgaattagatgtgaatgaagaattagataaaaagtatgctggtcttttggaaaaaaaatggacatctgttattagattacaaaagaaggttatggaattagaatcaaagctaaatgaagcaaaagaagaatttacgtcaggtggacctcttggtcagaaacgagacccaaaagaatggattccccgtccgccagaaaaatatgcattgagtggtcacaggagtccagtcactcgagtcattttccatcctgtgttcagtgttatggtctctgcttcagaggatgctacaattaaggtgtgggattatgagactggagattttgaacgaactcttaaaggacatacagactctgtacaggacatttcattcgaccacagcggcaagcttctggcttcctgttctgcagatatgaccattaaactatggggattttcagggctttgaatgcatcagaaccatgcacggccatgaccacaatggtttcttcagtagccatcatgccccaatggagaatcatataagggcctgcctcacaggggataaaactataaaaaaggggggaaaatggcaaactgggctactgtggggaagaca

SEQ ID NO: 262478 - DNA, 1258 bp, Homo Sapiens
  misc_feature (1001)..(1001): n is a, c, g, or t
gaaaattattgaaagggccccaggggaaattttatttattttattgaaggttcataaaacccaggatcttaaaccaaaaaggtgtgtggtagggaaaccaagcaggtttccactttcagagactttcattgcaggaacccaagtttcccttatggggaaaaaaagtgattataaataacagttatctgaaaggtggttgagaggattaaatgagatcacctatgcaaacaaatacatgtaggtatgaagacatcgtctggggtgtgaaagtttagttcacaccagaaccttcctttaaggcttaaaaacctcaaacagtatttcattcttaatacaagaaccaatgtttaaagcataaaatccttaattggagtgttcagcccagttgattatcaaaagcgatttataaaatgcttcaatactgatgatgttaaagcaaccaaaactttgtgatgctcacagaggtttggcttccggggttatggtccaaagtcatttgccttctgagaagattgcagagatgtcagatacttaatttctcaaacaacttggcatcagccttctatgttttctgtctatcatagtctccaaccatcttcttgatgtgtgacaatttgctctttaactgcttgcaatgattcttcttacttttgtaatctgcagatcccttcacttgcttcagtctattgtattcatcagcagcagccatgtactcttcactttcttctctatagtcatccaattctttatccaaacgggagagttctttattgatctcatcaagttctgattgtaagctcttgtattcctgtaggccagtgtcaaaattcctcttgtacagttgtctttgttgatctgaagtgataggtggatattccctgatccagtcctcctccagctcatcacaggactcgccgccagttgtgtagtctgtctcatagtgatcttgctctgttctctttgaaccttcctgctcttccctttgcaggtgctctttttgnaaggtgtctcaaagttaccaccgctgctgtaacgaggctgcctgaagtcatccacaggcgaagttaatggaagctcctgaaccacttcaggaaccctaataaaaacaggcatcattgttcaggacactacagccctttgccagtgcactgtaatcacagagcacagccataataaacaccagcagacagtctgcacgcaggtgcactcacgcgaggacttcagatgttcaacactgagcagatgcctcgttttctgg

SEQ ID NO: 262479 - DNA, 907 bp, Homo Sapiens
  misc_feature (109)..(109): n is a, c, g, or t
ccaagcccccccaggtgttttcttctttttcccctccccgggagtttccaggaaaggcggttccaggggcccttccttggtcccgatatgtcccatccaggtcccattntgctcccagcaggtccacggttcacttcccatggattgacatgctgcctatgggctctcgccgctctgcaatctgcaggtagccagtggacaggtactgctccatgtcctgctggaaggcttcctcaaaaaacttctgccgctccttcagcttcatttgctgggtgtgctccatttccaggaccttctgggcgtgctctgcatctagttcagctttgaaggtttcaagttccttcctcttatttttcttgtaattctccagttgctgggactgcatatgtttgcatctttctaagtcacactgcccacataagtcttccagatgcagcaggttgttctctacctcctcaaaactcgcctctaaatgagtcagatttgctgtcatggattctaagtctgcgattaaagctgggagctgctggagctgctcttgcagctccacgaggcttgtctttttcttctcccagtgcgcagaaagcatgaccacctcgctatccaccagctctccagcacttgcacagtctttggcccttctgtgaagtgcagcccatgtatcctcatacctgctaagtaattctaatccagcagagtactttggcaaaaatggaacagtcctgggtttgcttttcacttttgcttctcttgacttgtcacttaaagtcttcagcccggaggtgaaatcctgctgcacgctcagcagccgctcgcgaagggtctccagcattgccgccgccgccggtctcctctcctcaggccccggtctggtcctcgccgccgcgccgcaaccccagcccctccc

SEQ ID NO: 262480 - DNA, 921 bp, Homo Sapiens
gacttggagggaccggggcctgggaaggggcccgccagggagcttcccctgggtgggtgaagttagaaggaggaaccaggggcgtagaagggccgagggctgaccggaggcggttgtagatgagggtcacatagaggtagccgctgcggacattgaagtcccccgtcgtggtatttgccaaatgcctggaggatgatggtggtgacggccatgacgggcttcaccaggcagaactgcagagtggcctgcttacagaagcacaggaacccgatggagtagggtcatgccccggaggcagcaggtgccgtacaagcagctggacttgatgggctttccacgaatctcagccatgatggcgccctcgcctcccaggtactggaaacacaggctcaggaagctgtaaatgacaaaggcttcgtagcagtcccgcacagagtcgaagtagacgtagtactggtggtctccgaggaggaggaggctgagccaggagtcgaaggcgtagatgggcacgatgaggagcaggcggatgatgtaacgttgctcctgtggcacggtgtaggagcgcaggtgcagatagatctggtggcaggtgagcaccagggcagtccacacgaagatccccgagacgcctcgggccagtgcggaggtgaggaagagccagggggccccctgggagctgttccccatgtggtccatctgcggcccagctggcacagccggtggggggctgggctgcggccagttcactgacaccagggggacgccggctgtctccaggatccctgagacattactcatctttgctggcaggaagcacctggcccagtccagggaggcctggcctccagggaagcctagctggtcattctcatggccacgtggccccagctggaggccccactgtgggtcggcaaggccagg

SEQ ID NO: 262481 - DNA, 1043 bp, Homo Sapiens
  misc_feature (670)..(670): n is a, c, g, or t
  misc_feature (1033)..(1033): n is a, c, g, or t
cagagcaggtaacagctcttgcacctgtttctcttgcacctgacgtgcagctgctcctacccacctctcctggctgagccttgcctgatacagcagcccggaggcaccacttgcttcccgagtctcaccctcccaggcagctcctacactcaactgcttctctaggaaaggtctcacctccagcctggagcagtcgggattacagaaagccccatccttggcttagggagcgccatgacgactgaaattggttggtggaagctgactttcctccggaaaaagaaatccactcccaaagtgctgtatgagatccctgacacctatgcccaaacagagggagatgcagaacccccgaggcctgacgctggaggccccaacagcgactttaacacccgcctggagaagattgtggacaagagcacaaagggcaagcacgtcaaggtctccaactcaggacgcttcaaggagaagaagaaagtgagagccacgctggcagagaaccctaacctctttgatgatcacgaggaaggacggtcatcaaagtgaagggctgaggagggtgctagcacctcttggctccctgccatcagccagatctgagacaggaccttgccacgctggcctctttggccatagctgaagctgtggggccagttgatacctgctggcnaggaaatggctgttttttaggtttgtatttatgtgccgccacttttgtaaggcctgggagatcccagggtcctccaccctccccctggacacatacaaaggcactctagttcaaagggtgaaagtctcacccaggaggaacagccctccttgaagcaatggcagggcagccagggaggtgggcatggcagggaatggagtgagccagacagacttcacctccttactggacacagggtcaagggcgagtttcaattgctgctccctttactttctctacctgtgactactccctggaccaatcctgaggagggcacattttccagaagccacgtgataggggctggtttctgtggagccagangagagacact

SEQ ID NO: 262482 - DNA, 743 bp, Homo Sapiens
ctgactttcctccggaaaaagaaatccactcccaaagtgctgtatgagatccctgacacctatgcccaaacagagggccagcagggaggtgggcatggcagggaatggagagagtgagccagacagacttcacctccttactggacacagggtcaagggcgagtttcaattgctgctccctttactttctctacctgtgactactccctggaccaatcctgaggagggcacattttccagaagccacgtgataggggctggtttctgtggagccagaggccgagacactgaacttgagctcacctcctaacaccggcagtaaacttcctggaactttgccctcaggtgcggaggggacagaggaccctggcactctgttagggtgctgtagaagactagattgatggtagtttggcctgttagttcctgttttggccatgacttttgcagatggcaagtcacacaccctcaaagggaagctacacgggccaaatcgggggagtgggtggggaattttctcctctccctttcctactataatagtatttaagacatatcagctccagagatgagtcctggagccttgaattttgtttaacaaaataattgtaggtttctctctgtaataacaacgctggaaaggccgagaacctcttttatgctcatgtcttgcatttattgagatgactgtttctcatgcctttatgttccttcatgtaagtaaagtggacctttgtgctcaa

SEQ ID NO: 262483 - DNA, 985 bp, Homo Sapiens
  misc_feature (929)..(929): n is a, c, g, or t
atcacagggccagaagcctgggttgaccaaataaggccttggccttttctgcttggctgtcccaagaggatcccaaagagaaaaaaacgaaagtggtcttggtcacccagcctgccccacaccaggccccaccccaggtgctgagccctctgagcccctgcctgtctcccacaggctctgccctgcaccttagggctcgggatgctgctggccctgccaggggccttgggctcgggtggcagcgcggaggacagcgtgggctccagctctgtcaccgttgtcctgctgctgctgctgctcctactgctggccactggcctagcactggcctggcgccgcctcagccgtgactcagggggctactaccacccggcccgcctaggtgccgcgctgtggggccgcacgcggcgcctgctctgggccagccccccaggtcgctggctgcaggcccgagctgagctggggtccacagacaatgaccttgagcgacaggaggatgagcaggacacagactatgaccacgtcgcggatggtggcctgcaggctgaccctggggaaggcgagcagcaatgtggagaggcgtccaacccagagcaggtcccccgtgcgggctgaggaagccagacacagtgaacacggagggcgaacctggttcctcggcctccccaggaccagccaagcggcaagggggccagtgcctgaaggccctgcctgaagggaacctacaactctctcttttacttggaaaacgcaagccctgtgggatggaacagccgcagggggcccagctgggcggaggcaaggggcgctccaatgggcagacctgaaatcattaataaggccgagtaccctagggtaggaagccttcgccgatgatttaagacaacgctcgtagattacacctgcgtgcaccgtgatgacctgtcccnccaggaaagcgccaatggcatcgcggcacaaggggagctcgccgagaaggctgtat

SEQ ID NO: 262484 - DNA, 940 bp, Homo Sapiens
  misc_feature (684)..(763): n is a, c, g, or t
tggtttccaagaaattgtttatgcagttgacttcaaccacaagagggagatccatttaaatggatgttccctggaaatgctaagcaggccttccctacttatcacagattcattcaatgctacatatgtacagcctagaagaaaacagagagatgagcagcttctgacaaatgtcctggaaacacttcgaggtgatggaaatgtgttaatagcagtggacacagcaggcagagttttggaacttgctcaacttcttgatcagatttggaggactaaagatgcaggattgggtgtttactcattggcactcctaaataatgtcagttacaatgtggtgcagttttctaagtcccaggtagaatggatgagtgataaattgatgagatgttttgaagacaaaagaaataatccgtttcagtttcgccatctctctttatgtcatggtctttctgacttggcccgtgtacctagccctaaagttgtacttgccagccaacctgacctggaatgcggattttcaagggatctctttattcagtggggtcaggaccctaaaaacctcacccccccagccccagaactaccgcctggacccgagcacgcctcccaagcggaacagcgccctcgacccgtgccctagccaccacgccgcgaacccggtgcaggctcgcggggccggagcgnnnnnnnnnnnnnnnnnnnnnnnnnnnnnnnnnnnnnnnnnnnnnnnnnnnnnnnnnnnnnnnnnnnnnnnnnnnnnnnntgtccgcccacgtatgcgccgccggtgcggggcacccagcgcgttggccgctcgcgtacctcgactgtgcgagagtacgcgccgcggcgccggtccgggcggcggcctactgcacagcccgtggtcgcgcttcccgatggggcggcgggccacacgtcgacggggcggcgatgtttg

SEQ ID NO: 262485 - DNA, 1820 bp, Homo Sapiens
  misc_feature (363)..(363): n is a, c, g, or t
  misc_feature (1278)..(1278): n is a, c, g, or t
  misc_feature (1541)..(1541): n is a, c, g, or t
  misc_feature (1567)..(1567): n is a, c, g, or t
acgaggaagttaagatcatacatgcggatgtgctggtaacctgcaagaagcaatcatgctgcggtccggtgtgacctcccaaggcattcaccctgggagtccctggtgctgcaccccaacccaggcagagctcatcgtgggtgaccagagcggggctatccacatctgggacttgaaaacagaccacaacgagcagctgatccctgagcccgaggtctccatcacgtccgcccacatcgatcccgacgccagctacatggcagctgtcaatagcaccggaaactgctatgtctggaatctgacggggggcattggtgacgaggtgacccagctcatccccaagactaagatccctgcccacancgccctacgccctgcagtgtcgcttcagccccgactccacgctcctcgccacctgctcggctgatcagacgtgcaagatctggaggacgtccaacttctccctgatgacggagctgagcatcaagagcggcaaccccggggagtcctcccgcggctggatgtggggctgcgccttctcgggggactcccagtaacatcgtcactgcttcctcgaacaacctggcccggctctggtgtgtggagactggagagatcaagagagagtatggcggccaccagaaggctgttgtctgcctggccttcaatgacagtgtgctgggctagcctgtgacccctcgggactgcctggtgcaggtggtggcagctggagggacccatgcagcacccaggtcagagcagaccctcccctgccggcctgcgccagctggacctgatggccccctgtggcgccttgacctgctgggccaggctgccctgggactctcagcccccagttgcttatccagatgtgacagagctcgacccaagccaggctgcacactcctggactgggctagcctgcactgcctgggaaagtcggccgagggcccaaagctgctgaggggtctgaagctggtgcccacccccaagctagtgtgttctctgcccctccctgcccgcgtttcagggcctcggtccatagagaacaccaccaccatggccaggtggaagggtttattagtccctgccagcagctgtcctccctggtgcaggtggcctggccagcccactggattggggacgggccaggctgggccaggtcgggggctcagtctgggaggtaataaaagcagaccgacacggagaaggacaccgacgagcgagagggtaagcctgtgccggccgacgctcgcgcctcagagaaccttcccgaanaccactgtcgtttgggcgccgcgggcccccgtaagcgcaagtggacacatgggtccatagcctggtggtcctcagggagacccctgggcccatgaccaggtgggctttggaaccccctcgcccaaatgaaagaaaacgcccgcgggcgggcagaacccgaaggcggtttctgaaacaaaaatcccggcgatggggcaggtcgctgccaggccccatttaacgtggggatcctatccaacgcagggaattcccgagcgcgggancttcccgaattatcaaaagtatcccnccccgtgccccctggcccacttccctccccgaagaacggggcgtgggaaattgtctctgtaaggcatttcctcgtcccgaaccatgggcaagccgccttccaccaaaagcggggacgtggaagtaaaacctggaacatcgccgccgcgcggtaaatcgaacggaccccttgtggggccgcctgtggcggaataaaacaattcggcgccccagtgggggaaacaacccgggggggcacaaacaaaaaagggcgc

SEQ ID NO: 262486 - DNA, 725 bp, Homo Sapiens
  misc_feature (15)..(15): n is a, c, g, or t
  misc_feature (21)..(21): n is a, c, g, or t
ggcggagtgcgggcngccccntcaagatgctctgacctttgacccctgccgttcagctctagggcccgtgcaggcacaccatgaacacctccccaggcacggtgggcagtgacccggtcatcctggccactgcaggctacgaccacaccgtgcgcttctggcaggcccacagcggcatctgcacccggacggtgcagcaccaggactcccaggtgaatgccttggaggtcacaccggaccgcagcatgattgctgctgcaggttaccagcacatccgcatgtatgatctcaactccaataaccctaaccccatcatcagctacgacggcgtcaacaagaacatcgcgtctgtggggcttccacgaagacggccgctggatgtacacgggcggcgaggactgcacagccaggatctgggacctcaggtcccggaacctgcagtgccagcggatcttccaggtggacgcacccatttaactgcgtgtgcctgcaccccaaaccaggcagagctcatcgtgggtggaccagagccgggggctatcccacctcctgggaactttgaaaaacagaaccaccaaacgaagcaggctggatcccctggagcccccgaaggtcctcccattcacggttccggccccaacattccgaacccccggaacggccaagcttaacatgtggggaagcctggttcaaattaacccacccgggaaaacttggccttatgc

SEQ ID NO: 262487 - DNA, 1373 bp, Homo Sapiens
  misc_feature (569)..(587): n is a, c, g, or t
  misc_feature (1328)..(1328): n is a, c, g, or t
  misc_feature (1338)..(1338): n is a, c, g, or t
acgagtccgcatgatcatggccaagacggctgctgaccgcagaaatgtcaagcagaaccaggccttccagtacgagtttggagccatgtatgcatggatgctgtgtgtcttcactgtcatcgtggcctacagcatcacttgtcctatcatcgcgccatttggcctcatctacatcctgctcaagcacatggtggaccggcacaacctctacttcgtctacctcccagccaagctggaggaaggggatccactttgccgctgtgaaccagggccttggcaggcccccatcctgtgcctcttctgggctctacttcttttccttcctgcgcctggctatgaaggcccccgccactctgttcaccttcctggtgctgctgctcaccatcctggtctgcctggctcacacctgctttggatgcttcaagcacctcagccctctgaactacaaaacagaagagcctgcaagtgacaaaggaagtgaggcagaggcccacatgcccccaccgttcacaccctacgtgcctcggattctgaacggcttggcctcggagaggacagcactgtctccnnnnnnnnnnnnnnnnnnnacctatggtgccatccacaacatcagcgggactatccctggacagtgcttggcgcagagcgccacgggcagtgtggctgctgccccccaggaggcctgaggctgggtctcactgctctgaaaagacacaaccagaatggcctggggctcaggcccttggctgagtgggaatgcgttgggactgcccagctgagctatcaggtgcccatcttttctggtcccagcagtggtgaggagagcacaggcaggcctcgcccctcccttgctcacccagtttcccctccggcacaagcttccagctctgcagctggggtgacatccccagtggtttgtcgccaagaccatgtggtggacttttcgccccccaaactgatgagtccgggagaatatatggagagagagatgtaacaaggggaaggcctcctcccttctgagcacacacacaaccgataaccaaagagatgctgcagtccaggtctgaggtcccgctggcatccagctccctgctccatggccagtccctccccagcccagcagtccctccaggctacatccaggagtaagctatggggaacaaggtggggaggtggccagtgcctcctgccagctgtgcacacatctctgtatcccgctagaggtctgtgtttttgtatcatgttgtcagggacgctagctgggtcagggttaccccatagcaggcagggacaaggaccactcataatatgcccattggaccacagtntagaatcagncctctctcacctcttccagggcttgtaatgcatga

SEQ ID NO: 262488 - DNA, 923 bp, Homo Sapiens
ttgtcaagcagcggccaatcaaggcaggggatggaggcaagtgggggtcgcgcctggagcggagcctcggcctccggagccgcagctgcagccctgtattgagctgagatggctcgagcctaacattccatgatccaggatcgtgacagatgtgcacaggctgctgctgttgctgctgtgggtaatttggaaccacgaggcaccccagggccagaagacgaggcattctgtctgcctggatgtgtgggaactctctgccaacttgattggtggatctggggggggatccacccccaccccacgaggaaagcacagtttattttgtgggtggggcttcaggtgccagccagctgaaggatggccacccctgtggtcaccaagacagcctggaagttgcaagagatcgtcgcgcatgccagcaacgtgtcctcactggtgctgggcaaagcctccgggcggctgctggctacaggcggggatgactgccgcgtcaacctgtggtccatcaacaagcccaactgcattcatgagcctgacgggccacacatccccagtgggagagcgtccgccttcaacacccccgaggagctcatcgtggccggctctcagtcgggctccatccgtgtctgggacctggaagctgccaaaattcttcgcacactcatgggacacaaagccaacatctgcagcctggatttccacccgtacggcgagtttgtagcctctggttcccaggacacaaacatcaagctctgggacatcaggaggaaaggctgtgtcttcccataccaggggcacagccaggccgtgcggtgtctccggttcaccccccaatgggaattggttggcgtccggcgccaaatgaccaccccccgaaagctcctgggatctcactggccggcaaaaatgatgtcctggagttc

SEQ ID NO: 262489 - DNA, 915 bp, Homo Sapiens
  misc_feature (887)..(887): n is a, c, g, or t
  misc_feature (900)..(900): n is a, c, g, or t
ctggaaccaaggaccctaggtgccctgctgctggacgcactgaggtccccagggctgagggcactggaggctgggacggctgtcgaacttctggatgttttcttgggcctggagactgatggtgaagagctagctggggcgatagctgccgggaaccctggagcgcctctccgtgaacgggcagctgagctccgggaggccctagagcaggggccacggggactggcccttcggctctggccaaagctgcaggtggtggtgactctggatgcaggaggccaggccgaggctgtggctgccctcggggccttgtggtgccaaggactagccttcttctctcctgcttatgctgcctcgggaggggtgctgggcctaaacctacagccagagcagccccatgggctctaccttctgccccctggggccccctttatcgagctgctcccagtcaaggaaggcacccaggaggaagctgcctccaccctccttttggccgaggcccagcagggcaaggagtatgagctggtgctgacggaccgcgccagcctcaccaggtgccgcctgggtgatgtggtgcgagtggttggtgcctacaatcagtgtccagtcgtcaggttcatctgcaggctggaccacaccctgagtgtgcgaggggaagatattggtgaagacctgttctctgaggccctgggccgggcagtgaggcagtgggcgggggccaagctgctggaccatggctgtgtggagagcagcattctggattcctctgcgggctctgctccccactacgaggtgtttgtggcgctgagggggctgaggaatctgtcagaggaaaatcgagacaagctggaccactgccttcaagaagcctctccccgctacaagtncctgcggttcttngggcagcgtgggcct

SEQ ID NO: 262490 - DNA, 1063 bp, Homo Sapiens
  misc_feature (696)..(697): n is a, c, g, or t
  misc_feature (712)..(712): n is a, c, g, or t
gtctctatggagcggaagtgagtggcgtgttcggatggagaggagtagaagagggctgaagaatgagagtccaggatagattgtggaagtgtatgtggtaaggtattcgcagaggataggggacgggttgagggggagaggtcgttgtgcggcggaggtggtgggagctagttgggggttggagaggtcgtggtgagcgggagttcccatagtatcgaggttggagatgggtgggcggcacgcgtgtagccgcagtgggagtgtgacggggatgtacacccaccggatgattgtgccatgggtccacgggtgttgtggagggggtgtgtgatcgcaggtgttggcgcccaagaggggggcaggtgcccagggagaggcctggaagtcaagggccgtccaattgccaagtttgctagcgtatttaccttctagcccccccagggcccttggtcacctggtggatgtccagcgagaaggtggtccggctgatcatgaacttctccatctggatctcccgcagcggcctcttgagcagggccttggtcatggcgttctgggctgtcatgcgtggggctggttcaaggtctgtcacagtcatcaccgacagcaccgggtcccagatgcgaaactggacatcggctcccacggacagcacagccccgtccttagaggccagcttgcagggagggacgttgnnaaggctcgtgtcctncagatccaccctctgagaaggagtcaatgaaggccaagagcagaaccatgccaggtccctgggggatgcggatccggcccaggcggaacacaatcatccgctcgtaggtgggcacaatcttcagggcaaaccagccagaaatggggaaggtgaccaacagcagcaagaaccccaggaaactgatgaggccatgacagaggcaggagggccagctctggggtacatcggcccctgtccccacgccgccccgctccggggacaagcagcccttctgcgagcccagaaagccgaagctcgactgctggaagcggtcaaaatcacccaggggcagcgcccggtacccagacctgc

SEQ ID NO: 262491 - DNA, 1106 bp, Homo Sapiens; identical to SEQ ID NO: 102255
  misc_feature (915)..(923): n is a, c, g, or t
  misc_feature (955)..(963): n is a, c, g, or t
  misc_feature (972)..(1062): n is a, c, g, or t

SEQ ID NO: 262492 - DNA, 778 bp, Homo Sapiens
  misc_feature (112)..(112): n is a, c, g, or t
  misc_feature (282)..(282): n is a, c, g, or t
ggaaggggggtgggggaggcaagggtacatgagagccattacgtcgtcttcctgaatccctttagaatagggtagatgttttcaaatgcttcataaatttctgctctgactntagcacctgttaatacaacttttccagaaacaaaaataaggagaacaattctgggtttgatcattctgtagataaaaccaggaaataactctggctcataactactaaattgttggtgggtgagcacaagcccttctaaccttataggaaacttcacatcacagctcccncaccatattctgaatcttgaagtccaagaacttagctggaaaacccaacttctgtacaactctagcatattttcttgctgccagtctggactgttcttcactcttggctcctgtgcacaccattttcccagaactgaaaatcagtgccgtggttcgtggctctcttatcctcatgattaccgcagcaaaccgcttgggattatattcggcgtttcgggcacgaagtgcaatggtctttaggtcaagtttacaaccaagattcactgtggatacaatattttgcagctgcggtacaatcccagaactctccgaagctggcgtggcaggagtgatgggggtcatgggagtcatgggggagggatacagtggagtggtgcccggcaagggtgcagttgtgagagtctgtgagtggaagagctgtggtgcctggcctgaggttccctgtgttgcctgctgggacgttgactgctgaacggctgcagctgccactgcctgt

SEQ ID NO: 262493 - DNA, 862 bp, Homo Sapiens
  misc_feature (301)..(313): n is a, c, g, or t
gttttataaacaaaaataagattgtgacaagggattccactattaatgttttcatgcctgtgccttaatctgactgggtatggtgagaattgtgcttgcagctttaaggtaagaattttaccatcttaatatgttaagaagtgccatttcagtctctcatctctactccaacttgtcttcttaggtgctaaagtcagagcagaaatttatgaagcatttgaaaacatctaccctattctaaagggattcaggaagacgacgtaatggctctcatgtacccttgcctcccccacccccttcnnnnnnnnnnnnnaaacaaatcagtttgttttggtacctttaaatggtggtgttgtgagaagatggatgttgagttgcagggtgtggcaccaggtgatgcccttctgtaagtgcccaccgcgggatgccgggaaggggcattatttgtgcactgagaacaccgcgcagcgtgactgtgagttgctcataccgtgctgctatctgggcagcgctgcccatttatttatatgtagattttaaacactgctgttgacaagttggtttgagggagaaaactttaagtgttaaagccacctctataattgattggactttttaattttaatgtttttccccatgaaccacagtttttatatttctaccagaaaagtaaaaatcttttttaaaagtgttgtttttctaatttataactcctaggggttatttctgtgccagacacattccacctctccagtattgcaggacagaatatatgtgttaatgaaaatgaatggctgtacatatttttttctttcttcagagtactctgtacaataaatgcagtttataaaagtgtttaaaa

SEQ ID NO: 262494 - DNA, 1000 bp, Homo Sapiens
gggggcgcgtcggccatgagcgagttgccgggcgacgtgcgggcgtttctgcgggagcacccgagcctgcggctccagacggacgcccgcaaggtgaggtgcatcctgacaggtcacgagctgccctgccgcctgccggagctccaggtctacacccgcggcaaaaagtaccagcggctggtccgcgcctccccggccttcgactatgcagagttcgagccgcacatcgtgcccagcaccaagaacccgcaccagttgttctgcaaactcaccctgcggcacatcaacaagtgcccagaacacgtgctgaggcacacccagggccggcggtaccagcgagctctgtgtaaatatgaagaatgtcagaagcaaggggtggagtacgtgcctgcctgcctggtgcaccggaggaggaggagggaggaccagatggacggtgacgggcctcgcccgcgggaagccttctgggagcccacatccagtgatgaggggggagctgcaagtgatgacagcatgacagacctgtacccacctgagctattcaccagaaaggaccttggaagcacggaggatggggatggcactgatgactttttgacagacaaagaggatgagaaggcaaagcccccaagagagaaggccactgatgagagcaggagagagacgaccgtgtaccgagggctggtccagaagcgcgggaagaagcaagtgggctcgttgaaaaagaagttcaagagtcatcaccgcaaacccaagagcttcagctcctgtaaacagccaggttaataaaagcacatgccgtgaaatttcgaagaagccttcagatatttcccccgctcctgatcaaaccgggtgtcttctgaatgatcggctgtccccattgtcttctctacccactaatcttggctcatgacatctgctgcccctttaagcagggcctaagggagtcctgtcccccccacccaggaagcaccagggaattctgagggacttattctcc

SEQ ID NO: 262495 - DNA, 1040 bp, Homo Sapiens
ggggtctaatggcggacgccagtatgttggagctggtggtggcttaagttttgaagggaggtagcatccgttggatatccacaccatccttctcgctgcaggctttcttggactccgtactgttggtgtaaccaaggcctggaggtctgggtggctcaggtttcctgcagccatgtttctgtacaacttaaccttgcagagagccactggcatcagctttgccattcatggaaacttttctggaaccaaacaacaagaaattgttgtttcccgtgggaagatcttggagctgcttcgcccagaccccaacactggcaaagtacataccctactcactgtggaagtattcggtgttatccggtcactcatggcctttaggctgacaggtggcaccaaagactacattgtagttggcagtgactctggtcgaattgttattttggaataccagccatctaagaatatgtttgagaagattcaccaagaaacctttggcaagagtggatgccgtcgcatcgttcctggccagttcttagctgtggatcccaaagggcgagccgttatgattagtgccattgagaaacagaaattggtgtatattttgaacagagatgctgcagcccgacttacaatttcatctccccctggaagcccacaaagcaaacacctttagtggatcatggaagttggagtaaatgtccgaattgaaaatccaatgtttgcttgtctggaaatggattatgaggaaacagacaatgatccaacaggggaagcagcagctaatacccagcagacacttactttctatgagctagaccttggtttaaatcatgtgggtccgaaaatacagtgaaccctttggagggaacccggcaactttcttaataacagttcccaagaaggtccgaatgggcccaagtggaaggaacggtatctgcctcctggaaacttaaatttactttaccaggaaaacttttggtggaaccaagcccagaaaattccgcgctggtcccatattccccagggagagggcgaaaaaa

SEQ ID NO: 262496 - DNA, 958 bp, Homo Sapiens
cccggagcccggggtgctggagggaggcggcaggcccgggtcaggcgcctcgagatcgggcttgggcccagagcatgttccagatcccagagtttgagccgagtgagcaggaagactccagctctgcagagaggggcctgggccccagccccgcaggggacgggccctcaggctccggcaagcatcatcgccaggccccaggcctcctgtgggacgccagtcaccagcaggagcagccaaccagcagcagccatcatggaggcgctggggctgtggagatccggagtcgccacagctcctaccccgcggggacggaggacgacgaagggatgggggaggagcccagcccctttcggggccgctcgcgctcggcgccccccaacctctgggcagcacagcgctatggccgcgagctccggaggatgagtgacgagtttgtggactcctttaagaagggacttcctcgcccgaagagcgcgggcacagcaacgcagatgcggcaaagctccagctggacgcgagtcttccagtcctggtgggatcggaacttgggcaggggaagctccgccccctcccagtgaccttcgctccacatcccgaaactccacccgttcccactgccctgggcagccatcttgaatatgggcggaagtacttccctcaggcctatgcaaaaagaggatccgtgctgtctcctttggagggagggctgacccagattcccttccggtgcgtgtgaagccacggaaggcttggtcccatcggaagttttgggttttccgcccacagcccgccggaaaggctccgggggccccgccctcgggctccgggcttttccccaggcgcctggggctaagtcccgaagccaggttaaaccgttgcgttcaccggggaaccggaaccccccgcgaaggcccctgggggggcgtggctcaactaaccaaaagggttaataaac

SEQ ID NO: 262497 - DNA, 392 bp, Homo Sapiens
  misc_feature (22)..(22): n is a, c, g, or t
  misc_feature (58)..(58): n is a, c, g, or t
  misc_feature (113)..(113): n is a, c, g, or t
  misc_feature (124)..(188): n is a, c, g, or t
  misc_feature (247)..(247): n is a, c, g, or t
  misc_feature (337)..(337): n is a, c, g, or t
  misc_feature (359)..(359): n is a, c, g, or t
ttcccaagtgaccttcgctccnaaatcccgaaaactcccacccgttccccaatgcccngggcagcccatcttgaatatgggcggaagtacttccctcaggcctatgcaaaaanaggatccgtgnnnnnnnnnnnnnnnnnnnnnnnnnnnnnnnnnnnnnnnnnnnnnnnnnnnnnnnnnnnnnnnnnggtcccatcggaagttttgggttttccgcccacagccgccggaagtggctccgtggccncgccctcaggctccgggctttcccccaaggcctggctaagtcgcgagccaggtttaaccgttgcgtcaccgggacccgaacccccgcgantccctgggggccgtgctcactnccaaatgttaataaagcccgcgtctgtgccaaa

SEQ ID NO: 262498 - DNA, 1755 bp, Homo Sapiens
  misc_feature (1673)..(1684): n is a, c, g, or t
ggaccatacaacactgtacattgtaatggaatattgtgaaggaggggatctggctagtgtaattacaaagggaaccaaggaaaggcaatacttagatgaagagtttgttcttcgagtgatgactcagttgactctggccctgaaggaatgccacagacgaagtgatggtggtcataccgtattgcatcgggatctgaaaccagccaatgttttcctggatggcaagcaaaacgtcaagcttggagactttgggctagctagaatattaaaccatgacacgagttttgcaaaaacatttgttggcacaccttattacatgtctcctgaacaaatgaatcgcatgtcctacaatgagaaatcagatatctggtcattgggctgcttgctgtatgagttatgtgcattaatgcctccatttacagcttttagccagaaagaactcgctgggaaaatcagagaaggcaaattcaggcgaattccataccgttactctgatgaattgaatgaaattattacgaggatgttaaacttaaaggattaccatcgaccttctgttgaagaaattcttgagaaccctttaatagcagatttggttgcagacgagcaaagaagaaatcttgagagaagagggcgacaattaggagagccagaaaaatcgcaggattccagccctgtattgagtgagctgaaactgaaggaaattcagttacaggagcgagagcgagctctcaaagcaagagaagaaagattggagcagaaagaacaggagctttgtgttcgtgagagactagcagaggacaaactggctagagcagaaaatctgttgaagaactacagcttgctaaaggaacggaagttcctgtctctggcaagtaatccagaacttcttaatcttccatcctcagtaattaagaagaaagttcatttcagtggggaaagtaaagagaacatcatgaggagtgagaattctgagagtcagctcacatctaagtccaagtgcaaggacctgaagaaaaggcttcacgctgcccagctgcgggctcaagccctgtcagatattgagaaaaattaccaactgaaaagcagacagatcctgggcatgcgctagccaggtagagagacacagagctgtgtacaggatgtaatattaccaacctttaaagactgatattcaaatgctgtagtgttgaatacttggttccatgagccatgcctttctgtatagtacacatgatatttcggaattggttttactgttcttcagcaactattgtacaaaatgttcacatttaatttttctttcttcttttaagaacatattataaaaagaatactttcttggttgggcttttaatcctgtgtgtgattactagtaggaacatgagatgtgacattctaaatcttgggagaaaaaataatgttaggaaaaaaatatttatgcaggaagagtagcactcactgaatagttttaaatgactgagtggtatgcttacaattgtcatgtctagatttaaattttaagtctgagattttaaatgtttttgagcttagaaaacccagttagatgcaatttggtcattaataccatgacatcttgcttataaatattccattgctctgtagttcaaatctgttagctttgtgaaaattcatcactgtgatgtttgtattcnnnnnnnnnnnnctgtttaacagaatatgagctgtctgtcatttacctacttctttcccactaaataaaagaattcttcagtt

SEQ ID NO: 262499 - DNA, 1050 bp, Homo Sapiens
  misc_feature (670)..(670): n is a, c, g, or t
  misc_feature (774)..(774): n is a, c, g, or t
  misc_feature (890)..(890): n is a, c, g, or t
  misc_feature (892)..(892): n is a, c, g, or t
agggtgttctctggtgtctgttgtggctgtgggatccacggttactgggcggagccctgtggtggctgtggtgccatggaggggctgcgatcttctgtggagctggaccctgagctgactccagggaagctggatgaggagatggtggggctgccaccccatgacgcgagtcctcaagtcactttccacagcctcgatgggaagacagtggtgtgtccacacttcatgggcttactgctgggtctcttacttttattgactttgtctgttaggaaccaactctgtgtaagaggtgaaaggcagcttgcagaaacactgcattcacaggtgaaggagaaatcccagctcattggcaagaaaacagattgtagagactgaggcatctttaaaagatgtcagggtacagaaaaagtctttcaacacccccggctttgtagatgcctacaagaaggtgaatagcaccaacgagatgctgatggagaaatttaccaccctcgttcaagaactgaaagaagagacatcctccagactctccaggcaacaagaggagctggtagagatgctaacaacgctggaggccctgggagaggccatgagagccaccccgtcacaaggagcttttccacacctgccatgcagctgagagccaagccctgctgctctctccccncacgaggggggctggggtcttagagcagcactgttcttttcccctccacccaggcctcccgagctgccaggctctgtgctcccacactgactcccatctgaagngtccttgaggccagtgggatctggagtaccccgccccctgggcctggagttcctccctccttctcacgctgacactgcagccagctccctcaatggggcggtggcctccaaatctnanaaagaatatggaaggtccctggagcacacccaagaaaatggaggggacttttttcttttggcagaaaagttttgaaattctgttctttaagtgagaccggaatgcccatactttgaagcaccttcatccttttggctctcaaattggaaaatggtcat

SEQ ID NO: 262500 - DNA, 1028 bp, Homo Sapiens
  misc_feature (34)..(34): n is a, c, g, or t
ccgggaaagcagagaaagcccaggttgtctttgnccaacaccaagaaacttgggcgggcccccccctatgggccattaagaaaattaaaaggtcccttccggttgaggagatggggccttcagggggtacaaggatcttcccaggtttcccctggggggccaggagtaggcccaggggccaagctctggtggtgatggcccagcaccccgcttgactgctggacttacttctccaggtgggccaaagggccaggccccaggatgatcacactcagctcggatgcccagcaggaagaagcgggtgatctcccacaggatcttatcagcaacagttgcagcgttcgaggtgctcaccgtcatggataccacggcccgggcaatgcccaccagcgccaccacaaacaccaggatgtagaaggtgataaaaatggggctggaggtgatgcggatcttcgcccgagcagatggaagcttccagagcaggaagatgaggaagagcacattggggatgagcagcaagaggtcccagtaccggaccctggaggtgccaatgtcttcgtagagcagcagcaggcagcgatgaggcacactgatgtttggtgccaggggtgggggtagcgctgtgctcccattggcccaagtcacctcctccagggtgtccatcccgccagcagccagccctgacagcccgggccgcgctcaggaccggccgccccggccgccccggccgcccatccgccgccactgggtgtgcgcggatccagcacaggccgcgggactccggcctccagcgccagaccaggcggcctgggccgggaagcgtcgcgcaaggaccgggcgcgaccggctccgtggaatgagggctaggcaggaaaggcgaggcggggtcagctcgccgggccgcgggtctcgcggacaccctgcagcccttcccgacagcggcgaccgggaaagcaagaccgtctttttcgtccagcccaaattgcgaaaacggccacagtcccacaagtcccagagtcccagagtcc

SEQ ID NO: 262501 - DNA, 1029 bp, Homo Sapiens
gcttgtaacttaagccggttataagcaggctgtacggcccggaatcctcgggatatcgtcgacccacgcgtccgctcaactatgtgactgagatcgcacaggatgagatttatatcctggaccctgagctgctgggggcatcggcccggcctgacctcccaacccccacttcccctctccccacctcaccctgctcacccacgccccggtcactgcaaggggatgctgcaccccctcaaggtgaagagctgattgaggctgccaagaggaacgacttctgttagctccaggagctgcaccgagctgggggcgacctcatgcaccgagacgagcagagtcgcacgctcctgcaccacgcagtcagcactggcagcaaggatgtggtccgctacctgctggaccacgcccccccagagatccttgatgcggtggaggaaaacggggagacctgtttgcaccaagcagcggccctgggccagcgcaccatctgccactacatcgtggaggccggggcctcgctcatgaagacagaccagcaggacgacactccccggcagcgggctgagaaggctcaggacaccgagctggccgcctacctggagaaccggcagcactaccagatgatccagcggaggacccgagacggctgtgtagcgggccgcccaccggcagcaggagggacatgcggccaggggaccagcgcttcttgccactcactgcacattcagtgggacggcccggggggacctaggcacaggaaagagccccatgcgcccctaggagccgccagactagggctgactcagacctgggaggctcactgttccctgaggaccgtcgaccgcaagtcacggaaccagacgcgctcgatagcctagcggtactgagcagcgcaccgccgatgcaccagtggcagcaaggaccgaaaacatgacgaagagcacatactaacaacacccacaacagccacccaaaaacaaaccaagaaagacaacacaacaacccgaccgacaacacgaacacccacac

SEQ ID NO: 262502 - DNA, 485 bp, Homo Sapiens
gaggaggctagactcaagctgtctggagagtgtgaaacaaaagtgtgtgaagagttgtaactgtgtgactgagcttgatggccaagttgaaaatcttcatttggatctgtgctgccttgctggtaaccaggaagaccttagtaaggactctctaggtcctaccaaatcaagcaaaattgaaggagctggtaccagtatctcagagcctccgtctcctatcagtccgtatgcttcagaaagctgtggaacgctacctcttcctttgagaccttgtggagaagggtctgaaatggtaggcaaagagaatagttccccagagaataaaaactggttgttggccatggcagccaaacggaaggctgagaatccatctccacgaagtccgtcatcccagacacccaattccaggagacagagcggaaagacattgccaagcccgctgcagtctgcaaaggtcttcacaaatcagaatcaactggtaatta

SEQ ID NO: 262503 - DNA, 271 bp, Homo Sapiens
cgcggccttgcagctgaagctgcgtcggcggctcacggagctcctgggggcgcaggacggggcgctgctggtgcggctgctgcaggcgctgcgcgtggccaggatgcccgggctggagcggagcgtccgtgagcgcttcctccctgtgcactgatcctggccccctcttatttattctacatccttggcaccccacttgcactgaaagaggcttttttttaaatagaagaaatgaggtttcttaaagcttatttttataaagctttttcat

SEQ ID NO: 262504 - DNA, 983 bp, Homo Sapiens
  misc_feature (841)..(841): n is a, c, g, or t
  misc_feature (864)..(864): n is a, c, g, or t
  misc_feature (943)..(943): n is a, c, g, or t
tccgatgtgctttctccacatccctgtgtcctgtttctatttagtaccattttatgatgcacagtttgtttgctctttgtttttctatctttgaaaataaaacaaaatggcaatagggacattagaaaagcggctatgaggaaatgatctttttttcttagcagacatccaaaattatgtacagtgtgttttttctccaattctgttctcatcatttaatgtattgaggttgactacacgaaagctaattttctgatgtgctttttctttaggtgactccaccagtgatgcagaaggagatgctggacctgctggccaagataagtctgaggtgccagagactccagaaattcctaatgagctttcatccaacatcagaagaattcctcggcctgggagtgcaagaccagcccctccccgggtcaaacggcaagacagcatggaggcgctacaaatggataggtcagggagtggtaaaaccgtttcaaatgtgattacagagtcacacaattctgacaatgaagaggatgatcaatttgtggtggaagctgcccctcagctctctgaaatgtcagaaattgaaatggtaacagcagtggaactagaagaagaggagaagcatggtggacttgtgaaaaaaattttggagacgaagaaagattatgagaaattgcagcagtcacccaaacctggggagaaggagcgatctctctttgagtcggcatggaagaaggagaaggacatcgtttccaaggagatagagaagctccgcacgtccatccagacccctgtgcaagagcgcacttccccctggggaagatcatggactacatccaggaangacgtggatgccatgcagaatgnagctgcagatgtggcacagcgagaacaggcagcacgccgaggccctgcagcaagagcagaggatcacagactgtgccgntggaggcccttaaaggctgaactcgcggagctggagcagc

SEQ ID NO: 262505 - DNA, 996 bp, Homo Sapiens
agaggacaggaagagggggagccagttctgggaggcggggggaaggaggttggtggcgactccctcgctcgccctcactgccggcggtcccaactccaggcaccatgttccccgcgggcccccccagccacagcctcctccggctccccctgctgcagttgctgctactggtggtgcaggccgtggggagggggctgggccgcgccagcccggccgggggccccctggaagatgtggtcatcgagaggtaccacatccccagggcctgtccccgggaagtgcaaatgggggattttgtgcgctaccactacaacggcacttttgaagatggcaagaagattgattcaagctatgatcgcaacaccttggtggacatcgtggtgggtgtggggcgcctcatcactggcatgaaccgaggcctcatgggcatgtgtgtcaacgagaggcgacgcctcattgtgactccccacctgggctatgggagcatcggcctggcggggctcattccaccggatgccaccctctacttcgatgtggttctgctggatgtgtggaacaaggaagaaaccgtgaaggtgagcacaattgctgcgcccgccccactgaccccgcatgggccaggacggcgaataagtccgctaacactaaaatggcaccctggctggaaggcacctccttccacaccagctacagaaaaggccggaaattatgacaactaaattcggctctgaggtggttgaaccaggggaatggacacaaggactgctgagccatgtgcacctagaagaaaaaataggaaaaataattattcccaacaaatcccggagcctatgggtgaaaaaaggctaaggggaaaaaggatcccccccacaaggcactgcatgcgtcttttcaggagcatacaaaaatgagcgaggaacaagaaagaagagaaatgttgcaagcaaaaaaacacggggaggttctccccacgagtatgggtgccgctaaaagact

SEQ ID NO: 262506 - DNA, 878 bp, Homo Sapiens
agaaagactcaatgcatgccacgggaggtgtgtatagatgtggggaaggagtttggagtcgcgacaaacaccttctttaaacctccatgtgtgtccgtctacagatgtgggggttgctgcaatagtgaggggctgcagtgcatgaacaccagcacgagctacctcagcaagacgttatttgaaattacagtgcctctctctcaaggccccaaaccagtaacaatcagttttgccaatcacacttcctgccgatgcatgtctaaactggatgtttacagacaagttcattccattattagacgttccctgccagcaacactaccacagtgtcaggcagcgaacaagacctgccccaccaattacatgtggaataatcacatctgcagatgcctggctcaggaagattttatgttttcctcggatgctggagatgactcaacagatggattccatgacatctgtggaccaaacaaggagctggatgaagagacctgtcagtgtgtctgcagagggggcttcggctgccagctgtggaccccacaaagaactagacagaaactcatgccagtgtgtctgtaaaaacaaactcttccccagccaatgtggggccaaccgagaatttgatgaaaacacatgccagtgtgtatgtaaaagaacctgccccagaaatcaacccctaaatcctgggaaaatgtgcctgtgaatgtacagaaagtccacagaaatgcttgttaaaagggaaagaagttccaccaccaaacatggcagctgtttacagacggccatgttacggaaccgccaggaaggtttgttgaggccaggggttttttcatattagttgaaggaagtgtgtccttgttgttccctttcttttgggg

SEQ ID NO: 262507 - DNA, 980 bp, Homo Sapiens
  misc_feature (884)..(884): n is a, c, g, or t
tgccctattcccccagaagagctccatacacataagcaacctggaaccagagctgagagctcagatccatgagcaaaaccccagcgttgaagtggtctactacaacaaggggctttgaggagggtcagcctctgtcccctccctcacttccttgggctgctgctttagtggagtcatgtcacccctaccacttggctatctgcctagcactgggcaggggccttggtgggcagatggcaattgagggtagcaacctattagggtgggggagggacctccataaggctttacctcccttctctggtatcaaagatcagagcacataacccctcctgtgcttgagtgtccatgcatatacatacatgatacacatgtgtatgtgtacattgggtcctgaaagtctagaagcaggcatgctagcctagtcatgttctgacactctggcttcccttctcaggcctcatgtccaccctgcctgccaatccaggctacaggtgtgacttccttctctaaacctgtaacaccagccaagttatttttgatggcacctcatcccttctacgaaataggaggagccccaggatctcaggacagagactatactagacactagtaggacaaacgcgggctgaatcctacaggtttctgatacctagctccccaagctgactgggctggcagaggagaacatgttgagacaagggaggcaggggacttatgcatccctcagtgccatcccttgtatcctggaatagctccatttcccctcctcctctctaccagacaagggagtgcctggtgtctgaactgccctcgctgtctcccccaccacctactttgacagcgtgggcatcttcagcaacaagccttgggaagtttctggntgtgctctgacatcatgacctcaaatctaaatcctccaatccaactcccttttccaaacaaaagccacagaaggcgaagcaggcatccccctttaa

SEQ ID NO: 262508 - DNA, 1307 bp, Homo Sapiens
  misc_feature (947)..(1005): n is a, c, g, or t
gaggtgattggcatccggcagctgtcccagtccctgctccctgccattgtggagctggctgaggacgccaagtggcgggtgcggctggccatcattgagtacatgcccctcctggctggacagctgggagtggagttctttgatgagaaacttaactccttgtgcatggcctggcttgtggatcatgtatatgccatccgcgaggcagccaccagcaacctgaagaagctagtggaaaagtttgggaaggagtgggcccatgccacaatcatccccaaggtcttggccatgtccggagaccccaactacctgcaccgcatgactacgctcttctgcatcaatgtgctgtctgaggtctgtgggcaggacatcaccaccaagcacatgctacccacggttctgcgcatggctggggacccggttgccaatgtccgcttcaatgtggccaagtctctgcagaagatagggcccatcctggacaacagcaccttgcagagtgaagtcaagcccatcctagagaagctgacccaggaccaggatgtggacgtcaaatactttgcccaggaggctctgactgttctgtctctcgcctgatgctggaagaggagcaaacactggcctctggtgtccaccctccaacccccacaagtccctctttggggagacactggggggcctttggctgtcactccctgtgcatggtctgaccccaggccccttcccccagcacggttcctcctctccccagcctgggaagatgtctcactgtccacctcccaacgggctaggggagcacggggttggacaggacagtgaccttgggaggaaggggctactccgcccacgtcagggagagatgtgagcatcccgggtcactggatcctgctgctgtaatgggaacccctcccccatttacttctccacctcccgtcctccccatcattggnnnnnnnnnnnnnnnnnnnnnnnnnnnnnnnnnnnnnnnnnnnnnnnnnnnnnnnnnnncacagagaaataaaggtctagaagtaaacccctgcaagacagacatgaaagactaaaaatagtaatacacaaaactctaaaaggcaaaaatgacacgcataaactccacgccaagaacatcaaaccaaacaaaataaacttcgtggcgtcgcgggctccccccgccactaagaatattttttaaacgcttttggtgggcggccgccccgcccataagagagaaggtggtgagccccccaattttcctttttcaacaaaaactcccctttgcgccactacacacgcgcctcttctcccccccc

SEQ ID NO: 262509 - DNA, 916 bp, Homo Sapiens
tcaggatgagggtgcccgggctggacggctaagggcacgaagacgatatctggtagagagggccagagatgcccgcgtggtagggctgctggcaggcacactgggtgtagcccaacaccgtgaggcactggcccacttgcggaacctgactcaggctgctggcaagcgtagctatgtgttggccctggggcggcccacccctgccaagcttgccaacttccctgaggtggatgtctttgtgctattagcctgtcctctgggtgctctagccccccagctttctggtagcttcttccagcctatactggcaccatgtgagctggaagctgcctgcaaccctgcctggccacctccaggcctggctccccacctcacacattatgcggacttattgcctggctctcccttccacgtggctctcccaccacctgagtcagagctgtgggaaaccccagacgtgtcactcattactggagatctccgacccccacctgcctggaagtcatcaaatgatcatggaagcttggctctgaccccacggccccagctggagctggctgagagcagtcctgcagcctcattccttagttcccggagctggcaagggctggagccccgcctgggtcagacgccagtgacagaagctgtgagtggaagacgagggattgccatcgcctatgaggatgagggaagcggctgataccatgtggggctggagacatagatggacttatgaatggctgctaggacctttagtgctccctgcaccaacctcccatcccccgccaagatccttgaaaggaccctggaaaggagggagagcaggcagccccttcacagggatagggatcccgtcttctgttcctgtcccctggcactgggcacaaagctcagccacatggccccagtaaaggca

SEQ ID NO: 262510 - DNA, 1215 bp, Homo Sapiens
  misc_feature (110)..(144): n is a, c, g, or t
  misc_feature (153)..(399): n is a, c, g, or t
tgagttcagagtcggggatccacgccaggtcgggagcacagccgctccccaaacccagcaaaccggcagagagccggtttcccagcagccggagccctgcaggagaggcnnnnnnnnnnnnnnnnnnnnnnnnnnnnnnnnnnngagacagannnnnnnnnnnnnnnnnnnnnnnnnnnnnnnnnnnnnnnnnnnnnnnnnnnnnnnnnnnnnnnnnnnnnnnnnnnnnnnnnnnnnnnnnnnnnnnnnnnnnnnnnnnnnnnnnnnnnnnnnnnnnnnnnnnnnnnnnnnnnnnnnnnnnnnnnnnnnnnnnnnnnnnnnnnnnnnnnnnnnnnnnnnnnnnnnnnnnnnnnnnnnnnnnnnnnnnnnnnnnnnnnnnnnnnnnnnnnnnnnnnnnnnaataggtgtcagccaccgcacccagcctggagtggccttttatgagaggggacccgtcaaatctgtgccttatggaggggtccggcagcggccacaattgtcttgtcccctcaccccccaactccccctggaacacctctcccaggcaagacattttcacagcaccattcacaacggttgggccaaaaagaaacttttccttcatcatttcctgcactcgctgaccacaactttggacaccccaaggctgccacccctccccacccgttcacccccaggatgctgttgctgtaggacgcctgctgcccctggagcccttccccaggatgtgagccagtcccctcgctggtacggaatgccgctgggtgcccgaaggcggccatggtgtctcgatggacggcagccaggatggagcacccatggggtctcacggccatgcttcaaggtcttcaagtcctgcccccggccagtctgccaagaggaacccccttccccagcctctcgcctgcactgatgcagaaaaaaatctcccttggcaggcccaacccaaccccagcccctccccgacggtgggtggacccctcgcccgcatcgattgggggggtatgactacagtcgacataaatcatggcaaacaaaatccggcgtttttcccgtgtacagacaacctgatacttgcccctgggcattcctagttatgtagcctaaccgcgaaaaatgtaacgcgaaaaggcgcgggcggctaactagccgctagcccggtgaccaccgatgtcgctggagaggaggagccaacggcgcctgcccatcttgccc

SEQ ID NO: 262511 - DNA, 1142 bp, Homo Sapiens
cagtccagtctctgctgagagcacaggagcctccagcctgccctgtggcacataccaccccccagcttggcctccccaccagcccgctgagcaggctgccacccccgatgctgagcctcacagcgagcctcctgatcaccaggagcgccctgccgtccaccgcgggatccgctacctgttgtacagagcacagagagccatccgccttcgccatgccctccgcttgcaccctcaattgcatcgggcccctattcggacttggtctccccatgtggtccaagccagcactcctgccatcacagggcccctcaaccatcctgccaatgcccaggaacatcctgcccagctgcaaaggggcatcagcccaccccaccggatacgaggggctgtgcgatcccgcagccgctccctccggggctcctcccatttatcccagtggctcaacaacttttttgccctccccttctcctccatggcttcccagcttgacatgtcttccgtggtgggggcaggggaaagcagagcccagactcttggagcaggtgttccccctggggactctgtcagaggctccatggaggcctctcaagtccaagtgcctctggaagcctctccaattacattcccaccaccctgtgccccagaaaggccccccatcagcccagtcccaggcgcccgtcaagcaggcctctgagagtgctacccttctcttgtaaccttgcagccaacacccctgcccggcccctgagctgcctcctccagcccatgctcttacaggccctgcacagagtagcactccattaattcttgcgttaaggaatgaatcaacgaatgaatggctatgcatggacctctgggcagggagacctgggtcttctctggctgagaggggaaggctaaggcatggctgagattcaagccaccattccaggcctctttgcccaagaaagaaacttctgtcacccttgcactctcctgtgttctgagtccctggccaatagcacagccttccatgccccgacccccaccccaagcctctccactaggcctctgccaggatctaagcccatgagcacagggactggctatcccaagacctggcagatgtggctgctcaataaacacttgttgaaccatcaaaa

SEQ ID NO: 262512 - DNA, 1398 bp, Homo Sapiens
  misc_feature (90)..(112): n is a, c, g, or t
  misc_feature (1269)..(1269): n is a, c, g, or t
tgggtggcgaattcggcacgaggagaagaaggagaaggagaagaaggctgaggacctggacttctggctgtctaccaccccaccgcctgnnnnnnnnnnnnnnnnnnnnnnngttccatccacggacgagtgtgaggacgccaagacggaggcgcagggcgaggaggacgatgccgaggggcaagaccaggacaagaaatctcccaagcctaagaagaagaagcacaggaaggagaaggaggagcggaccaaaggcaagaagaagtccaagaagcagcctccaggcagcgaggaggcagcgggggagccggtgcagaatggcgcgccagaggaggagcagctcccgcctgagtccagctactccctcctcgctgaaaattcctatgttaaaatgacctgtgacatccggggcagtctgcaggaggacagccaggtcactgtggccatcgtgctggagaacaggagcagcagcatcctcaagggcatggagctcagcgtgctggactcactcaatgccaggatggcccggccgcagggctcctctgtccacgatggcgtccccgtgcctttccagctgcccccaggcgtctccaacgaagcccagtatgtgttcaccatccagagcatcgtcatggcgcagaagctcaaggggaccctgtccttcattgccaagaatgacgagggtgcgacccacgagaagctggacttcaggctgcacttcagctgcagctcctacttgatcaccactccctgctacagtgacgcctttgctaagttgctggagtctggggacttgagcatgagctcaatcaaagtcgatggcattcggatgtccttccagaatcttctggcgaagatctgttttcaccaccattttatccgatgtggagcgagcggacctcctgcgcctccatgcacaagccgctccatccaagggccaccagtgtctgcctccctggcgaaaaaaggggggagaaactccggtcctccggtccaaccgggaaagtgccaccggacctcccccggctaccatggagcgaggcctgtgtcggcaacaagaaagaaagggcggacaacctgggaacaaaatgggtttggaaaacacagcccctggacaaagcccccggacagcaacacacaggaggaaaacgcgccgacccgcacagggacccgcctgcacccttgagagcagtcccccagacctccatgacacaacatcgaaggcggatacacggcgacacccaagcccccgggagcaggccacactcntaagtctctccaaagggaagacaccccccaccggcatacaaacatccccagagcgcccctagcaccaaagaagaaagagacactaaacaagaacgccacacaataaattccccccaagaacacgccacc

SEQ ID NO: 262513 - DNA, 1021 bp, Homo Sapiens
ggcctgagtggcgaattcggcacgaggctccatggtcaagctcatcctggtgtggctcacggccatcgtgctgttctgctggttctatgtgtaccgctcagagggcatgaaggtctacaactccacactgacctggcagcagtatggtgcgctgtgcgggccacgcgcctggaaggagaccaacatggcgcgcacccagatcctctgcagccacctggagggccacagggtcacgtggaccggccgcttcaagtacgtccgcgtgactgacatcgacaacagcgccgagtctgccatcaacatgctcccgttcttcatcggcgactggatgcgctgcctctacggcgaggcctaccctgcctgcagccctggcaacacctccacggccgaggaggagctctgtcgccttaagctgctggccaagcacccctgccacatcaagaagttcgaccgctacaagtttgagattaccgtgggcatgccattcagcagcggcgctgacggctcgcgcagccgcgaggaggacgacgtcaccaaggacatcgtgctgcgggccagcagcgagttcaaaagcgtgctgctcagcctgcgccagggcagcctcatcgagttcagcaccatcctggagggccgcctgggcagcaagtggcctgtcttcgagctcaaggccatcagctgcctcaactgcatggcccagctctcgcccaccaggcggcacgtgaagatcgagcacgactggcgcagcaccgtgcatggcgccgtgaagttcgccttcgacttctttttcttcccattcctgtcggcggcctgaggatggtccgccacgaggagcttccagtgcatgttgccatgaggccccttccccagtgtggccccagcccgacaggcatgcacccaatgccgttctgtgccccacgtgtgcaaaactgtgggctgcagaagactttgcgacccaggtgtagattgcatgggaccccggaccaaaaggaaagggctggctgtgtaaccctctggtcaactc

SEQ ID NO: 262514 - DNA, 1114 bp, Homo Sapiens
  misc_feature (41)..(125): n is a, c, g, or t
  misc_feature (149)..(158): n is a, c, g, or t
  misc_feature (194)..(205): n is a, c, g, or t
  misc_feature (234)..(287): n is a, c, g, or t
  misc_feature (385)..(447): n is a, c, g, or t
  misc_feature (490)..(490): n is a, c, g, or t
  misc_feature (492)..(492): n is a, c, g, or t
tttttttgggtagaggagagtgttttttaaaaaaagatttnnnnnnnnnnnnnnnnnnnnnnnnnnnnnnnnnnnnnnnnnnnnnnnnnnnnnnnnnnnnnnnnnnnnnnnnnnnnnnnnnnnnngttttattttttaaggaggggttnnnnnnnnnnagcccccggtggggggcccctctcgcaaaatggttnnnnnnnnnnnnagacccccgccctttattaggacaatttnnnnnnnnnnnnnnnnnnnnnnnnnnnnnnnnnnnnnnnnnnnnnnnnnnnnnnccaaaaggcccgggctttttaaagggggtgggttttccagggttccccggtttgggaaaggcccaaggcaaggttcaaaagggggcgggaaagccctnnnnnnnnnnnnnnnnnnnnnnnnnnnnnnnnnnnnnnnnnnnnnnnnnnnnnnnnnnnnnnngttggctggccgccaacagggctggttgcgcaccacaagaaangncaggtcacacaggaacagctgcacggccttgtcaatggagctgctggctggtgtggtagccaggctgtcctgcaggtacccactggccttctcacagatggtcaggctggctggaccagactctgccttggcacagcccagcagggcccgggcagccttgaaggagtgcagagctgccctgggcaggggtctctcagactcctgcagcacccggggcaggtgctccaccagcgggcacagccgctcagccgcctcctcatcccgccgcagccagtggatcaccacagctgtcagagaggcccaccacttggccaccgggtctacgccggtggtggtggccatgctggaactgatggagaagctgtaggcaggagcccccgcagcatcagaacagctgttcagcagctgcaggtacccgagggcatccgagaattccttgtccccatcagctgacccagggctggggttgggctgggtcacacagttcagtgctcgctctaagagatgttcccggaatagctgagtcacctgggccagggggtccactgggttcccggccaagctgtacaggctctcccatggggtactgagcacggaccagtccccatccacgaagaaacgg

SEQ ID NO: 262515 - DNA, 1035 bp, Homo Sapiens
  misc_feature (1022)..(1022): n is a, c, g, or t
ggcctgggtggcgaattcggcacgaggggaagttactgtgaggcggcggctaagaaggcggctctggtggcggcggtggaggctgaggcggcggccgaggcggcgacggaggaaacagaagatggcagattttttgaaaggactgcctgtctacaacaaaagcaattttagtcgatttcacgcggactccgtgtgcaaagcctcgaaccgacggccctcagtctacctgcctacccgcgagtacccgtctgaacagatcatcgtgacagaaaagacaaacatcctcctgcgctacctgcatcagcaatgggacaaaaagaacgctgccaagaagagagaccaggagcaagtggagctggaaggcgagagctccgcacctccccgcaaggtggcgcggaccgacagcccagacatgcacgaggacacttaagactctcaactccacaggcgcctcctgccaggtctgctcctcggtcgcccacccgcctgcccgccatgtgtaagcaccccgcccgcccgcctccctgccggcccatccacaccctgcgtccacaccacttccaacctcataggagccgatgtatttattttccttgagtttttatttatgctgtaacctgtatcaagcgttggttaaaggggacatcagacccagtagtgtgatgttggtagatgctttttaaaaaaacaacattgtccccccgacccccgccttccatcaggccagttccccgattccctgcccccagttctccagagaaacaaagtgtggccggtgaaaggctctaacggggggctttaatggggggccgggcgacagggggcaggccccgggtgggcctgacctatccaggaagagcgaaggggcccttctcccccccaaaacccgggcccggcgatttgaaaactctcggcttggcccacggtctcccccggaaaatttcccatggccccaaacctcccgccacggggaccacccgcgtgggggaaaaagccgtcgccctgggggatgctctcgcctngacggccctcgaa

SEQ ID NO: 262516 - DNA, 928 bp, Homo Sapiens
tcaatgacagtcgagctttggctaaggctccggggaaagggtctagccatgctgcatgtgacccggggggtctgggggtccagggtccgagtatggccactgttgcccgcgctcctcgggcccccccgggccctctcatcgctggcagccaaaatgggggagtatcgcaagatgtggaaccccagggagccccgcgactgggcccagcagtaccgcgagcgcttcattcccttctccaaggagcagctgctccgcctcctaatacagggagaccctcgatcagccatcactaacggatccccagcgtctgtctaatgagcaggaggtgcttcgggctctggagcccctgctggcccaggccaacttctccccgctgtctgaggacaccctggcctacgcgctggtggtccaccaccctcaggatgaggtccaggtgacagtaaatttggatcagtatgtctacattcacttctgggccctgggccagcgagtcgggcagatgcccctgaagtccagcgtgggctccaggcgtggcttcttcaccaagctgccccctgcggagaggtgaggcggcccttgttccccagctgcagcaagagggagcaaggttagagtcaagaggggactgacaggtcagtgtctgggttgggtgtctgggccccagcgggaaggtgaaagatgggaggcgtgactcatccaaaagctgacttttctttctcagggaaagggagtactaccctttgattcccagggggaagaagaaggatgggggacaggttctcccccattttccaataaacggaaacctaaaggccctcgaaaagggaaaggcccacaatcttcggaaaaaaaccaacaacggggccaggaaatttccaacacaaaaaatcttgggaacgatcccaaataaaccaaggcggaattcgaa

SEQ ID NO: 262517 - DNA, 1357 bp, Homo Sapiens
  misc_feature (415)..(424): n is a, c, g, or t
  misc_feature (428)..(430): n is a, c, g, or t
  misc_feature (432)..(432): n is a, c, g, or t
  misc_feature (434)..(435): n is a, c, g, or t
  misc_feature (437)..(439): n is a, c, g, or t
  misc_feature (448)..(448): n is a, c, g, or t
  misc_feature (456)..(915): n is a, c, g, or t
gggcctgctgctggccacaaagaactcccacctgcgacacatcgagcacatggagagcgacgagctggggctgcagaagaagctacgcacagaggtcattcagctggaggacacgctggcccaggtacgcaaggagtatgagatgctgcgcatcgagtttgagcagaatctggcggccaacgagcaggcggggcccatcaaccgtgagatgcgccacctgattagtagtcttcaaaaccacaaccaccagctaaaaggggacgcccagcgatacaagcggaagcttcgagaagtacaagctgagattggcaagctccgggcccaggccagtggctctgcccactccacccccaacctgggccacccagaggattctggcgtcagtgccccagccccagggaaagaggagggtggnnnnnnnnnntgtnnntntnntnnnttatttatnggatatgnnnnnnnnnnnnnnnnnnnnnnnnnnnnnnnnnnnnnnnnnnnnnnnnnnnnnnnnnnnnnnnnnnnnnnnnnnnnnnnnnnnnnnnnnnnnnnnnnnnnnnnnnnnnnnnnnnnnnnnnnnnnnnnnnnnnnnnnnnnnnnnnnnnnnnnnnnnnnnnnnnnnnnnnnnnnnnnnnnnnnnnnnnnnnnnnnnnnnnnnnnnnnnnnnnnnnnnnnnnnnnnnnnnnnnnnnnnnnnnnnnnnnnnnnnnnnnnnnnnnnnnnnnnnnnnnnnnnnnnnnnnnnnnnnnnnnnnnnnnnnnnnnnnnnnnnnnnnnnnnnnnnnnnnnnnnnnnnnnnnnnnnnnnnnnnnnnnnnnnnnnnnnnnnnnnnnnnnnnnnnnnnnnnnnnnnnnnnnnnnnnnnnnnnnnnnnnnnnnnnnnnnnnnnnnnnnnnnnnnnnnnnnnnnnnnnnnnnnnnntagtgagtgagaaggcggatggagtgtagaggggagatgtgcgccgggcgaattgggcgaacgccgtgggccacacgtaaggtccacgtagggcaaagtaccggtgagatatggtaaactacccgtcctctcccgctcgcgagactctgccctgtactcttgggctccctcagctgagagacgaaagtatgtcacggcagggtgcgagagcggctgcgctcgcgcgagccgccggggcgagtggaagggacgccgccgttgcggatccccgagtggagccgacattctaagagagatatgtgtggcgcagggctccaggcgacgcccggtgagccgggcgtatctgagtcctaacggccgcagtatcacgcccggacaacgtgtatcgatatccagctctggaggggcgcaaatgaggagtcacaggcagccatgcacttcg

SEQ ID NO: 262518 - DNA, 1051 bp, Homo Sapiens
  misc_feature (554)..(554): n is a, c, g, or t
aaaggggtccccgcgcgccccgggtcggaggcagacccctgggtttgggggacatgggcatttggggcgcctgaacccaagacctctggatgagctgccccgttcagaccatggatcctgaggtgaccttgctgctgcagtgccctggcgggggcctgccccaggagcagatacaggccgagctgagccccgcccatgaccgtcgcccactgccaggtggggacgaggccatcactgccatctgggagacccggctaaaggcccaaccctggctcttcgacgcccccaagttccgcctgcactcagccaccctggcgcctattggctctcgggggccacagctgctcctgcgcctgggccttacttcctaccgagacttcctgggcaccaactggtccagctcagctgcctggctgcgacagcagggtgtccaccgactggggtgacacgcaggcctatctggcggacccactgggggtgggcgctgcactagccacagccgatgacttccttgtcttcctgcgccgctcccggcaggtggctgaggcccctgngctggtggacgtacctggtgggcaccctgagcctcaagccctgtgccctggtggcaacccccaacaccagggacctcgctgggcagctggtggtacatgaactcttttccagtgtccttcaggagatctgtgatgaggtgaacctgccgctgctcaccctgagccagcccctgctgtttggcatcgcccgaaatgagaccagtgctggccgagccagtgccgagttctatgtccagtgcagcctgacttctgagcaggtgaggaagcactacctgagtgggggacccgaggcccacgagtctacaggaatcttctttgtggagacacagaacgtgcggagattgcccgagacggagatgtgggctgaactctgcccctcggcaaaggcgccatcatcctctacaaccgggttcagggaagtcccactggagcggccctagggtccccagccctactcccgccgctctgaaaataataaacgactttattcttggaaa

SEQ ID NO: 262519 - DNA, 968 bp, Homo Sapiens
aaggaagcgaggcctgggtgggcggaaggggtccccgcgcgccccgggtcggaggcagacccctgggtttgggggacatgggcatttggggcgcctgaacccaagacctctggatgagctgccccgttcagaccatggatcctgaggtgaccttgctgctgcagtgccctggcgggggcctgccccaggagcagatacaggccgagctgagccccgcccatgaccgtcgcccactgccaggtggggacgaggccatcactgccatctgggagacccggctaaaggcccaaccctggctcttcgacgcccccaagttccgcctgcactcagccaccctggcgcctattggctctcgggggccacagctgctcctgcgcctgggccttacttcctaccgagacttcctgggcaccaactggtccagctcagctgcctggctgcgacagcagggtgccaccgactggggtgacacgcaggcctatctggcggacccactgggggtgggcgctgcactacccagagccgaggacttccttgtcttcctgcgccgctcccggcagggggctgaggcccctggcctggggaacctacctggttgggcacccctgagccccaggtgaacctgccgctgctcaccctgagccagcccctgctgttgggcatcccccgaatgagaccagtgctgcccgagccatgccgagttctatgtccagggcaacctgacttctgagcaggtgaggaaacactacctggagtggggaaccccaaggcccaccagtctacaggaatctttctttggggagacaccaaaagtggcggaaattgcccaaaaaacggaaatgggggcttaaacttctgccccctccggcaaaagggggccttcttcctcttaaaaacgggggttccgggaaagtccccccttggggggggccttagggggccccgagctcttattccccgctgttctg

SEQ ID NO: 262520 - DNA, 1146 bp, Homo Sapiens
  misc_feature (1001)..(1001): n is a, c, g, or t
ccacgcgtccggagaacgactgggttcgcctgcccagcaaatgcgaaggcttgcgccgggacgctgcggcggacgagagatctggtcccgtgtgtaaatatgttgctgtggagctgaagtcagcctttgaggaaaccggcaagaccaaggaggtgattggcacgggctactggcatcctggaccagaaggcctctggagtcaaatacaccaagtcggacttgcggttaatcgaagtcactgagaccatttgcaagaggctcctggattatagcctgcacaaggagaggaccggcagcaatcgatttgccaagggcatgtcagagacctttgagacattacacaacctggtacacaaaggggtcaaggtggtgatggacatcccctatgagctgtggaacgagacttctgcagaggtggctgacctcaagaagcagtgtgatgtgctggtggaagagtttgaggaggtgatcgaggactggtacaggaaccaccaggaggaagacctgactgaattcctctgcgccaaccacgtgctgaagggaaaagacaccagttgcctggcagagcagtggtccggcaagaagggagacacagctgccctgggagggaagaagtccaagaagaagagcagcagggccaaggcagcaggcggcaggagtagcagcagcaaacaaaggaaggagctgggtggccttgagggagaccccagccccgaggaggatgagggcatccagaaggcatcccctctcacacacagcccccctgatgagctctgagcccacccagcatcctctgtcctgagacccctgattttgaagctgaggagtcaggggcatggctctggcaggccgggatggccccgcagccttcagcccctccttgccttggctgtgccctcttctgccaaggaaagacacaagccccaggaagaactcagagcccgtcatgggtagcccacgccgtcctttcccctccccaagtgtttctctcctgaccccanggttcaggcaagggccttgtggtttccaggactgcaaggaactccagtggtgaactcaggaggggcaggtgtcagaactggggcaccagggactgggagccccccttccggagaacaaaactccaccatcccttcaagtcctcct

SEQ ID NO: 262521 - DNA, 1678 bp, Homo Sapiens
ggcctgggtggcgaattcggcacgagggtcccctggtctctggaccactgtgcagacagggcctttgccgaccctggtgagtggcggaaccatcttggcaacagtcccactggtcgtagatgcggagaagctgcctatcaaccggctcgcagctggcagcaaggccccggcctctgcccagagccgtggagagaagcgcacagcccacaacgccattgagaagcgctaccgctcctccatcaatgacaaaatcattgagctcaaggatctggtggtgggcactgaggcaaagctgaataaatctgctgtcttgcgcaaggccatcgactacattcgctttctgcaacacagcaaccagaaactcaagcaggagaacctaagtctgcgcactgctgtccacaaaagcaaatctctgaaggatctggtgtcggcctgtggcagtggagggaacacagacgtgctcatggagggcgtgaagactgaggtggaggacacactgaccccacccccctcggatgctggctcacctttccagagcagccccttgtcccttggcagcaggggcagtggcagcggtggcagtggcagtgactcggagcctgacagcccagtctttgaggacagcaaggcaaagccagagcagcggccgtctctgcacagccggggcatgctggaccgctcccgcctggccctgtgcacgctcgtcttcctctgcctgtcctgcaaccccttggcctccttgctgggggcccgggggcttcccagcccctcagataccaccagcgtctaccatagccctgggcgcaacgtgctgggcaccgagagcagagatggccctggctgggcccagtggctgctgcccccagtggtctggctgctcaatgggctgttggtgctcgtctccttggtgcttctctttgtctacggtgagccagtcacacggccccactcaggccccgccgtgtacttctggaggcatcgcaagcaggctgacctggacctggcccggggagactttgcccaggctgcccagcagctgtggctggccctgcgggcactgggccggcccctgcccacctcccacctggacctggcttgtagcctcctctggaacctcatccgtcacctgctgcagcgtctctgggtgggccgctggctggcaggccgggcagggggcctgcagcaggactgtgctctgcgagtggatgctagcgccagcgcccgagacgcagccctggtctaccataagctgcaccagctgcacaccatggggaagcacacaggcgggcacctcactgccaccaacctggcgctgagtgccctgaacctggcagagtgtgcagggggatgccctggtctgtggcgacgctggcccgagatctatgtgggcggctgcattgaaaagtgaaaaccagtctcccacggggccttgcatttttctgacaccctttcttcctgagccagtgcccgccaggccctgcctggaacaaaggggctcagggccgcccggccctgcaatgggttctgccacccccgggggcccccggtttccttctgaggaagggaaccggggcccatgctgataaccccgtggggagaccctgcgcccgcttcggccgggccaacacaagcgggacccccggggcacaggtaatttcacgtccgccaggaggggaca

SEQ ID NO: 262522 - DNA, 1009 bp, Homo Sapiens
cgggatctgagagctgccggggtgctcacggggaccccggaagcggagggccccccatggggctgaggagggaactgctgtgccccccaagcggccatatgggacccagcggacgcctagtaccgccagcgctaaaacacatgcccgtgtgctgagcatggatggggctgggggtgatgttctgaggcccccactggctggctgcaaggcagagctggaggcccaggttggggtggagcaggctgctagtgagcctgttgtgctgcctgctgaggcgcgaaggggacccgctgccaaccagcccggctggcggggggagctgcaggaggaaggtgctgtggggggagcggccgaggagactggcaggcgggaccgctcaagcagtgtgaggcggacccaggccattcggagacgccacaatgcaggcagcaaccccacccctccagcctctgtcatgggctcgccgcccagcctgcaggaagctcagcggggccgggctgcctcccactcccgggcgctgacgctgccctctgcgctgcatttcgcctcttcactgttgctcacccgggccggtgccaatgtgcatgaagcctgcaccctttgatgacacttctgagggtgctgtgcactatttctacgatgagagcggggtgcggcgttcctacacctttggcctggctggaggcggctacgagaaccctgtagggcagcaaggggagcagacagctaatggagcctgggaccgacactcgcattcctccagcttccactcggctgatgtccctgaggctacaggcggcctgaacctgctgcagccgaggcctgtggttctgcagggcatgcaggtgcgccgggtgcccctggagatcccggaggatcacctgctgaaggaagactccccgccccaggcccaggataatacccagatgggacatccccctccccgcgcccactctatgcactagtactggcttctcctgctggatcaacaatctgtgcgctatgagcg

SEQ ID NO: 262523 - DNA, 917 bp, Homo Sapiens
cgggatcgctgctgctgggcgcggggttgctgctgggcgcttacgtgcttgtctactacaacctggtgaaggccccgccgtgcggcggcatgggcaacctgcggggccgcacggccgtggtcacgggcgccaacagcggcatcggaaagatgacggcgctggagctggcgcgccggggagcgcgcgtggtgctggcctgccgcagccaggagcgcggggaggcggctgccttcgacctccgccaggagagtgggaacaatgaggtcatcttcatggccttggacttggccagtctggccgcggtgcgggcctttgccactgcctttctgagctctgagccacggttggacatcctcatccacaatgccggtatcagttcctgtggccggacccgtgaggcgtttaacctgctgcttcgggtgaaccatatcggtccctttctgctgacacatctgctgctgccttgcctgaaggatgtgcccctagccgcgtggtggtggtagcctcagctgcccactgtcggggacgtcttgacttcaaacgcctggaccgcccagtggtgggctggcggcaggagctgcgggcatatgctgacactaagctggctaatgtactgtttgcccgggagctcgccaaccagctggaggacactgacagcacctgcgtatgcagacccccgaggtctggggagcccggactggcccctgccccatgttcctggatggatttgccccgcttttgccctgtattgcgctggaattgcggtctttgagacaacatctagaccgcccagcaaccgaattcccctggcagtgtaaagactttcctggtatgagtttccaaatagtcgccagccggcgcctcggcataccacacacggatagctaaaaacacagcaaccgacgaaactatacaaa

SEQ ID NO: 262524 - DNA, 920 bp, Homo Sapiens
  misc_feature (449)..(506): n is a, c, g, or t
tggacccctccacctggaggccagcccatgtctcaggcccagccctagcctcttctcctcaaattctaagtgttttctctttaggtttccctggctttgtgaatggatcatgtgtctctaggtataaacctgacatcatctttccacccggcttacctccaccagatctccccagttctgtctccatcttctacctgcagctgctctgttctcatggtcactgctgcatcactgagtctggacccttgttatcattttcaaactggcctccttccctcgttccccacttcttaaagtcacctgtccattgccaccagattaagctttctccagccagatcacctctctctgagaaacctccattgacatggaaacaccattgtctggcacacatactcacatactcaccttcccgtcttgatccccacacatctttccagcctcccctnnnnnnnnnnnnnnnnnnnnnnnnnnnnnnnnnnnnnnnnnnnnnnnnnnnnnnnnnntgaatcagcccagcggggcttctcctgcctccatcacatcacagaagtacctcctgcttctggttttaattagagccttccccgattacattttcctctgaattttttcctatctacatttgatctgtcatgtttaaaccccctacttctaagggaacttctctaatctcttatcctcatccccaaatagtgttttcttcctctgggttcttataatgttggtatcaatctcacagcatttagtgcttcctgcctggtgtgacagttacctgtgtgcatgtgcaatttctaatttcccacgctagactgtgagcttcctaaggcaagaatcatgccttgttggtttctgtattcctcatggtgccaaacacagtgccttctacattgcaggcgctgaataaacatttttaaagc

SEQ ID NO: 262525 - DNA, 914 bp, Homo Sapiens
  misc_feature (677)..(760): n is a, c, g, or t
aggctggaccggtccggattcccgggaaaaggacaacagagacacacggcattgttcatgggaggcatcgtcaccctcctgggtgttctgtgggaatttcctgtgtgaggaaaacgtggccacagggttgtgctgtacccacccttccccggcgagatggccctcggcctgtgccgctgcttccaccctcgccactccatggcagcttttggtctgtttccggctctgccctctgccctgaactctcatccggcttgtacctgcctgctggacccctccacctggaggccagccctagcctcttctcctcaaattctaagtgttttctctttaggtttccctggctttgtgaatggatcatgtgtctctaggtataaacctgacatcatctttccacccggcttacctccaccagatctccccagttctgtctccatcttctacctgcagctgctctgttctcatggtcactgctgcatcactgagtctggacccttgttatcattttcaaactggcctccttccctcgttccccacttcttaaagtcacctgtccattgccaccagattaagctttctccagccagatcacctctctctgaggaaacctccattgacatgggaaacaccattgtctgggcacacatactcacatacttcaccttcccgtcttgatnnnnnnnnnnnnnnnnnnnnnnnnnnnnnnnnnnnnnnnnnnnnnnnnnnnnnnnnnnnnnnnnnnnnnnnnnnnnnnnnnnnntgaatccagcccagcgggggcttctcctgcctccatcacatcacagaagtaccctcctggcttctggttttaaattaaagccttcccccgattacatttttccctctgaaattttttcccaatctacatttgaatcctgtcatgttttaaaccc

SEQ ID NO: 262526 - DNA, 862 bp, Homo Sapiens; identical to SEQ ID NO: 102260

SEQ ID NO: 262527 - DNA, 1139 bp, Homo Sapiens
  misc_feature (145)..(186): n is a, c, g, or t
  misc_feature (948)..(948): n is a, c, g, or t
  misc_feature (1112)..(1112): n is a, c, g, or t
ttctctgaatttgtgtagcgcacaacgaatggtgatgctgtgctccgggggctgcagtgcaccctttttaaagggaccctgcaatctcattgtttaatttgactctttagtgcttcagtcacatcagcacttgcagaggggttgnnnnnnnnnnnnnnnnnnnnnnnnnnnnnnnnnnnnnnnnnngtccttctccccacccccatccctcaattcaggcagtttggggtgggaaaaacttgagcactggttccgacagagctcatctcatataagaaggtttggaagagctgcagtgatcgacagcatcgaccgttctgtaactccttaaatttaagagctgcagggcttcctgaagaatgagaaggacaatgccctgctgtctgccatcgaagagtcccggaagaggaccttcggcatggctgaggagtaccatcgggagtcaatgttggttgagtgggagcaagtgaaacagcgaattctgcacacactgctggcatcaggagaagacgcccttgactttactcaagaaagcgagccaagctacatcagtgatgtgggaccccctggtcgaagctctctggataacatcgagatggcctatgcgcggcaaatttatatctataatgagaaaattgtaaatggacacctgcagcctaacctggtggacctttgtgcttccgtcgcagagctggatgataagagcatttccgacatgtggaccatggtaaaacaaatgacagacgtgttgttgacaccggcaacggatgccctgaagaaacgcagcagcgtggaagtgcgcatggaagtttgtcaagcaggccttggcgtaccttgagcagagttataagaattacacccttgtgactgtctttggaaatttgcatcaggcccagctgggcggggtgcctgggacttacaattggttcgaagtttcctgaacattanactgccagctcccttgcctggactacaggatggagaggtggaaggccatcctgtgtgggcgctaatttactactgcatgcgctgtggagacctgctttgcgcttcacaggtagttaatcgagccccgcaccagctggggagagttttaaaacctggttccaggnagtacatgaaccaggccagggacagaa

SEQ ID NO: 262528 - DNA, 1002 bp, Homo Sapiens
  misc_feature (879)..(879): n is a, c, g, or t
  misc_feature (907)..(907): n is a, c, g, or t
  misc_feature (970)..(970): n is a, c, g, or t
  misc_feature (978)..(978): n is a, c, g, or t
ggatggacaaatcacttgggcttctcacagcctcaatctcctcatccttaaagtgcagattcatgcagtcagcagatatttgctagtgtctgccatggactcggccggcactgtcacgggctctgagggcacagcagggaccagaacacccgcatgcagtccctgacctgggagctcagaaagccacaccctgacggctcagcctctgcccctccttctgtctccccaggtgctcccgccacctcggcccctgttaaccctttccaggtgaaccagccccagccgctgacactgaaccagcttcgggggagcccagtcctggggaccagcacatcctttgggcctggcccaggagtggagtccatggctgtggcctcgatgacctccgcggccccacagccagctctgggggccactggttcctctctgacaccactgggccctgcaatgatgaacatggtgggcagtgtgggtatacccccatcagcagcccaggccactggcacaaccaaccctttccttctctagtgcctgggcatgggacccacccagagcacctgtgctggaggatgccgagcagggactctcgtctgtgggacgggatccaagagtttggggattaggggtattagggcttttcagctccagcttcctgatgaaagggctgtctttacagccccaaccctcagaccctcgccttccaaggcaggcccctcagcctggcctgctctcaccacctcctccaaagcactgaggtcctgggcagggctcctctgaggccttggacgaggacgtggagtcatcagtgttgcccttgcccctaacctcagcccgagggtctccaaggatgttgcctggggccagggactttggacaatngcctttgtctttttttcttcccaacccnccaagccctaaggggacaacccaagggaattcttgggtttttggaaaacgattgaaagaaccngtttcatnaaagacaacttttttggggaaatt

SEQ ID NO: 262529 - DNA, 1545 bp, Homo Sapiens
  misc_feature (237)..(237): n is a, c, g, or t
  misc_feature (366)..(366): n is a, c, g, or t
cgcggggttagtgggtggggacaaaatatgagtaggggcgtggcaagtcgctctgggtggccctacgaaggatttcgctatcaagactagagcatctgtcgcagccgatggagttacatcgatggaagagaaagcggggagagaaggggcgtcgattaagggtccacgtggtcgacgtcgagcggcatggtgcacgtggactcagttgtgccggtgctgagccatctcgagaagtantcatatttttcagatttttctgcggaataatttatcggtcgatgttgacgggcggtgcgtatgaatcgtaggatttccgttggtgtgctagcggtcgacggctcaacacctcgggagacggcggcggcngtcaaaccgagctcctaatagagagagatatatttgtataacggcgagctcttttgctcagggggggcactagagctgtggtatacggattgggtggtggcaaggtggttcggcggtgtttagggcgccccttgggtgtctatttcaacactttccttccccctcttggtgtaatggagaagctaagataggggggggccaaacgtggagagcgggattcaggctagggctggggggggttcccgagcacggggggtgtgaggtcgcgcggagccaagggtcccagctcgcttcgccggtgtgcacgcgtggggtggttccgcagggggagaacttccttggctcacctggacacaaagctgcagggatcaatccggctgcgaaggggcgagggcggagctcggctgatgagtcccaggggtggtgaacgtggggtgcctggggcgccaggagcagagcgtgatgtccccggtgggggtgagacagtgcctccgcggggctcctccctcacgtccggggctcttgactgaccgctggcccacagggatacccaggtccagcaacaggggtgcaggagtgggcggggagtcgggcgtcttgagcgagaagcagatgagcggggaagggggcggctcggtcgggcagggcgcgggcgttggcgtggggggtgttgtcggggactccccgcgctcgcgtcctgggcctcccggcggctgcaggtcgcggccaaggcccagcgaggcgagcagggcggtgccgcgcagcagcgcccgctggatcagattgggcgtcccagagctgctaccgcgctctgcggggacaggcctcttgggctcctcgggctccaggctaggccgcggggggttaccattgagtgctgggggtgtggaaggagatcctaagggggatgagtcatctgaatccaggtaccatgtggcttcgtccatgcgggaccttctcctcccattctgggcttccccaggcttgggggaactgggaccccaagcccagcatgctcgccgctctccattgcttgagtcctccagacgtcggggggactggcggccccatgcctggcctggctctgcaggctccaaccctcgtgccgaattcgccaccacaggctgggttttcgagagcgggggacgagggcaggggggcggggaacaaaaaaacggg

SEQ ID NO: 262530 - DNA, 1554 bp, Homo Sapiens
gggggggcccttagagggaaaagggcggggcgaacccttcccccaaagggggccccggccctgggcccccaggggggccatcgaaatcccctttttttgggacccgggggccccgggccgggccgggcccttggccatggaaaggctttccccgttgggggtgccaagggcggcaggcaggccggaccaggccaaggccttcccaggcgggggcccacgtagggggtaggaaaaaacccattcagggttgaaagcgggggcaggccaccccagggtgcccaaagcctcaacccgccgcaaagggctggttccaccccccccagtcgagcagcaactgcaggtcagctgggtccagccggcactcggccagcacattcccgctcctgggctgctgttataagtcgaccgcctactgccagcactgacagcgccaggccaggcgctgtgcaacgtcggaggagcgcacctagtgcgtctcgcagcgggcgggcaaggggcacacagcgcacggcacccaggagcagggctcctgggtcctgctccatactgtccagaagtcggtccagtgtgcgctctgaaccagccagcaggcggcggaggtcatagttctgcttgtgtgcgaagatgcgggcgacacttgcacgtgtaagtgtgctcacgatctgtgcgtgcacagctagcagctccccccgcagctgggctgctgactgagaagtccgtgacatggccacgagcaacagtgggccctgttgtaggaacaccagcttgtggtcctcagcgtagatggcacggatggcatctcccgcactctgcacaaaggacaccagggcggtcattacacccatggtagccgacagcgcctccacactaccataccgcgagtagatgggcttgccagcctcactcagcacaaacacatgcttccgctggctgcgccactcctcatcactggggtccccgccctggcctccagagctactctcagggctacatgtgggactattctcaggggctgcaggactccagagccgagaggtgcttgacagggcctctgactgggccggtggtgatgggctgggtggctggtccttgtccattggatcctgtttcctccaggcccatcagtcattcgggatccggcagggaccgcagtgaacccctccaccttctctagcttcctcactggggaactgcgtgtcctccaagtcctccgcgcccccgggggccggggcagcagtgtctcctccgacctccatctgcacatccctgttttaactccagaatctcaattggccggataccattacttccccgtagcggcaggtggcatcacacttcacgggtagcggcccgggaggtgccacacttccgggtacgacccctcccagaagacacttccggttgcggagctttattggctcctcgcggcgtccctctcccgccgcctacgggtgtcccctcatagttgagatggcgcgggccacttcaggatctacgtcaggtctgttcgggagcgcaatgagacctctctgcactcctttcaacggatctggc

SEQ ID NO: 262531 - DNA, 852 bp, Homo Sapiens
tggggggggggtaaaaactttgagagggagggttggttattttaaaatcccgggccttaaagttttaggccattggaattaaagggtttcctggcagtatttcccttaatggcattgtattcaagaataaagtattcaagattatggagaccaagggaacatgcctttacttaattggtccagggggttaccatttagatagagtttttgtaatctcgttaggttcataaacgatcctttttcaagaacttcaatacgattgtttcccaagtgaagcatttccaaagtgaaatattccactagatcagacttcattaaactgtgaataatatttcccgctagaatgagctttctaggattttgcggaggaggtctcagatctgataagctttcaatgttgcgctcctgacaatgtattagaagtcctgatggggataggactttgcagttacaaggaatagggcagtaaggtcctggaagttgagtggatggctttgtaatataaggtatcaaacctggtgctttggtgggtagttttagaatggacgtggtcttagttgacatgcgactatcatttattgaagatgttgctgccagatgtaatgatcctgaaggatcctcatgttcttcatacactggtggagtagggcaaatagattccttctttagtctactgagtatacttcctttaaaaaatggagggctgttgcagacaacatcaccaattatagactgtggaggcatgttctccaaccaagtttttaactgcaataagtcacaattgcaggcccatttgttgtcctccaactgaagatccaatattcggccaatgtgttcgagaaaaccaacacc

SEQ ID NO: 262532 - DNA, 1548 bp, Homo Sapiens
  misc_feature (14)..(14): n is a, c, g, or t
  misc_feature (887)..(922): n is a, c, g, or t
  misc_feature (941)..(998): n is a, c, g, or t
  misc_feature (1002)..(1004): n is a, c, g, or t
  misc_feature (1020)..(1021): n is a, c, g, or t
  misc_feature (1024)..(1024): n is a, c, g, or t
  misc_feature (1028)..(1029): n is a, c, g, or t
  misc_feature (1041)..(1041): n is a, c, g, or t
  misc_feature (1045)..(1046): n is a, c, g, or t
  misc_feature (1054)..(1055): n is a, c, g, or t
  misc_feature (1059)..(1059): n is a, c, g, or t
  misc_feature (1068)..(1068): n is a, c, g, or t
  misc_feature (1075)..(1075): n is a, c, g, or t
  misc_feature (1079)..(1079): n is a, c, g, or t
  misc_feature (1084)..(1084): n is a, c, g, or t
  misc_feature (1086)..(1086): n is a, c, g, or t
  misc_feature (1094)..(1094): n is a, c, g, or t
  misc_feature (1104)..(1104): n is a, c, g, or t
  misc_feature (1116)..(1116): n is a, c, g, or t
  misc_feature (1118)..(1118): n is a, c, g, or t
  misc_feature (1124)..(1124): n is a, c, g, or t
  misc_feature (1135)..(1135): n is a, c, g, or t
  misc_feature (1137)..(1137): n is a, c, g, or t
  misc_feature (1139)..(1151): n is a, c, g, or t
  misc_feature (1154)..(1155): n is a, c, g, or t
  misc_feature (1170)..(1170): n is a, c, g, or t
  misc_feature (1175)..(1175): n is a, c, g, or t
  misc_feature (1177)..(1177): n is a, c, g, or t
  misc_feature (1218)..(1218): n is a, c, g, or t
  misc_feature (1221)..(1221): n is a, c, g, or t
  misc_feature (1239)..(1239): n is a, c, g, or t
  misc_feature (1269)..(1269): n is a, c, g, or t
  misc_feature (1276)..(1276): n is a, c, g, or t
  misc_feature (1278)..(1278): n is a, c, g, or t
  misc_feature (1289)..(1289): n is a, c, g, or t
  misc_feature (1308)..(1308): n is a, c, g, or t
  misc_feature (1350)..(1351): n is a, c, g, or t
  misc_feature (1383)..(1383): n is a, c, g, or t
  misc_feature (1393)..(1393): n is a, c, g, or t
  misc_feature (1408)..(1408): n is a, c, g, or t
  misc_feature (1437)..(1438): n is a, c, g, or t
  misc_feature (1456)..(1456): n is a, c, g, or t
  misc_feature (1465)..(1465): n is a, c, g, or t
  misc_feature (1471)..(1471): n is a, c, g, or t
  misc_feature (1498)..(1498): n is a, c, g, or t
  misc_feature (1502)..(1503): n is a, c, g, or t
  misc_feature (1506)..(1506): n is a, c, g, or t
  misc_feature (1532)..(1532): n is a, c, g, or t
cactggatgtttgnccaggaagagcctattggaaaatggtagaagtccagatgtccaaaaagccccagacctattccctcaaaacccactgtcctgaatggtaaaatccacccctcctgagcccctctgattccccccaagagggttgggccttattccacatatccccaagtcatcctcagaaattgatggtaacaggatgaccttgagcccaagaaggagcacaagattccttccctcttcagcagaagatcttggtttgctctttgatgctcttgatcaggcagttgaaaatcaaagaggtcactctggggaagttatatgaagcctacagtaaagtctgtcgcaaacagcaggtggcggctgtggaccagtcagagtgtttgtcactttcagggctcttggaagccaggggcattttaggattaaagagaaacaaggaaacccgtttgacaaaggtgtttttcaagattgaagagaaagaaatagaacatgctctgaaagataaagctttaattggaaatatcttagctactggattgccttaaattcttctcttacaccccacccgaaagtattcagctggcatttagagagctacagtcttcattttagtgctttacacattcgggcctgaaaacaaatatgaccttttttacttgaagccaatgaaattttaatctatagattctttaatattagcacagaataatatctttgggtcttactatttttacccataaaagtgaccaggtagaccctttttaattacattcactacttctaccacttgtgtatctctagccaatgtgcttgcaagtgtacagatctgtgtagaggaatgtgtgtatatttacctcttcgtttgctcaaacatgagtgggtannnnnnnnnnnnnnnnnnnnnnnnnnnnnnnnnnnnaggcgcgtctcacctgttnnnnnnnnnnnnnnnnnnnnnnnnnnnnnnnnnnnnnnnnnnnnnnnnnnnnnnnnnnttgnnntggttctcttgcctcnnctnctcnngaggccgaggcngggnnttccttgnnctcntgaggtggnggttgcngtgngccgngnttgtgccnctggcctccngcctgggtgtcngngtgggnctctgtttccntngnnnnnnnnnnnnntcnnttgtggtgtctcggnttgcntncgccggtttgcggcttttgggccttttctgctggtttttgnttncccttttctggccgttgnttccttggggttttttttgggcggggtggncgccttncncctttcccgcngtgctgtcccttccttgtntgggggtccttccccgcttctcgctcgtggtgtctccctggnntttcgcccccgcggtctggcccgggcgccccntcttttggcngcggtgcggggcggngctccccccccgcgctccccgtgtttgcnngcccgccctcgcccgccngttccctcncctccntcggttggccctttctccctgctccgntggnnccnctgccccgccccccgtcttcccgggngggcgcccgcgggtgc

SEQ ID NO: 262533 - DNA, 906 bp, Homo Sapiens
  misc_feature (45)..(45): n is a, c, g, or t
  misc_feature (61)..(61): n is a, c, g, or t
  misc_feature (156)..(156): n is a, c, g, or t
ccggggggcatcgtgggcccagggtgaccctggcccccacggatnccccaatccagggctncagcccggggaccagggcttgagccagccactcccctgggatgggaggacggcacaggactgagaagcccccttcttcaacggattccaccaccnttagctgtcgctggacacgaggctgatgatctgttccagtttctgccgcaacttatgcttccgacaagaggcatctcggtccagagccgtgagaatctcctggcggtacttggtgacatagaaatacagctcgttgagcgcactcaggacgctgaagtcgctggcgtggaggcgggactgctccaccaggtaggcatccatgtcctggtcgctgatggatgccatctttgcaatgtctcgataatacctctccacccagctcttgtagttggggatgtccttggcgtagagcagtttgttggagggcgagtccttccccaggcggtgctcggatgtagagcaggagtccatgaaggtctgggctaccaccgacaggcaggcatccgtgaagctgttcttgtggaatgtcgaaacacgaaactgcgggttcttgatcacattcacccaaaaacgcagcggcaaggcagttgctcttcccaggtgtggcgcacatcggggtcgctgaatctggcgctggtcccgcctgctcatcccaggaagtcgaacatgtacttgatggccaggggcaaggccgaaccccggtgggctgtgctgaacactgtctcaaagaggtcatccacgaacttctgcagtgtgcccttggtggccagcagccgtgtcaggtagatctcggagaccatcttgctgccacggtccccctcgcgatggtcggcatggtcgtggtttttcacccaggtgccacaatttggt

SEQ ID NO: 262534 - DNA, 1115 bp, Homo Sapiens
cggttcagccccccttgagggcagctcagtgatctctgaccccatcatccacgtgtcctccggggtggtctgtgtgaaaggaagctcggaggaggtggctcagcatcgctgcctggatccgctgcctctcagccacggagtgtttgtggacgagcgcccacacgagacaggaggaggccacggaggcctgggctctgggaggctcacgaggcagccacggcccaggtcagtttggagttggtgctccctcgccctcggccaccccaggccccagcaggtctttcgtccagcccccagtgggtgctggtcccccttgcccgacggtgctgccctggtcatccttgttctgccacttctgcccaccgggtctccttgtacctcaatgtgatgtcccgcaggaagaagcgccagacggtccaggtgagcgccaggacggagccgagggtccagcactgggagatgtagaagggcagggacagggtgagcgtgtgggggtcgtacttcaccacgatgagcagctccgtggccgtgatggccgccaccagccaggcctgcgggcccagcttcttgtggggcttcgggtcatccatgaagtcatagatctcacgcatggccacgccacccacgttcacgaagaagacgagccgcaggaggaccaggtagtgctccgggggcatccacagcacaaacttcaggtagaacgtgttcagttctgccaacaggaacaccaggatgatgccgcacacggccagccagcgacgcaggctggaggccggcttccactcgaagcgaacccagctgtacggcgtgaactggaaggcgatcctcttcatcttgcccttgtaggtcggaatgttccagaggccctgccacttgtacgtcttcagggacagccactcaagggtcttcatgccgcagtagatgcccagcccgttgcagacgagcacgtccatgatccagtgatcccaccagcactcgctgaagttgggcagctggtgctccaggctgtactccaggaactcgaacatcacgctgatgatcatgcacatccaccagtctcggatcatcagggtcttcaggtaccagccaagaaagtgcgcgggaacaaagccatc

SEQ ID NO: 262535 - DNA, 1265 bp, Homo Sapiens
aggtagcgaggcctgggtggcgaattcggcacgagggccttcctcctggtccacctccaggagctcctccattcctgagaccacctggaatgccaggactccgagggcccttaccccgacttttacctccaggaccaccaccaggccgaccccctggccctcccccaggtccacctccaggtctgcctcctggtccccctcctcgtggacccccaccaaggctacctccccctgcacctccaggtattcctccacctcgtcctggcatgatgcgcccacctttggtgcctccccttggacctgccccccctgggctgttcccaccagctcccttgccaaaccctggggttttaagtgccccacccaacttgattcagcgacccaaggcggatgatacaagtgcagccaccattgagaagaaagccacagcaaccatcagtgccaagccacagatcactaatcccaaggcagagattactcgatttgtgcccactgcactgagagtacgtcgggagaataaaggggctactgctgctccccaaagaaagtcagaggatgattctgctgtgcctcttgccaaagcagcacccaaatctggtccttctgttcctgtctcagtacaaactaaggatgatgtctatgaggctttcatgaaagagatggaagggctactgtgacagcttttgatgccagaaaaggcttctgttcacaacagtggcccatggaagaaagaggctcttattaaacttagatgaaagagctgcttccattgtcagggtattttctaatttcagttcaaggaatatcctaaaatttagccttgttcagaatttactgcacataaaaaagggtatttcatccagaatagatcagttattgaagcagtgctgctaacatccattccctttcataccaccattttcaccctgtttcttcccctcctccagttctttggaaatttgtgatcgggggatcttagttgcttatttgttttgactcttgtgtgctgtgggcactggagtagagatttctggagaaacaaaaaacagtttatttcatctcgccttttgtgtttgagttacctttaatactctcctgcaaatattttgtaatattttacttgtaatgaaatggatcacaatgtcatttcctaatacaaggcaggatatgtgggaagaatatgtacaattatttgattaaaattatttcccactgacctaaactttcagtgatttgtgggaaaaataaataaatgttctacacca

SEQ ID NO: 262536 - DNA, 1001 bp, Homo Sapiens
  misc_feature (130)..(217): n is a, c, g, or t
ggcctgggtggcgaattcggcacgaggcgcgttctgctccgcgcgggtgcgaaacccggggtgggcagggatcgggccggggccggggccaggaccgggaactaacgggctcccccacgctgccttcgcnnnnnnnnnnnnnnnnnnnnnnnnnnnnnnnnnnnnnnnnnnnnnnnnnnnnnnnnnnnnnnnnnnnnnnnnnnnnnnnnnnnnnnnngtgctggtggagccggacgcgggcgcaggggtcgctgtgatgaaattcaagaaccccccagtgaacagcctgagcctggagtttctgacggagctggtcatcagcctggagaagctggagaatgacaagagcttccgcggtgtcattctgacctcggaccgcccgggtgtcttctcggccggcctggacctgacggagatgtgtgggaggagccccgcccactacgctgggtactggaaggccgttcaggagctgtggctgcggttgtaccagtccaacctggtgctggtctccgccatcaacggagcctgccccgctggaggctgcctggtggccctgacctgtgactaccgcatcctggcggacaaccccaggtactgcataggactcaatgagacccagctgggcatcatcgcccctttctggttgaaagacaccctggagaacaccatcgggcaccgggcggcggagcgtgccctgcagctggggctgctcttcccgccggcggaagcccctgcaggggggcataatgcgaccagctggcccccggaggaagccggcgcaaagccctgcgcccgtccgcaaaacctcacgggccgggccactccaaccgccggctccgccgggtgatcaaacggcccttcatgtggaacagggcacccgctcacaccaccggtgcttctcgcccccgcattgcagtggcaccctaactactaaaccttctccgcccgatgggcgcgtgcgtacggattgcctatttctccgctggcgtcttcctgctgtc

SEQ ID NO: 262537 - DNA, 1124 bp, Homo Sapiens
  misc_feature (294)..(310): n is a, c, g, or t
agggttctgaaaggttgtcccagggtgttgcttttgggaaatttgggccacccataaaaagtgggaacccacttccccttggattggcaccctttgttggttttcgggaaaaggtttggaaaaattttttgtttagtgggcgtgagttgtgccccaaaaatctggggaaaaaaggcccggaattttttagaaaatttaaggggaagtcttgttttccccaagaaggccccaaaaaatggcccaggcctctgggagtttaggggtgttgcttgtgtccccacaaatccacccaannnnnnnnnnnnnnnnncttaactttggtccttgggaccccgctcggtttccccccaaaaaaatgtaaagggttgggttgcccaggggtttggggaaatccccggtgggggaaaattaattgcttgtggaaaggattgattataggatcccaaaagcctgggggggattggggctggctgggcaccttgacctttgtcccaaatgttggggtctggttagcaccaaatgctggactggcagatggtgctgagggtccagttccaaatacaaaggaggatcctgcagagttagatgtggttgtggctccaaagccgaaaccagaggtggtagtattattactgctggctcctggaccaaagacaaatggggtgacagctgtacctgtgctggatgtggttgctagtttgctatcttgagaaaatagcaaagactgagaggtgctggattcagcagtgttaccaaaggcagagctgctcacaggattgctggaactgtcccaaacacaaaggtaagccacaggtggattggaggaagaggtggaactaccaaatatgcccaccaccagcagaagtggctggtgtacttgaactagaggaactgttgttcaagaaactaaaaactggctctgctgcaccttgatcagctgtagtactagtttgagctccaaaggcaaaagtggcttttgctggctgttcagattccttctcagatggttttgtcatactaaaactaaatgtggactgtgaagaattctcatctttggtttgctctgaattcccaaaggaaaacactggttgacactttggctcttcattgtcagctttcttccc

SEQ ID NO: 262538 - DNA, 824 bp, Homo Sapiens
  misc_feature (637)..(637): n is a, c, g, or t
  misc_feature (774)..(774): n is a, c, g, or t
gcggctgcctcctgctgtgcaggtccccgaccctctctctgtcctcattgcgcccagacgggccggcccagagctcccgggtcgtctttcgtgtggccgcgagggttcttgaagcttttgagattaacaatggcaggaaaatcatcactttttaaagtaattctccttggagatggtggagttgggaagagttcacttatgaacagatatgtaactaataagtttgatacccagctcttccatacaataggtgtggaatttttaaataaagatttggaagtggatggacattttgttaccatgcagatttgggacacggcaggtcagggagcgattccgaagcctgaggacaccattttacagaggttctgactgctgcctgcttacttttagtgtcgatgattcacaaagcttccagaacttaagtaactggaagaaagaattcatatattatgcagatgtgaaagagcctgagagctttccttttgtgattctgggtaacaagattgacataagcgaacggcaggtgtctacagaagaagcccaagcttggtgcagggacaacggcgactatccttattttgaaacaagtgcaaaagatgccacaaatgtggcaccagccttttgaggaagcggntcgaagagttcttgctaccgaggataggtcagatcatttgattcagacagacacagtcaatcttcaccgaaagcccaagcctagctcatcttggctggtgattggttaagatttttgatgcatttctaaccaactcnccccctataccccaaaatcaaacatgggggaatgggaggaaaaagaaata

SEQ ID NO: 262539 - DNA, 1074 bp, Homo Sapiens
ttcggggccacccttccttgggaatcccacgtacaagccccaggtttcttccaggaggctcatcatcccagttctctcccagtcaggtctgctggctccaacaggtaagagacagcaaaacaggcccattgatgtgagcccttggcttcacccattccccaaacaaaatgggctctgttgccagggtgactgtgatgatcacatctgcacctgccacagcctcctggaccgaagaacagacccgtacctctccttgcactgtgtctgcaaacttctctgcattttctttggtgcggttccatatcctcacctccttaaaggagaactgctctgtgaaagatctcataatggctgtaggcctggaccccagccccaaggatgcacagcacttcactgctgggaggtttcagaaaacttggtggcaaatggcagaaactgcagctgttctctttgcagttatgacatttccatccatgaccgccagcagggtgccattgctgggctcaaagagtagcacagtagcctggtgggaagggacgaccgaggtgatgccgcggtcctcgtagaaggtgaccaacttggtggtcagtgcatcctctgcagcactgtaggcgggcatgacccccaggtagcccctgtgcttggtcaccggcaccacggtgcgcacgggctgcatgacccctccttcgggaccgctggagaagttggccagggccgtctctagaggcgggatgaggaggctggagctgcggaggtgttcctccacctcggccgcgctcaggaacgctggtacccggctcatctcgccacctgtgccttctaacctcagtctccgcaccgcgatccacgtaccctcggctgtgccctttatgagcgcgcccgctgctctgtggagccgcctgctggtcacagcccagcctccgggggcggagcaaccccgccccgccccgccagccctctcctcccccttcgcccacctcgacccctaagggtgggcgagatgggtcccttccagcaacggattccccaagatggacatcgcggtggcgtgctgggagtcaatatgttggtcca

SEQ ID NO: 262540 - DNA, 1641 bp, Homo Sapiens
  misc_feature (1569)..(1569): n is a, c, g, or t
  misc_feature (1613)..(1613): n is a, c, g, or t
  misc_feature (1621)..(1621): n is a, c, g, or t
cgggttgcggccggaagccgggcgccgcggctctgcttccctcggggatctggcgacatggccagaaaggctctcaagcttgcttcgtggaccagcatggctcttgctgcctctggcatctacttctacagtaacaagtacttggaccctaatgactttggcgctgtcagggtgggcagagcagttgctacgacggctgtcatcagttacgactacctcacttccctgaagagtgtcccttatggctcagaggagtacttgcagctgagatctaaggtgcaccttcgctctgccaggcgtctctgtgagctctgctgtgccaaccggggcaccttcatcaaggtgggccagcacctgggggctctggactacctgttgccagaggagtacaccagcacgctgaaggtactgcacagccaggctccacagagcagcatgcaagagatccgccaggtcatccgagaagatctgggcaaggagatccatgatttgttccagagcttcgatgacacccctctggggacggcctccctggcccaggtccacaaggcagtgctgcatgatgggcggacggtggccgtgaaggtccagcacccaaaggtgcgggctcagagctcgaaggacattctcctgatggaggtgctcgttctggctgtgaagcagctgttcccagagtttgagtttatgtgggcttgtggatgaagccaagaagaacctgcctttggagctggatttcctcaatgaagggaggaaatgctgaagaaggtgtccccagatgctcaggcattttggacttccttgaaagtcccccgaaatccactgggacctgtccacggagcgggtcctcctgatggagtttgtggatggcgggcaggtcaatgacagagactacatggagaggaacaagatcgacgtcaatgagatctcacgccacctgggcaagatgtatagtgagatgatcttcgtcaatggcttcgtgcactgcgatccccaccccggcaatgtactggtgcggaagcaccccggcacgggaaaggcggagattgtcctgttggaccatgggctttaccagatgctcacggaagaattccgcctgaattactgccacctctggcagtctctgatctggactgacatgaagagagtgaaggagtacagccagcgactgggagccggggatctctaccccttgtttgcctgcatgctgacggcgcgatcgtgggactcggtcaacagaggcatcagcaaagctcccgtcactgccactgaggacttagagattcgcaacaacgcggccaactacctcccccagatcagccatctcctcaaccacgtgccgcgccagatgctgctcatcttgaagaccaacgacctgctgcgtggcattgaggccgccctgggcacccgcgccagccagctccctttctcaacatgtcacgttgctgcatcagagcgctagtggaggcacaagaagaagaatacctgtttcattctttcagaagggacccagatctcttttcaggcgagggcctttcaacttatggggcagatccaaccttccatggaggnttcattcctggcgttgttggaaggggggttttgaaggttggggnttgaaccnggttttttggggcccttaat

SEQ ID NO: 262541 - DNA, 1065 bp, Homo Sapiens
  misc_feature (604)..(666): n is a, c, g, or t
gcctttaatgggcccagaaggttcatagcattaactgacttcatgcaaacagggagctctccccttctttcctagtgggtttgctccttttcttccaggatgagtacagtgtccacagttattcttatgtcctccagcgactggctcccttccactgccagaggcgttctgggaaaggaagtagaaaggctgtatagagatatgtggtacccaattctcgtcatccagtcaaataagacctgtgagctgtaggacttcaaaaaccttctcctcaggacatttcccactgggacatcggagagcaacagtaactacttcttctgctgtttgagaaggttcttcaggtaaatcaggaatctccttgcatgtgggctgttcagcaggagacggaaattcagttaaaggtttaggcaagttctggctctttgctgcttctctgtttgatgtttcaaaagatgtctgacttgtaccttcatcacccccaagtttgtgaccactgcttaatttccaggcttcacccgtcatttgataaaagcgctcctccagttttctcaatttcatttcctggtgaggttttaaaacattctctatgtatctgctggcnnnnnnnnnnnnnnnnnnnnnnnnnnnnnnnnnnnnnnnnnnnnnnnnnnnnnnnnnnnnnnnttcttcttccttcagataaacttggggagatttaaatgagttaagccatgaggtagtcacagaaataattaaagtaagaagagcaagcagtagcaaaatccggccacaaagcaaaagaaaatccttgattcctggagggaaaaggttcctcgaagtgaagtcagctccggaagtgggggggcaggggcgatgcagtctgggagttgtagtcaaagctgctccgaagccacgcagccgaagaggcggtcgttctatgcaacattcctgtgaaaattacccagctgtgactgtcgaagggaaaaagtcacacttacctatatccgggatcccacgccggagctccagacacataagggggacagcagagaggaagaaaatgccaacaaccccacgtgaagc

SEQ ID NO: 262542 - DNA, 1129 bp, Homo Sapiens
  misc_feature (487)..(559): n is a, c, g, or t
tgaagactgacaagcagcgggagaactacctgggcaactcgctgatggcgccggtaggccgctggcagaagggccgcgacctcacctggtacgccaagggccgggcgccatgcgcgggcccgagccgcgaggaggaactggcagccgtgcgggaggcggagcgcgaggcgctgctggccgcccttggctacaagaacgtgaagaagcagcccacgggcctgagcaaggaggacttcgcggaggtctgcaagcgggaaggaggcgaccccgaggagaagggcgtggaccggctgctggggctggggagcgcaagtggctccgtgggccgcgtggcgatgtcccgagaggacaaggaggccgccaaactggggctgtctgtgttcacgcatcaccgcgtagagagcggcgggcccgggacctcggcagcctcggccaggaggaagccgcgggcggaggatcagacggaaagcagttgtgagagccacannnnnnnnnnnnnnnnnnnnnnnnnnnnnnnnnnnnnnnnnnnnnnnnnnnnnnnnnnnnnnnnnnnnnnnnngcacaggcggccagctgaggccacctcctctcccacatctcctgagaggcccaggcaccaccaccatgactccgactccaactcccccctgctgtaagaggaggaagcgggggacacagtggggacaggagggagcccgtctcgcaggtggcatgacagaggctctgaggcctgatggctggaccctgctcactgctgttgtgggaccctgaacccctcccttcacctttgcttgcctccctgcctcggaagctccttgggtgtgggtgaagcccgaggctgctcctgtggaagtggctctgggcaccagcctgtggggctaaagacttgacagctagctctggagcagccggcttcctggaaaacctccaggtttcgcataccagggatggcccctggcttggcctgcgaaggtgaacctgcccagatttatcagtagaggctggactccctctgtgtcctgcccatggttgcagcagccatgggcctatgagcggtctaactgtggccaagtatggtgacctctatttttctttatattgactctttgtatttaaatccatatatttt

SEQ ID NO: 262543 - DNA, 656 bp, Homo Sapiens
gggggggtcgggcctgggtccgacggtagtgggtagcgggtctcgggttgcgggttgcaggttgcaagccgcaggccccaggcaactgccttcccggcgccatgttcggctccagtcgtggaggcgtgcgcggcgggcaggaccagttcaactgggaggacgtgaagactgacaagcagcgggagaactacctgggcaactcgctgatggcgccggtaggccgctggcagaagggccgcgacctcacctggtacgccaagggccgggcgccatgcgcgggcccgagccgcgaggaggaactggcagccgtgcgggaggcggagcgcgaggcgctgctggccgcccttggctacaagaacgtgaagaagcagcccacgggcctgagcaaggaggacttcgcggaggtctgcaagcgggaaggaggcgaccccgaggagaagggcgtggaccagcccaggaggtcccagtgaggaagggatggtgcgcccccaacatggtccggagatacacccagctaccaattcgggaccaggaccaacaggaccggacccgcctccctggacctcggacctgatgaggccacgacccctgcgcttctctcctccccctgtccctcccacctgtgctcaaaataaacctctggactgaccggctaa

SEQ ID NO: 262544 - DNA, 445 bp, Homo Sapiens
  misc_feature (369)..(369): n is a, c, g, or t
gctgaacagcctcttcctgcgcaaggacatgtgctcctgcagaaaagggatgcagatcaggtaaaacccagaaacctccgctcacgcggaagggcctgcagaaaggatgctcttgaagtccgaggccccacgcgcctgaccctccctgctgtggcgtcaaacccctgtttaggccctactgctgtaggaatattcgagtcaccctaggagccccgggatgctggcgcccagggcctactcccctcacgccacaccctgccaactagatggactggcctagccgctttaacccagaaccagtagatgttcatcttaaattctggccctctagggtggttcatgcactcaaccagtagttgactacctttnttttgaattaggcactgccagggggggagaaacacaggatacaagggaaaagttcgattttgatcccttgcctttt

SEQ ID NO: 262545 - DNA, 881 bp, Homo Sapiens
  misc_feature (246)..(288): n is a, c, g, or t
  misc_feature (292)..(326): n is a, c, g, or t
  misc_feature (780)..(780): n is a, c, g, or t
  misc_feature (844)..(844): n is a, c, g, or t
  misc_feature (863)..(863): n is a, c, g, or t
aaaattacatcagacaattgatagagcttctagatcccccttctaaaacaaaagcattttgccacaaactaggatggagtaggtttttttcagactatttatacttattttatgtatttcaatactgccctttaagtaaaagtactatatactttctctttttttagattaattctgcttaagtcagtcttttaatttattctagtttgagtttttaaaaaattttagaatgaaaaatctcaaaannnnnnnnnnnnnnnnnnnnnnnnnnnnnnnnnnnnnnnnnnntatnnnnnnnnnnnnnnnnnnnnnnnnnnnnnnnnnnnataaagaacacctaggtaacccatcctccaccttcgacaattatcagctcctagctaatttgtgtcatctgtaaccccacctgcttctgccctttctgtattattttgaagcaaatcttatcatttatctgtaaatatttcaggactttaaaaaatatgtgtaatctgaataccatttttacacctaagaaaatggacaattccttaatataatgtgttgtctatagatgtcaaaaatttttgcagttttttggaatcaggaaccaagtaaggtactgaatattgcagttagctgatacacatcctaaatttcttcaattgttgtggtcctccaaactagagtgtatcagaataactagagccttgttagaacacaaactgctgggccccaccccagagctgggtgatctggtaagtctgctggtggagtccggggaatttgcatcccctaacnaattccccagggtgatgctggaagctggcagggttttggggggttccactccacctaattgggntccatcaagcatctctctngcccccccttacaaaaat

SEQ ID NO: 262546 - DNA, 742 bp, Homo Sapiens
caggccccaggggcctgaagccagagtccagggggaggaggacacgtgcctgccccggcccctcgggagtccgtggctgttttgtaggagttggtgcccttgtgctaccgctgctccaccaacaacccgctgctcaacaacctgggcaacgtctgcatcaactgccgccagcccttcatcttctccgcctcttcctacgacgtgctacacctggttgagttctacctggaggaagggatcactgatgaagaagccatctccctcatcgacctggaggtgctgagacccaagcgggatgacagacagctagagattgcaaacaacagctcccagattctgcggctagtggagaccaaggactccatcggagatgaggacccgttcacagctaagctgagctttgagcaaggtggctcagagttcgtgccagtggtggtgagccggctggtgatgcgctccatgagccgccgggatgtcctcatcaagcgatggcccccacccctgaggtggcaatacttccgctcactgctgcctgacgcctccattaccatgtgcccctcctgcttccagatgttccattctgaggactatgagttgctggtgcttcagcatggctgctgcccctactgccgcaggtgcaaggatgaccctggcccatgaccagcatcctggggacggcctgcaccctctgcccgccttggggtctgctgggctgtgaaggagaataaagagttaaactgta

SEQ ID NO: 262547 - DNA, 1855 bp, Homo Sapiens
  misc_feature (1489)..(1489): n is a, c, g, or t
  misc_feature (1562)..(1562): n is a, c, g, or t
  misc_feature (1696)..(1696): n is a, c, g, or t
  misc_feature (1712)..(1712): n is a, c, g, or t
  misc_feature (1736)..(1736): n is a, c, g, or t
  misc_feature (1824)..(1824): n is a, c, g, or t
  misc_feature (1837)..(1837): n is a, c, g, or t
ggggaaaccggacatgtttaataccaaacacaaagcaaacacattcatcatctagagtactatattccaaccctatctcaaatgcaggaatgggcctctatctggtatctagaggatgatcataggaaacaaaatgaggacagaggcatctggtatcttctaaaagtggtacaaaactcccgcctgtcatgtcataaagctccccatctggtgctgcgacccacctccaagagaaagccaaaggaacagaccaataaaaggggtccggggtgctttctctatttcactcactcctcttatttgctaaggagctccaataaccaaaagaaatggttcctagaagaagagaactaaatctccagagagctgctggggcataccgataaaaactgggagaaacaaagactgacagcagagaagtccaatactgctgctgaagtttctcagcctaaatccgtgaaagagcctgggattctactgctctgtccagtaagaggagcttctgggtcctgtatgacccttccaactctgacttgaatgcaccatctaaaaacgtgtctatctctacccctaggcttcttagctcttcagtcatcctcatcatcctcaatctggtatcgtttcttcttttggattcctggagctcccaactctggtgctctgttcctgccctcatcttcttcctgttcctcgtcgctgtccagcaattgtcgtttcttgggtgctgccttcagcggctctttaccaacagcgtcttcctcctctggggatgccaggccccctttcttcttgtgggctagcaagagggccctcagggcttgtgctcggtgctctttacagtgctcctcatcagagccttgctctccagggactttaggctgcagctctggctgcagcttctgttcctcctctggttgactcaaagaagctgctgccctccggagctgggtaggactcagcttagctggaattcgccagaaggtttcctgcccagaggcagggggccgaacccctagcttgcgcaacagctgctgaaactgttcgttttccatggcttcctcattttcctctgtgagtggcaccaatggaacggcctgggagcagcctgtccactcaccatcctcttcccgatcatcagctgctcggatcaggcagttctggagccataggagcaggatagaaaagccttcctgatgcaggctttgaccaaggttttcatttgaaaggactaagctaccctggacttgttctgcttctgagcccccttcttcttcctcttcgctgtcttcctcaggcaggttttcctcttcttccagatcttcctggcaaaaatctttcagggactccgctccatttggcaagatggaggatgccaactttttctgccgtttcttgtacagctcccgccgctcagccaccagccccagagccaagagtttatccactattcgggcccgtgagcgtttggctgtgatattcttcatgatantgacccacggacatcatctgacgtcccggaattcctcaaaaagccgctgcaagctccaactcctgatcccccngtccacaagtacaatatgggttcctttcctttggaagtccttgacactgtcagccagtcccatctgtaccagatggtggatgatctgcttgcgtgttcgaggaacagtattcaggtgggcaagatggcttccancacatcctggccttcnaaggtccttaattggcgaaggtanagctcccgaagatgagcctcttccttcgggggctcaatgtaggtgctctgcgaatgggaagaactggtaatcaagggaagcaataagncctaagtaatctnttgaaacaaaagttgtgt

SEQ ID NO: 262548 - DNA, 1496 bp, Homo Sapiens
  misc_feature (1254)..(1264): n is a, c, g, or t
aggctggaccggtccggattcccgggatccaaatttatacatctcaaacctcccactgtcaatggatgagcaggaactggaggggatgctgaagccctttggccaggttatctccacccgtatccttcgagataccagtgggaccagcagaggtgttggctttgcaaggatggagtccacagagaagtgtgaagccatcatcacccactttaatggaaaatatattaagacaccccctggagtaccagccccatccgatcccttgctttgcaaatttgctgatggcgggccaaagaaacgacagaaccaaggaaaatttgtgcaaaatggacgggcttggccaaggaatgcagacatgggcgtcatggccttgacctatgaccccaccacagctcttcagaatgggttttacccagccccctataacatcacccccaacaggatgcttgctcagtctgcactctccccatacctttcctctcctgtgtcttcgtatcagagagtgactcagacatctcctctacaagtacctaacccatcctggatgcaccaccattcatacctcatgcagccttcaggttcagttctgacaccaggatggaccatcccatttctctccagcctgcctccatgatgggaccccttacccagcaactgggccatctctccctcagcagcacaggcacgtatatgccgacggctgcagctatgcaaggagcttacatctcccagtacacccctgtgccttcttccagtgtttcagtcgaggagagcagcggccaacagaaccaagtggcagtggacgcaccctcagagcatggggtctattctttccagttcaacaagtaacagtgggattcccctccccatctttactgaatagaaatgaattcttggagatactcatgctcccagattccagagggttaaccaggaatggagaccatccgtcggccctgctaaggactaacacttagccatcgtttttcacaggcctgggcctggaaaaagaaatctctacgttcctgccctttactattgctgatggagcctgggggaaccatcactttttttgtgtgctacattcaaggagatcaaaaaaacttttcttctttttgcaaagaaagctttttgtttttaactgcaacgtacttttccccctaccttgaagagactgtggtcgccgttctccatctatatgtaaaagttccccagtatcggcattttcggcatgctttcccaaccatttcggannnnnnnnnnnccaacccaaacgacccgaacggtggcgctgtggcctcctgagagccccaataatgagcaagatgagcgtatgagaacgcggggtgtgtttacaggtgcggcccaacaggttggagcccagatgaccatcctctccatatggctccgcggaagacgttcttaaacgcataggtcagattgggaaaaactcgacggggcggcaaaagaaggtgctcccaagaaacaaccccacg

SEQ ID NO: 262549 - DNA, 767 bp, Homo Sapiens
tggcggcaaaacctctcgagtgagcccctgcccgagtgccgcgggggagaggccgcgagcgggaccgagaagtgggctgggagcagaggtcgcggaggtggcgagcgaggccggggcccaggcggggacctgctggtgtccgtggagtggcttgcactccagggtcagggtgccggtgtattgagggggcccggtgttgccttattccagcacggctactttcctcttcactctgatgaggggagcttatatcatgcctattcaaaaatggagcacgtcgcactggagtttcgtgccctctcgttaaactgtcaggagccacagggctccataaaacggaatcagtgtctcaatatacatgacctatgttcatagcaatgttcagccattctgggtttgaccagaaaaccacattaaagccaagacccgtatggagcgaactgccttgatttacttatgctgtgtggaaggttctgtcacctactgactgaactccagttactccaccaagcaccctggcctcagaaatcctggacttccccaaagttacatgcctggtctgacctgagcacaggaccacctgactatggttgcctcataacacggaccacatgcatgcatgtcgcgaccctggccacaaaggcattaccgaacgctcctgcacccatggcgacggacatactgcaccactgcacctgacacaggcccacgggcatgctcttgacaagcgaaatccataattgtacaacaatgctataaacacttag

SEQ ID NO: 262550 - DNA, 1519 bp, Homo Sapiens
  misc_feature (1481)..(1481): n is a, c, g, or t
ggggggaactcttagctgagcaggcgagagcatcatggataccgacttatatgatgagtttgggaattatattggaccagagcttgattctgatgaagatgatgatgaattgagtagagagaccaaagatcttgatgagatggatgatgatgacgacgacgatgacgtaggagatcatgacgatgaccaccctgggatggaggtggtgctgcatgaggacaagaagtactacccaacagccgaggaggtgtatggtcctgaggtggagaccatagttcaagaggaagacactcagcctctcacagaacccattattaagccagtgaaaaccaagaaattcactctgatggagcagacattacctgttacggtgtatgagatggatttcttggcggatctgatggataactcagagctcatcagaaatgtgaccctttgtggacatctccaccatggcaagacatgttttgtggattgtttaattgaacagactcacccggaaatcagaaagcgctatgaccaagatctgtgctatactgacatcctcttcacagagcaagagagaggtgtaggcatcaaaagcactcctgtgacagtggtcttgccagacaccaaaggaaaatcttatctcttcaatatcatggacactccaggacatgtgaatttctctgatgaggtcacagctggcttgcgcatctcagatggagtggtccttttcattgatgctgctgagggggtgatgctgaacacagagcggctgatcaagcatgcggtgcaggagaggctggcagtcactgtgtgcatcaacaagattgaccggctgatcctggagctgaagctgcctccaactgatgcttattacaagctgcgccacattgtggatgaggtcaatggattaataagcatgtattccactgatgagaacctgatcctttccccactcctgggtaacgtctgcttctccagctcccagtacagcatctgcttcacgctgggctcctttgccaagatctatgccgacacctttggtgacattaattaccaagaatttgctaaaagactctggggtgacatctacttcaaccctaagacgcgaaagttcaccaaaaaggccccaactagcagctcccagagaagtttcgtggagtttatcttggagcctctttataagatcctcgcccaggtttgtaaggtgacgtggacaccagcctcccacgggaccctagacgagcttggcatccacctgacgaaaggaggagctgaagctgaacatccgccccttgctcaagctggtctgcaaaaagttctttgggcgagttcacaaggctttgtgggacatgtggggtgccagcatatccctttctcccaaaggtggggcgcccaagcccaagaatttgagcacaccctacaccgggtgggtgtggactccggacctccgcggaggctattgagtgactggtgacccctgatgggccccctgnatgtggccacactacttaagatgtaccgcccaggatgt

SEQ ID NO: 262551 - DNA, 963 bp, Homo Sapiens
  misc_feature (501)..(501): n is a, c, g, or t
  misc_feature (524)..(524): n is a, c, g, or t
  misc_feature (829)..(866): n is a, c, g, or t
gcctgggtggcgaattcggcacgaggcccaggcttcctgccaggcggctgaggagtttctgcggagcctgctgggcagcattagctgccatgtgttgtgcctggagcacccgggcagcgccaggtttctcctgggcccagaagggcagcaccttctccaggggctggaggctcagttccagtgtgtctttgggacagagcgcctggccacagccacgttggacacaggccttgaagaggtggaccctaccgaggccctcccagtgctccctggcaacgcccacaccctgtggaccccagacagtacaggtggtgaccaggaggacgtgagcctggaggaggtccgagaactgctggccaccctggagggcctagacctagacggggaggactggctgcctcgggagctggaggaggaagggcctcaggagcagccagaggaggaggcgaccccagggcatgaggaagaggagcctgtggcccccagcactgtggcacccangtggctgggaaggaggaggccgnctctgcagctggccctccaccggtcactggagcctcaaggtcaggtggctgagcaggaggaggctgctgccctgcggcaagccctaaccctctccctgctggagcagcccccgttggaggcagaagagcccccagatgggggggactgatgggcaaggcccagctgggtggggcactcggcctttgagccagaatgggggaggagcttggaccgggcgctcagggcctgccttgggagggcccccctcccaaaaggagaaccgggggggccccttggcgcccccacaatggcctgggaaagattnnnnnnnnnnnnnnnnnnnnnnnnnnnnnnnnnnnnnnagatgttcgccccttgccgggggggactgtgcccattctctcccggggatttgcgcggggctcccccctggacccacggctagggccgccgatatgg

SEQ ID NO: 262552 - DNA, 964 bp, Homo Sapiens
ggcgaattcggcacgaggcccaggcttcctgccaggcggctgaggagtttctgcggagcctgctgggcagcattagctgccatgtgttgtgcctggagcacccgggcagcgccaggtttctcctgggcccagaagggcagcaccttctccaggggctggaggctcagttccagtgtgtctttgggacagagcgcctggccacagccacgttggacacaggccttgaagaggtggaccctaccgaggccctcccagtgctccctggcaacgcccacaccctgtggaccccagacagtacaggtggtgaccaggaggacgtgagcctggaggaggtccgagaactgctggccaccctggagggcctagacctagacggggaggactggctgcctcgggagctggaggaggaagggcctcaggagcagccagaggaggaggcgaccccagggcatgaggaggaggagcctgtggcccccagcactgtggcacccaggtggctggaggaggaggccgctctgcagctggccctccaccggtcactggagcctcaaggtcaggtggctgagcaggaggaggctgctgccctgcggcaagccctaaccctctcccctgctggagcagcccccgttggaggcagaagagcccccagatggggggactgatggcaaggcccagctggtggtgcactcggcctttgagcaggatgtggaaagacctggacccggccgctcaggggctgcccttggaggtccacctccagcagagagaccggtgggggccctgtgcgccgccacactgcccttgcaaagctgccgtgctccccctgggaacgggtgcccatgtcggtgaagtgtttgcccctggcgggggggaattgcaccattccctcccgtggggttttcagggggcccaccccctggcgccgggggcttgccccgccccacctttggtgtggcaccctttc

SEQ ID NO: 262553 - DNA, 901 bp, Homo Sapiens
  misc_feature (197)..(197): n is a, c, g, or t
  misc_feature (556)..(556): n is a, c, g, or t
  misc_feature (795)..(798): n is a, c, g, or t
  misc_feature (800)..(805): n is a, c, g, or t
  misc_feature (807)..(850): n is a, c, g, or t
tggcttccaaaagtcacggctcagttaagagattgaggaaaatgtccgtgaaagaagcgaccccgaagccagagccagagccagagcaggtcataaaaaactacacggaagagctgaaagtgcccccagatgaggactgcatcatctgcaatggagaagctgtccacagcgtctggatacagcgatgtgactgacangcaaggcaatcgggtccctagctgtgggccacctcaccaagtgcaaccatgccttccacctgctgtgcctcctggccatgtactgcaacggcaataaggatggaagtctgcagtgtccctcctgcaaaaccatctatggagagaagacggggacccagccccagggaaagatggaggtattacggttccagatgtcgctccccggccacgaggactgcgggaccatcctcatagtttacagcattccccatggtatccagggccctgagcaccccaatcccggaaagccgttcactgccagagggtttccccgccagtgctaccttccagacaacgcccagggccgcaaggtcctagangctcctgaaggtggcctgggaagaggcggctcatcttcacagtgggcacgtccagcaccacgggtgagacggacaccgtggtatggaacgagatccaccacaagacagagatggaccgcaacattacgggccacggctatcccgaccccaactacctgcagaacgtgcctggctgagctggctggcccaggggggtgacccgagactgcctggagcagcagtgacctcgcacccaacannnngnnnnnntnnnnnnnnnnnnnnnnnnnnnnnnnnnnnnnnnnnnnnnnnnnnccaggcagggaaatgccccccccaaaaaagcctgggaaggttttttaaaga

SEQ ID NO: 262554 - DNA, 895 bp, Homo Sapiens
tgggctgcctgctccagatctcccgaagccacacagaagtgaagctggagccagacggactgctggtgtgggtcctggcaggcgccctggggctcagcctcgtcttctccctggtctcagtcccattgcagtgcttccagctcagcagagtctatggcttctgcctgctcctcttctacctgaacttccttgtcgtggccctcctcactgaatttggagtgattcacctgaaaagcatgtgactgaagccgcttagtgctgtggcctcactgcaggcaggagcccgcccctcctgccgggggaggccagggaccggagcatttctgcaaggcccttgtgggaccgagagtgcggcccttgctgctggagatctgaggtcactgctgtgagctgggagaactgctgtgtacctcttgctgccagcacccaacagccttgccgtggggaccttggaaacctggctttgctctggacaaagggttccagagagaagctagaagtcccccttgaatgacccccagagcccctctgagaagggctggagtttgggggaaggggatggctggatgtgctccaggccatgctggaagtacccccgaggcacaggcactgcccgttccccttgcctgggcttcaggccttctggcaccttctcaggacacaagtggctgcccaaccctgactcaaaaaatgaaggtgggcttggacccctgggaatcagggcccccgagggctggaactccagaagccccaccatctgccacaaaacagaattcgaaaactaccttaattttggaattttctcccttggccacgttaattaaagccaaaaaagcaccgggggggcttaatccgtgggcaacccaactttcccttggaacccacctggctttct

SEQ ID NO: 262555 - DNA, 637 bp, Homo Sapiens
agtgactcagcctctctcccctcattcttccacagctgggcttcaggccttctggcaccttctcaggacacaagtggctgcccaaccctgactcagagaatgagggtggcttggacccctgggaatcaggccgccgagggctgagctccagagccgcaccatctgccacaaacagaattcgagacatacttaattttgaatttctccttgccacgttaataaagccaaaagcagcgggtgctattcgtggcaacacacttcactgaacccacttgcttccaaaacgatgcccagcccgaggcaactgctacgccagcagctgccacatgggatggtggctcaggcgctccctcccaggattctgcccctgcctgtccacagactcctttgtgctggaacctgggctcctccagctgccaggcaggagtcggtaggactgtgcctgtgcctccctcagcggggccctgggcggggttccaaggcctgcgagctgggaaaggacagatgaggggacctcgtgccttcttgctgtcatgcaatgaccccgccttaatgttgccgaaataagcaactcttaggtttgcctgactgccttatgctggtaaagaaaagggattcaactgtctcttttccaaat

SEQ ID NO: 262556 - DNA, 1326 bp, Homo Sapiens
  misc_feature (98)..(144): n is a, c, g, or t
  misc_feature (467)..(506): n is a, c, g, or t
ggcgaattcggcacgaggaaggcgccggccggccagtcaccggagggatcccgccagaggcggctccgcgtctccagcagcggggcagggacccgggnnnnnnnnnnnnnnnnnnnnnnnnnnnnnnnnnnnnnnnnnnnnnnntctgtatctggcccctgggcagctgcccggggaggcggccagcgagctggggccgcgcaatgtcgcacggagccgggctcgtccgcaccacgtgcagcagcggcagcgcgctcggacccggggccggcgcggcccagcccagcgcgagccccttggaggggctgctggacctcagctacccccgcacccacgcggccctgctgaaagtggcgcaaatggtcaccctgctgattgccttcatctgtgtgcggagctccctgtggaccaactacagcgcctacagctactttgaagtggtcaccatttgcgacttgataatgatnnnnnnnnnnnnnnnnnnnnnnnnnnnnnnnnnnnnnnnngtgctcacctgtatcagctggcccctgtcggaacttctgcactatttaatcggtaccctgctcctcctcatcgcctccattgtggcagcttccaagagttacaaccagagcggactggtagccggagcgatctttggtttcatggccaccttcctctgcatggcaagcatatggctgtcctataagatctcgtgtgtaacccagtccacagatgccacccgtctgatgaaggccacaaccccctaggcccctcaaggagctttgcagagaggaggacgtgtactccaggcgaggcctctggacctgtgttcctgtgccaaagtcctgtcaggctggtgggcaccaggaaaagcctgcaccctcttcctgctctcccaggaagccagctccctgagctcctgagccagccgggaaactcttcctccagcctttccggggagaacatccctcccattctgggaaaggaaagcagcctccagggaaatgttttctgccttcctgcttctagaaccacctcaggtactgatgaaccccacttagcacagctgaaggggtttgtgaatactcccgcctaaatcccttctacttcactcctcaggggagtgaagtgccttaagaaacaaagccctgtcctaatttatctagcttgtcagtccggtcttagagataccctctttcctgaagtgaggcgtgcctgtagaaacactatgtggtcagcctgtccccaaggagatcttgtgtctcctctccatctctgcctttgttaccagtgtgcatgtgtttgtgtgttttttaataaaatattgactcggccagttaa

SEQ ID NO: 262557 - DNA, 909 bp, Homo Sapiens
  misc_feature (87)..(87): n is a, c, g, or t
tgaggaatgccgcattcctccagccctgtaactcttcaaaagctatttagaaaacggtcttggatgaagtagggatcggcttcggangtatactgttcactgaagtcaaccaaggcgtcccgtccatatggctgccggcgtcccgtcacggggatgttacacagctgagcatagtcatctgaatccttcagggggcagagggcgcactgcatgccccaggcctctccatacagacagcagcactcagtgtacgttgtctgcttgcccacaagaggccggctacacacgtattcatcactcagatgttcccagcacaaatcttggtagacatcagtttcttctatttgttcgtttgactcagccggtcgtatacatcttttttctgacgcatccaggaccatggggtgagtacagaagcagttgtaagagccctctgtattaacacactggccatcaatacaactactggggtcttgacattcatccatatcaaagcactgcagtttcacaggatcatagtacgtcccttgcttacagtagcattcatacccaggccgagtgttcaaacagaaaccatttttgcagatttcttgtccaaaaagtaggcattcatctgcatctttatagttctcaccaccagcttcagaagatgattctccagcaggcacaaaacctttccctttgggacacatttcagtgaactcagcagttcccaagaccgggcaggggaagatttcgcagttatctccccatcccgcgcctgatgtacagcagcattcttgtttcgtgacattgggggccaacacattatcacagagactggcgtcattgagattatagtagcattctttcttttcttctttgggttgatctacctccacagatttagatgtagatgtagatcaaccc

SEQ ID NO: 262558 - DNA, 1130 bp, Homo Sapiens
  misc_feature (599)..(599): n is a, c, g, or t
  misc_feature (886)..(886): n is a, c, g, or t
  misc_feature (939)..(958): n is a, c, g, or t
ggggcaaaggcttaagggtgtaacctcagaatggggccctgaatcagctgtgggcgagctcctagagtatcttaattcctgcttcatctctttccattttgcagttgggcaaactgcggctcagaaagataaagaacttctccggagcgaaaaagctgctaagaatgtatccaaaactccgcacgaagtctggaacgtttttttcttagagttccagaattgagactgaagtgtacccagagacacaaagaaatacagaagtccagaatgatcaaatgagatcactacccaatgaaatgataggccgaggagccagaaattgtcctactacctgctttccaggtccagattccacgagagccttctgggctcccaccagagaccctcagtgaagactctgttgaagactttaagaccatgctagaaagcctcccggcagaggttcaggaagttctgctatgaggatgcagctggccccagggatgtcctcaggcatctctaggaccttgctggacggtggtggctgagacctgatatccacacaaaggagcagactgtggaaatgctggtgcaggagcaattccaggctgtcctgcccngaggagctcagagctcaagcacagagatgtcagcctggaatcagaatcactggctaagtcttgctgcttgcttcttgctcagcctggcatatgagaagtcaaccaagcattctcttggatgcaagatccaactgcacccatgggaaatctgaacttccactttctttgagcttgtctttgggtggaataagaatccatcaaaacccatgtctggatctctctttggctgaagcagctttatttcctacagaaagagtttctctgtcctcttggttaggacaatcagncctgctgcttggggcttttccaagagcctatttttcatctgctggatgcctcnnnnnnnnnnnnnnnnnnnngcactgtgtgacatgctttaatatatatattttttatggatccaaagaggtaatcaactttaactttcagaattcatgaatcttggtttggtggcatgaatgaaaggttatgtaaccccaccagtaactcatttggggtgcccttgaaatattaaagtttggtcctcaatta

SEQ ID NO: 262559 - DNA, 895 bp, Homo Sapiens
  misc_feature (175)..(175): n is a, c, g, or t
cttgtccccaggcttccggggtgggggtgtcaagattacccccggcttggaggggccatgccgctcaggggccatcacgtcccgtctctcgctgatgggcaagcttccgcccgcagtcccgtcatctcttttcttgatcatctttgcacggccgtgagcgggcccacactctgcnttgctggcattcacttcgtccagccgctccagaagcagctttagctgttcttccactggcaggtgcttctggttctccagcaagaccagccgctcttcctcggctgcatcttcagtgtggtgtgtggcctcatctccagccaggctgtgggggatatgcatgcccgtctcaaagtcaatgcccattttttctgcctggcgccgggcctggcggagcacagcaccaccctgctcacgaagccgcactgctgcccggtagaagatggtgtccttggcgttatacttgaggcagttgctgacgatgaggttgaagtcctcctcaaaatcatcaaaattcaggtagcggtaagcctccaagttctgcttcatggtgaaaaagtccatgggctttttgatgtggtctaggtagtcaggtacctcgtccaattcggttacctcagacagagggaccggctcgctgaagatgttgcctgtgtccttctcttggagctgctccaaggttttgcgaaggaggatgaggaaaggagtcagctgcatctccatggcaatctgctgaaccttgatcgtctcccttttgagtttttcccgcttgcggatcaattccacgagcagccgagctcgctccaagtcatgccggagccgctgccaggacttgagctgttctttaagggcccagttcttatcctcagaatctctcccaacttggtcacagttcctctga

SEQ ID NO: 262560 - DNA, 734 bp, Homo Sapiens
ttttcaagtgaaaggcacagaaatgcaattacagtcctcaaagggttaaatttgacactaccaggttctatgacctttattgtcatggcaacttcaccattttaggatgtctttttatcattgttatttgtgtctttctttactgctaaataatgtctctgagtagtgtgccccactatttcctacaaaagatagcttaacaccaagaacagatgttgaaaataaaggtcagactttgactcacggaaaaagaaaaataacatgcacagatcggacagagagcatataaatatacaaaatatgtgtaagaaaaccaaggtccagagaggcgggccagcaacaaaggaaagactgatttcagaggctcaggccaggcctagtgcagctcgacgacgtttagtgcaatgttccgcggtctcttgcatacctggacgctactgtttctccaactcagtcacatagatcaggtggtcctcgggagacttgccgtgggtcttactaaggtgcagtttgactgcgtgcttgctcgcaaaagtccggttgcagagcttacattggaatgtggagcccaagtcttcctcggtggcccccagtgggcccagagttttgttggtgaggactttcgaaacattctgctgttcttgaatctgattgagtggcagcttggagagatccttcaggctgaagcccaagtgtgtctccaaatgacttatgtatgtagaagcagttctgaa

SEQ ID NO: 262561 - DNA, 1043 bp, Homo Sapiens
taggtagcgaggcctgggtggcgaattcggcacgaggcaccgtgctgccactctactccctggggccctcagggcagttggcagagacgccggctgaggtgttccaggccctggagcagctggggcaccaagcctttcgccctgggcaggagcgtgcagtcatgcggatcctgtctggcatctccacgctgctggtgctgcctacaggtgccggcaagtccctgtgctaccagctcccagcgctgctctacagccggcgcagcccctgcctcacgttggtcgtctctcccctgctgtcactcatggatgaccaggtgtctggcctgccaccgtgtctcaaggcggcctgcatacactcgggcatgaccaggaagcaacgggaatctgtcctgcagaagattcgggcagcccaggtacacgtgctgatgctgacacctgaggcactggtgggggcgggaggcctccctccagccgcacagctgcctccagttgcttttgcctgcattgatgaggcccactgcctctcccagtggtcccacaacttccggccctgctacctgcgcgtctgcaaggtgcttcgggagcgcatgggcgtgcactgcttcctgggcctcacagccacaaccacacgccgcactgccagtgacgtggcacagcacctggctgggcatgcagagccccggacccccacgcccatgcctcctcctcacaaagatcgtcggtttccgctgaaccccccaagcgcccgtgagcccgcaccaaacatggcgtaaggagccgtcaggagagcccggtgcacagcaaccaacgccactctattccaccccaacagtgcccgaacgagatcaacactggtaccgacgcacacccctcgcgctgtgcgacctatcccgctcgcggtcgaatgagccgtcgtgcgggcggcaacgaatcgaggaggagccgaagattaagatccgtcgtatcgcccagatcctattagcgcacgtaccgtatacccaccaccttacccccgcatctccgcgtgcatccgcgcatatccc

SEQ ID NO: 262562 - DNA, 1270 bp, Homo Sapiens
  misc_feature (44)..(44): n is a, c, g, or t
  misc_feature (46)..(96): n is a, c, g, or t
ggcctgggtggcgaattcggcacgagggccctggaggctaaacntnnnnnnnnnnnnnnnnnnnnnnnnnnnnnnnnnnnnnnnnnnnnnnnnnnngcgcattaaagcagagaaggccgaaatcacgaggttcttccagaaaccaaagactccacaggcccccaagaccctggccggctcctgtgggaagtttgccccctttgaaattaaagagcacatggtcctggcccctcggcgtcggaccgctttccatccagacctctgcagtcagctggaccagctcctccagcagcagagcggcgagttctccttcttgaaagacctcaaaggccggcagcccctgaggtccggacccacgcacgtttccacccggaatgcagatatttttaacagtgatgtcgtcatcgtggagcgtgggaagggcgacggtgttcccgagaggaggaagtttggcaggatgaagctcctgcagttctgtgagaaccaccggcctgcctactggggtacctggaataagaagacggcactcatccgcgcgcgagacccctgggcccaggacacgaagctcctggactatgaggtggacagtgatgaggagtgggaagaagaggagcctggggagtccctgtcccacagtgagggggatgatgatgacgacatgggagaggatgaagatgaggacgatggtttctttgtgccccatgggtacctgtctgaggacgaaggtgtgacagaggagtgtgccgaccctgagaaccataaggtccgccagaaactgaaggccaaggagtgggacgagttcctggctaaggggaagcgctttcgcgtcctgcaacctgtgaaaatcggcctgcctgtggggcggctgacaaaaactgcgcaggcgatgacctgaaggtactgcagcagttcgcagcctgcttcctggagaccctgccggcccaggaggagcagacgcccaaggcctccaagcgggagaggagagacgagcagatcctggcccagctgctgccgctcctgcacggcaatgtgaacgggagcaaggtcatcatccgggagttccaggagcactgccgccggggactgctcagcaaccacaccgggcagccccgcggagcccctccaccacctacctggaaaccccccacccccagcgaggatgcccgccatccccctctaagtcccgggctccaggcgggctcattttccgagaacctccgtgtatggagaaagcggcctggactttcgggaatgtgcctgggtaccgtgc

SEQ ID NO: 262563 - DNA, 975 bp, Homo Sapiens
  misc_feature (46)..(96): n is a, c, g, or t
ggcctgggtggcgaattcggcacgagggccctgggaggctaaactnnnnnnnnnnnnnnnnnnnnnnnnnnnnnnnnnnnnnnnnnnnnnnnnnnnagcgcattaaagcagagaaggccgaaatcacgaggttcttccagaaaccaaagactccacaggcccccaagaccctggccggctcctgtgggaagtttgccccctttgaaattaaagagcacatggtcctggcccctcggcgtcggaccgctttccatccagacctctgcagtcagctggaccagctcctccagcagcagagcggcgagttctccttcttgaaagacctcaaaggccggcagcccctgaggtccggacccacgcacgtttccacccggaatgcagatatttttaacagtgatgtcgtcatcgtggagcgtgggaagggcgacggtgttcccgagaggaggaagtttggcaggatgaagctcctgcagttctgtgagaaccaccggcctgcctactggggtacctggaataagaagacggcactcatccgcgcgcgagacccctgggcccaggacacgaagctcctggactatgaggtggacagtgatgaggagtgggaagaagaggagcctggggagtccctgtcccacagtgagggggatgatgatgacgacatgggagaggatgaagatgaggacgatggttcctttgtgccccatgggtacctgtctgaggacgaaggtgtgacagaagagtgtgccgacccctgagaccataaggtccgccagaaactgaaaggcaaggagtgggaccagttcctggcctaagggaaagcgctttcgcgtcctgcaaactgtgagaatcccctgccttgtgggccgcttaacaaaaactggcccagcaatgacctgaagggtccggcaccagtttcccaacctgctttccgggaaaacctggccggccccagaaggaaccaacaccccagggctc

SEQ ID NO: 262564 - DNA, 994 bp, Homo Sapiens
tagcgaggcctgggtggcgaattcggcacgagggccctgggaggctaaacttgaggaaaaaaggaaaaaggaagaagagaaacggttaagagaagaagagaagcgcattaaagcagagaaggccgaaatcacgaggttcttccagaaaccaaagactccacaggcccccaagaccctggccggctcctgtgggaagtttgccccctttgaaattaaagagcacatggtcctggcccctcggcgtcggaccgctttccatccagacctctgcagtcagctggaccagctcctccagcagcagagcggcgagttctccttcttgaaagacctcaaaggccggcagcccctgaggtccggacccacgcacgtttccacccggaatgcagatatttttaacagtgatgtcgtcatcgtggagcgtgggaagggcgacggtgttcccgagaggaggaagtttggcaggatgaagctcctgcagttctgtgagaaccaccggcctgcctactggggtacctggaataagaagacggcactcatccgcgcgcgagacccctgggcccaggacacgaagctcctggactatgaggtggacagtgatgaggagtgggaagaagaggagcctggggagtccctgtcccacagtgagggggatgatgatgacgacatgggagaggatgaagatgaggacgatggtttctttgtgccccatgggtacctgtctgaggacgaaggtgtgacagaggagtgtgccgaccctgagaaccataaggtccgccagaaactgaaaggccaaggaagtggggacgaagtcctgggctaagggggaagcggctttcgcggcctgcaaccctgtgaaaaatccgcttgcctggtgggccgcctgacaaaaaactgccccaggcgaatgaacctgaaaggtaactggcaacagtttcccaagccctggcttcctgggaaaaaccctggccgggcccccagggagggaggccaaacc

SEQ ID NO: 262565 - DNA, 1699 bp, Homo Sapiens
gcggagtgtacctgcacacctgcgctaagaagatcaggaccgagactctctcatcgctggtgtcatccgtgtcgtggaaaaggacaatgacgtcctcctgcactgggctcctgtagaggaggctggagattccacccaaatcctcttctccaagaaggactccagtgggggtgactcatgtgcttctgaggaggaaccaacctttgaccccggctatgaacctgactgggctgtcatcagcactgtgcggccacagccctgccactcagagcccacgagaggtgcagagcccagctgcccccagggctcctgggccttctcagtgagtctgggggagctaaagtccatccgccgctccaagccaggcctcagctgggcctacctggttctggtgacccaggctggaggttccctgcccgcactgcacttccaccgcgggggcacccgcgccctgctccgcgtcctcagccgctacctgctgttggccagctccccgcaggactcccgcctctaccttgtcttcccccacgactcctctgctctctccaactccttccaccacctgcagctctttgaccaggacagctccaatgtggtgtcacgcttcctccaggatccctactccaccaccttcagcagcttctcccgagtgaccaacttcttccggggtgccctgcagccacagcctgagggagccgcctccgaccttcccccgccacccgacgatgagcccgagcctggattcgaggtcatttcctgtgtggagctggggcctcggccaaccgtggagcggggccctccagttacagaggaggagtgggcacgccacgtgggccctgaaggtcgcctgcagcaggtccctgagctgaagaaccggatcttctcggggggtctgagccccagcctgcggcgcgaggcctggaagttcctcctagggtacctcagctgggaaggcacagctgaggagcacaaggcccacatacgcaagaaaacggatgagtatttccgcatgaagctgcagtggaaatctgtgagccctgagcaggagcggagaaactcacttctgcatggataccgcagcctcatcgaaagggatgtgagccgcactgacaggaccaacaagttctacgagggtcccgagaacccggggctgggcctgctgaacgatatcctcctcacctactgcatgtatcacttcgacctcggctacgtccagggcatgagtgatcttctctccccgatcctctacgtcattcagaacgaggtggatgctttctggtgtttctgtggcttcatggagctcgtgcaagggaactttgaagagagccaggagaccatgaagcggcaactcgggcgactgctgctgctcctgagggtgctggaccccctgctctgcgacttcctggattcccaggactccggctctctctgcttctgtttccggtggctgctcatctggttcaagaggggaattcccccttccggatgtcccttcggctgtggggagtgctgtggacaggggctccctggccccaatctgcacctgcttgtggcctgcgccatccctggaatggagaagggaccccctcatgctggcccggcttcggctccaaggagatccctcaggacatccaacaacctgactatgaaacttgaacgggggaggaactggctgacccccgcccaaaggccctgccct

SEQ ID NO: 262566 - DNA, 1101 bp, Homo Sapiens
tataaagagtgactctcctatgaaggtaaaggccacccctcttcagttccagtgactgagatacatttttccaatcctgggggcaaatacagacacagcaagttccttcttccctttggaaatttggcagctgccttcaccagtgagcacaaagccacatttcaaaggaaactgacaaattatccccagctgccagaagaagaaatcctcactggacggcttcctgtttcctgtggttcattatctgattggctgcagggatgaaagtttttaagttcataggactgatgatcctcctcacctctgcgttttcagccggttcaggacaaagtccaatgactgtgctgtgctccatagactggttcatggtcacagtgcaccccttcatgctaaacaacgatgtgtgtgtacactttcatgaactacacttgggcctgggttgccccccaaaccatgttcagccacacgcctaccagttcacctaccgtgttactgaatgtggcatcagggccaaagctgtctctcaggacatggttatctacagcactgagatacactactcttctaagggcacgccatctaagtttgtgatcccagtgtcatgtgctgccccccaaaagtccccatggctcaccaagccctgctccatgagagtagccagcaagagcagggccacagcccagaaggatgagaaatgctacgaggtgttcagcttgtcacagtccagtcaaaggccccaactgcgattgtccaccttgtgtcttcagtgaagaagagcatacccaggtcccttgtcaccaagcaggggctcaggaggctcaacctctgcagccatctcactttcttgatatttctgaggattggtctcttcacacagatgatatgattgggtccatgtgatcctcaggtttggggtctcctgaagatgctatttctagaattagtatatagtgtacaaatgtctgacaaataagtgctcttgtgaccctcatgtgagcacttttgagaaagagaaacctatagcaacttcatgaattaagcctttttctatatttttatattcatgtgtaaacaaaaaataaaataaaattctgatcgcat

SEQ ID NO: 262567 - DNA, 450 bp, Homo Sapiens
  misc_feature (39)..(39): n is a, c, g, or t
agccccagaaggatgtagaaatgcccacgaggtggttcnagcctggtccacaggcccagtcaaaggccccaaactgcgattggtcccaccctggtgtccttcagtgaagaagagccatacccccaggtcccctggtcacccaagcaggggcctcaggaggctcaacctctgcagcccatcctcactttcttgatatttctgaggattggtctcttcacacagatgatatgattgggtcccatgtgatcctcaggtttggggtctcctgaagatgctatttctagaattagtatatagtgtacaaatgtctgacaaataagtgctcttgtgaccctcatgtgagcacttttgagaaagagaaacctatagcaacttcatgaattaagcctttttctatatttttatattcatgtgtaaacaaaaaataaaataaaattctgatcgcataaa

SEQ ID NO: 262568 - DNA, 884 bp, Homo Sapiens
ccagcggggaggcgggcagctctgcccggcagaaacctgtcttgaggagctgcagcatcgacaggtctccgggcgctggctcactgggctccccggcctcccagcgcaaggacctgggtcgctctgagtccctccgcgtagtctgccggcacacaccgcatcttccggccgtcggacctcatccacggggaggtgctgggcaagggctgcttcggccaggctatcaaggtgacacaccgtgagacaggtgaggtgatggtgatgaaggagctgatccggttcgacgaggagacccagaggacgttcctcaaggaggtgaaggtcatgcgatgcctggaacaccccaacgtgctcaagttcatcggggtgctctacaaggacaagaggctcaacttcatcactgagtacatcaagggcggcacgctccggggcatcatcaagagcatggacagccagtacccatggagccagagagtgagctttgccaaggacatcgcatcagggatggcctacctccactccatgaacatcatccaccgagacctcaactcccacaactgcctggtccgcgagaacaagaatgtggtggtggctgacttcgggctggcgcgtctcatggtggacgagaagactcagcctgagggcctgcggagcctcaagaagccagaccgcaagaagcgctacaccgtggtgggcaacccctactggatggcacctgagatgatcaacggccgcagctatgatgagaaagtggatgtgtgctcctttgggatcggtcctgtgcgagatcatcgggcggggtgaacgcagaccctgactacctgccccgcaccatgggactttggcctcaaacgtgcgaggatccttggaccgctactggccac

SEQ ID NO: 262569 - DNA, 1288 bp, Homo Sapiens
  misc_feature (103)..(103): n is a, c, g, or t
ttcattctgtggagccagagggcaccgacaaaccctttcccctatttggggcggacccagaggtgcctgagatgggggtctgggaaaacactgccccaggccntgacccagccccgtgggtggaggtacctgtaaaaagcgaaaggcagcagcctggtgtgctgatccggggccacacggaggaggagccgccccagcctgaggtctgcaacaccaagaagtggctcaggcaactctggacatctctgcctattatcagtgctggggacacccctgggggtcgggacgtgtaccctgggaggcctggctgtggggatagtgtggggcgaacagcctgagctgaggatacccaggtacctgtcagcagctgggagaggatgggggggtcgacctcttgcaggagggtgggtgtggtgcagagagaggcagtccccatgataggcccattggtcctggggttgaccagtgagccagtaaattatcttattgctttaaacaagtttgtgcttaatctgtcccaactaaaatggagcttataaacttacttagcaaggaacctcaaggagggctcgttcttaaccatttgcaagatgcctctgaaaagagcggccctccgcatttgtgcctcagcagcgtgtttcttaccactctctgtcaactgaaagagtgccagccaggatatcttcctcttctctaaacactcgaggattgctgcacaaacgtggaaagcctttggcaggtctgtggtgctatttgaggtcagatgtgacgacagcaggcccatcaaggagaagaagaaaaggaaaaccaatagtcgctggcaaactgccggccttcttgtagcttctgcagttcccggggcagcgggctctggcagtgtctcctccaccggcagagcagcacaggctccaggctcggccaccacaccagagcagaggtcaaaattaaggggcatttcgtctggcacttggccagtatgaagtcgaccatcagggaggggtctctgctccgcagacaggcgttcaggaggcccctgaagaagtgggcagtgatgtcctgtgtccagggcacctccgtgggagcagaagtttctcatctcagagttgaccaagtggaagaactgctcgcatctggcagtgatgggctgttctgcctggaaactgctgccgcagaggacagacgaaggcaggcggaggaggatccgtttgtacattagcagctccctctgtctctgaaagctggcagccacgctccacccgcttgtcagagcctggagccgtctgcggaa

SEQ ID NO: 262570 - DNA, 922 bp, Homo Sapiens
  misc_feature (250)..(250): n is a, c, g, or t
  misc_feature (323)..(323): n is a, c, g, or t
  misc_feature (778)..(778): n is a, c, g, or t
aggctggaccggtccggattcccgggatgcatctggatatcagctgcgtgggcatgatatctagaaggctaattgattttttcactttcacctgactctcttgccaacctgcagagacagacattgggtgtaggacagtgaactgagaaggaagctattaagattctggccttggcttagctctcaactggccattggtcttgcagtgacttcatggtcatgacgattttcttcaatgtgagcaggcggntttggctatggtgcctttcaaaactatgtcccttcttccgtgacccacgatgctctccctgggtttccttttnggatcaagacagagtctgctccagcccggacctctctagggatcacctctgttctgaccatgaccacgctgggcaccttttctcgtaagaatttcccgcgtgtctcctatatcacagccttggatttctatatcgccatctgcttcgtcttctgcttctgcgctctgttggagtttgctgtgctcaacttcctgatctacaaccagacaaaagcccatgcttctcctaaactccgccatcctcgtatcaatagccgtgcccatgcccgtacccgtgcacgttcccgagcctgtgcccgccaacatcaggaaagcttttgtgtgccagattgtcaccaactgagggaagtgatgggagaggagcgcccgtcttgctcagcccagcagccccctagcccaggtaagccctgagggtccccgcagcctctgctcccagctgccctgcctgtgaatggntgcaaccgtttttaaaaagtacttctgcatggtccccccaattgttgagggcagtaccctgggcagcagggccggcctctggcatccatggtctaacgcctggataactaacctccgaaaagttggtttttcccaggggccttt

SEQ ID NO: 262571 - DNA, 1270 bp, Homo Sapiens
  misc_feature (159)..(167): n is a, c, g, or t
ggggtaaaaatgcgtagcgcctgcaacccacagcgggtaaggggtggcatagcagaggtgaagtgggacgcgtgtgtgaggggggaaactacggggaattcggggcgcgacgcaatgggggatagcgggaaggaggcgtagcgcgggggctatggtaannnnnnnnnatacgtggaaagggttgtggaccatggggccctcgcgcccggggcgccgcgcccggccagaaagtttttcgtgcggttcaaattccaccttcagcctccgggagccttggaggttccgcttccttgcttttccagccttgggggccagggtggaatttcgggcggttccagtgcagccgccagggcccccagcagggctgcccgggctcctggggaagggcccgcccagccagggaaagctgggtgagcggcctccacagcacctcggatgtccttggctccaccctcagccacgtagccatggaggttgccagacgaatcccggatgggcctggagcttcgggccccaggagcctggaaacggcccccaacgaagagcccataggggggtgctgggctgggccctatttcaggcccagccggcagggttgagggaacagcgaggccaaaggtgtcatagttcaggttcttggagaggcaggaaagccgggcaggggtccctgagggccgcagatactcatacagcccgtctgggcccccccgtgccaggaacacccactctccttgcagccgcctgtgggcaccgaagggtctctgagaccgtgggcgttgatccagacagtgcccacctggagcccatagcccagctccagcgcctgccccaggcctctcgctccacacactggcgctgcccccgcggggcgtcccgttggccaccaacagtgcctccttggctgtgcggaagggggaggccacgaccacaggccacggcacctccacctgggcacatggggaggctgggggcaggttggagaccaaggttgggggatagaatgggcgttccgaaggcacatcaccagcctggaacacctgtgcaccctggctctggacctcacgcacaaagcgctggaccaggtcacatgcggcagccccccgggcccccatgtccacggccccatccagccctcggccactcagaagccgccccatccgctcctgcagccgtctcatggcttcatcccacacagactcctgcctcgtgccgaaatcgccacccaggcctcgggcataaaaaattccgtcagggggtgcgcagtgagttt

SEQ ID NO: 262572 - DNA, 885 bp, Homo Sapiens
  misc_feature (809)..(809): n is a, c, g, or t
gaaatgtgcctctcgctcggatgttggtgcccaagctgatcatggccatgcagactctgatccccatagatgaggcaaaggcctgtgaggcccttgaggctttggatgaactgttggagtcagaggtgccggtcatcaccccctacctctctgaagtcctcacattctgcctggaggtagctagaaatgtggccctgggcaatgcgatacgcatacgtattctctgctgcctcactttcttggtcaaagtcaagagcaaggccttactgaacgaatcgtctcctgccacccttgctgcacacccttttccccattgtggctgctgagcccccaccaggccagttggatcccgaggaccaggattcagaagaggaagagttggagattgagctgatgggggagactcccaagcatttcgctgtacaagttgtggacatgctggcactacacctgccccccgagaagctctgtccccagctgatgcccatgttggaagaggctttgcggagcgagagcccataccagcgcaaagctggactcctggtgctggccgtgctgtctgacggagctggcgaccacatcaggcagagactgctgcccccactgctgcagattgtgtgcaagggcctggaggacccctcgcaagttgtacgcaatgctgcgctgtttgccctgggccagttctcagaaaacctacagccccatatcagcagctattcaagggaggtaatgccactgctcctcgcctacttgaagtcggtgcctcttggacacacacaccacctagccaaagcctgctatgccctggnagaattttgtggaggaacctatggcccaaaggggcaggccctacctttccggagcttatgggaatgcatggctgca

SEQ ID NO: 262573 - DNA, 954 bp, Homo Sapiens
tggtcggccggaattatgggatatcgtcgaccacggcgtcagggtactcgacttggtctgagacgatgatagacctgccttctggttgaagatgtggcgagtgaaaaaactgagcctcagcctgtcgccttcgccccagacgggaaaaccatctatgagaactcctctccgatgaacttacactggcagaccggtgccctcaccaactctggaaaaagatccccacgcttgctcctcgctgaccccatcactgtgcaagctggggctgcaggaaggcagcaaacaactacatctccaaatggatctcgtaaataacaagaggacagacttatcttcagaacatcttcagtcattcctcaaagtggctagaacacttgtcacgcatgaatcagatgagcagcctctagatccagatgccccaaattagctctactcctaaaaacgtctgaggcagcagtagacccactgggcaatctatatggttaaaaaacatcgtcctctgtaccatactccacaggggacagcaaacaacgacatgatatcagacggcccgttacagatacaacatggcagagcacacacagacatatcattcaacctggccctttgagacacagacgatctggtgagagaggaggggaacacctgcatggcagaacaggcttcgacacgaagctcggtcgctgttatctgcaggaaagctaatcttaacaaggcacatctccggacacatctcattagagcgaggcataccacaacataccgcatgatgaacacaactaccatggactccagacggacaagcctgtaagcagatccactagcacgtcgtggcatgaaaggcactcacaaacaacagaagagaaaagcacacacataggcaaccacaccacggaccagtggcatagcccaacaacaggaccgacaacagacataccgcgcaacacacggacc

SEQ ID NO: 262574 - DNA, 546 bp, Homo Sapiens
  misc_feature (360)..(360): n is a, c, g, or t
  misc_feature (410)..(410): n is a, c, g, or t
  misc_feature (425)..(425): n is a, c, g, or t
  misc_feature (435)..(435): n is a, c, g, or t
  misc_feature (456)..(456): n is a, c, g, or t
  misc_feature (473)..(473): n is a, c, g, or t
ggtgtcaggcatgtggacagaatatcttccacacttgagacaagtgcttgatcttctgtttcagactccttaggatgtgtgggaaacctcatttctctttcctccatagctccatgctctacaatttcctcctctgggtccacatgattgacacggaaatctgctgccaaggcagtttgaaggggaaagccagagaacagaggaaggcaagaaggcgttactttcagaaggtactaaggtcctcacggcacagcctcagttctactgctcaggctttccttgggagcaatgtaggttgttcaggaacaggggatttgggtggggagactccctctaaggagatgggggacgggaggattncctggaaaggataggggttttcttcaggatacaggcaggcaactttcttngaaaaccctgttctncccattgcanggggtgcccaccctccttttnttcaccagatcgtcttntttcttcaaagggtcccttttaaaggtattgctgttttgtcttctggccatggggattctaaacggggggctt

SEQ ID NO: 262575 - DNA, 1281 bp, Homo Sapiens
ttctgcctcctgggggcattgctggcccccatccgagtgcttctggcctttatcgtcctctttctcctctggccctttgcctggcttcaagtggccggtcttagtgaggagcagcttcaggagccaattacaggatggaggaagactgtgtgccacaacggggtgctaggcctgagccgcctgctgtttttcctgctgggcttcctccggattcgcgttcgtggccagcgagcctctcgccttcaagcccctgtccttgttgctgccccacactccactttctttgaccccattgttctgctgccctgtgacctgcccaaagttgtgtcccgagctgagaacctttccgttcctgtcattggagcccttcttcgattcaaccaagccatcctggtatcccggcatgacccggcttctcgacgcagagtggtggaggaggtccgaaggcgggccacctcaggaggcaagtggccgcaggtgctattctttcctgagggcacctgttccaacaagaaggctttgcttaagttcaaaccaggagccttcatcgcaggggtgcctgtgcagcctgtcctcatccgctaccccaacagtctggacaccaccagctgggccatggaggggtccctggagtactcaaagtcctctggctcacagcctctcagccctgcagcattgtggatgtggagttccttcctgtgtatcaccccagccctgaggagagcagggaccccaccctctatgccaacaatgttcagagggtcatggcacaggctctgggcattccagccaccgaatgtgagtttgtagggagcttacctgtgattgtggtgggccggctgaaggtggcgttggaaccacagctctgggaactgggaaaagtgcttcggaaggctgggctgtccgctggctatgtggacgctggggcagagccaggccggagtcgaatgatcagccaggaagagtttgccaggcaagctaccgctctctgatcctcagacggtggcctggtgcctttggctactttccgcaaggatacccaagggtttggtgggacttcccgagatagggggcccttgcactaaccaactctgggatggggggccaagaagcctggaaagaagctaactccgtctgggcccttttaagcttcctttgctgaaagaaaccaagcccaaaggggtcccccaacgcggccctggcatgataacaaaaaaagaaggggttttacagcaactaccaatctcttgtacacaacattggagggggagtgggggttat

SEQ ID NO: 262576 - DNA, 1196 bp, Homo Sapiens
  misc_feature (1016)..(1016): n is a, c, g, or t
  misc_feature (1045)..(1095): n is a, c, g, or t
gggactggagtcccagtccacccgccacgcccgagcagggcctgtccgccttctacctctcctactttgacatgctgtaccctgaggacagcagctgggcagccaaggcccctggggccagcagtcgggaggagccacctgaggagcctgagcagtgcccggtcattgacagccaagccccagcgggcagcctggacttggtgcccggcgggctgaccttggaggagcactcgctggagcaggtgcagtccatggtggtgggcgaagtgctcaaggacatcgagacggcctgcaagctgctcaacatcaccgcagatcccatggactggagccccagcaatgtgcagaagtggctcctgtggacagagcaccaataccggctgccccccatgggcaaggccttccaggagctggcgggcaaggagctgtgcgccatgtcggaggagcagttccgccagcgctcgcccctgggtggggatgtgctgcacgcccacctggacatctggaagtcagcggcctggatgaaagagcggacttcacctggggcgattcactactgtgcctcgaccagtgaggagagctggaccgacagcgaggtggactcatcatgctccgggcagcccatccacctgtggcagttcctcaaggagttgctactcaggccccacagctatggccgcttcattaggtggctcaacaaggagaagggcatcttcaaaattgaggactcagcccaggtggccccggctgtgggggcatccgcaagaaccgtcccgccatgaactacgacaagctgagccgctccatccgccagtattacaaaaaggccatcatcccggaacccagacatctcccagcgcctcgtctaccagttcgtgcaccccatctgagtgcctggcccagggcctgaaacccgccctcaggggcctctctcctgcctgccctgcctcagccaggccctgagatggggggaaaacgggcagtctgctctgctgctctgaccttccagagcccangggtcagggaggggcaaccaactgccccnnnnnnnnnnnnnnnnnnnnnnnnnnnnnnnnnnnnnnnnnnnnnnnnnnntgcttttctcctcaggcccagctgctcccctggaaggacagaaggaaaaccggggcttgctccccaaacacttggcctctggaccccagcattttccagag

SEQ ID NO: 262577 - DNA, 1484 bp, Homo Sapiens
  misc_feature (1255)..(1277): n is a, c, g, or t
gctgagacagaagtccacgtacacttcgtaccccaaggcggagcccatgccctcggcctcctcagcgccccccgccagcagcctgtactcttcacctgtgaactcgtcggcgcctctggctgaggacatcgaccctgagctcgcacggtatctcaaccggaactactgggagaagaagcaggaggaggctcgcaagagccccacgccatctgcgcccgtgcccctgacggagccggctgcacagcctggggaagggcacgcagcccccaccaacgtggtggagaaccccctcccggagacagactctcagcccattcctccctctggtggcccctttagtgagtccatcaacggcatgcacccgcagctgctggagctgctcaaccagctggacgagcgcaggctgtactatgaggggctgcaggacaagctggcacagatccgcgatgcccggggggcgctgagtgccctgcgcgaagagcaccgggagaagcttcgccgggcagccgaggaggcagagcgccagcgccagatccagctggcccagaagctggagataatgcggcagaagaagcaggagtacctggaggtgcagaggcagctggccatccagcgcctgcaggagcaggagaaggagcggcagatgcggctggagcagcagaagcagacggtccagatgcgcgcgcagatgcccgccttccccctgccctacgcccagctccaggccatgcccgcagccggaggtgtgctctaccagccctcgggaccagccagcttccccagcaccttcagccctgccgggctcggtggagggctccccaatgcacggcgtgtacatgagccagccggcccctgccgctggcccctaccccagcatgcccagcactgcggctgatcccagcatggtgagtgcctacatgtacccagcaggggccactggggcgcaggcggccccccaggcccaggccggacccaccgccagccccgcttactcatcctaccagcctactcccacagcgggctaccagaacgtggcctcccaggccccacagagcctcccggccatctctcagcctccgcagtccagcaccatgggctacatggggagccagtcagtctccatgggctaccagccttacaacatgcagaatctcatgaccacccctccaagccaggatgggtttctgccaccccagcagccctacatcgcgggggcagcagcccatgtaccagcagatggcaccctctggcgggnnnnnnnnnnnnnnnnnnnnnnngtgggcccaacaaccgcaggcaccggggccccccggcacagggcagccaaggcccacctcattttctttcaatggacccagggcatggctcaccgcccggaggaacccttacctaccgtttcacctgaaacgccctcctctctaaactggcggggtccctgcctccctggtccctcaacgggccgggagggccccctttcccgccca

SEQ ID NO: 262578 - DNA, 2194 bp, Homo Sapiens
  misc_feature (901)..(901): n is a, c, g, or t
  misc_feature (2126)..(2126): n is a, c, g, or t
  misc_feature (2172)..(2172): n is a, c, g, or t
aagcaggctggtaccggtccggaatttacgggatatcgtcgaccacgcgtcggctccaagcagactccttcatccaggatgagagactgcgcatctttgctctgttggctggaaaaccggtgtggcagctctcagaaaagaagcaaataaacgtgtgctcccagttggattggaaacgctccctggctatccatctttggtatttgcttccaccaacagcctccatttctagggcactcagcatgtatgaagaagcatttcagaatacctctgacagtgacagatatgcctgctccccacttccttcgtatctggagggttctggctgtgtgatagcggaggagcaaaactcacagacaccacttcgagatgtctgctttcaccttctaaaactctacagtgacagacattatgatctcaaccagctgctggagcctcgaagcataacagcagatcctttggactaccgcctaagctggcacttgtgggaagtgctgagggctcttaactacacccatctctcagcgcagtgtgaaggtgtgctacaggccagttacgctggccagcttgaaagtgaggggctctgggagtgggccatctttgtcctcctgcacattgacaactcaggcatacgtgagaaggctgttcgagagctgcttacccggcactgccagctgttggagacccctggaatcttgggctaaagaagactttccttacccagaagcttccgtgtacctgccaaatggatccacgaggccaaagctgtgcgagcacacatggaatctgacaagcacttagaggccctttgcttatttagggctgagcactggaaaccgctgccacaagctcatcatccgacacttagctttctggtggattgctcaggtaatgacctggnagcagttacacatcaaagtgacttcactgggcagtcgggatagagcagattcagtgttacagtgctaaagatcgcctggctcagtcagacatggccaaacgtgtagccaacctgctgcgcgtggtgctgagtctgcatcatcctcctgatagaacctccgactcaacaccagaccctcagcgagtccctttgcgcctcttggctccccacattggccggcttcccatgcctgaggactatgccatggacgaactgcgcagccttacccagtcctatctgcgagaactggctgttgggagcctgtgagccccaggcactttgcatcacagtcacatgcccattcacaccacacagaggttccctgccttgtttggattggcactgtttgccattctctgggttggctgtggcatctaccctccctccctgctgccagaagcagcatcctccacttgttcagggcttttcttaatactgaacgtagcataagggcttctggaacccagaagaggagacagtttaccatcctcaagatcattcagtgtttttcctttaaaaaaatggtcaataaagctcctttggcagaatcccccaaagaaccagggtattctttttccatccctagccattctggatcttgtgaccctccatgccaaccagcttccctactcctaccctggcccttttatactaggactccttaggaggagtgagacaggtgataatggatccttaacagatgaactatccacagaaggaagagggatccgtctcttaagtaattggttagttaacactgaattttggaggcaaaggagggttggcctgagttaggaaacaaaatgggatctttctgacacacttagggcagaagtgaatgcctgtcacggagggattgatcttcagggctgtttttgttcctgcctttagagttccatgaacaccatacctttgctactactatgtgcaggaacccttggtcacatgtgacatgtctgtgggaagctcccagagtttggtttggtccctggttttcagtcttgctgagactctgtctggatttgcctgcagagtttggataaaaaatggcaggttgggtaaccctccctgtttcatcccatgttagctccaaagcatttcccaccctccatcttaccccttccagaaggcaaaaacaaaccatggattgagggcagggcatggagtttggggctttagggggcangcagaggggcttttgcttacactgcttgacagctattagggggagnccccagggtaattggcctttag

SEQ ID NO: 262579 - DNA, 668 bp, Homo Sapiens
taacactgaattttggaggcaaaggagggttggcctgagttaggaaacaaaatgggatctttctgacacacttagggcagaagtgaatgcctgtcacggagggattgatcttcagggctgtttttgttcctgcctttagagttccatgaacaccatacctttgctactactatgtgcaggaacccttgggccacatgtgacatgtctgtgggaaactccccagagtttggtttggtcccctggttttcagtcttgcctgaaaactctgtctggatttgcctgcagagtttggataaaaaatggcaggttgggtaaccctccctgttcatcccatgttagctccaaagcatttcccaccctccatctaccccttccagaagcaaaaacaaaccatgactgaggcaggcatggagttgggcgttaggggcaggcagagggcctttgctacactgctgacagctatagggagccccaggtaatggcatgagatagctggtgttagggctatctcaggcaatatggccacacctgggtctttatgcatgaagataatgtaaaggtttttattaaaaaatatatatatgtataaataaatgatctagatattttcctctttttctgaagctactttcttaaaaaataaataaaatgtttatagcgattcctgg

SEQ ID NO: 262580 - DNA, 1571 bp, Homo Sapiens
  misc_feature (111)..(111): n is a, c, g, or t
  misc_feature (165)..(165): n is a, c, g, or t
  misc_feature (989)..(1003): n is a, c, g, or t
gcggctgcatggccagcatttggtccagcagctggtcctaagaacagtgaggggctacttagagacgccccagccagaaaaggcccttgctctgtcgttccacggctggtnctggcacaggcaagaaacttcgtggcacggatggctggtggagaacctgtatcngggaacgggctttgatgagtgactggtgtcaggatgttcatcgccacgttccactttcctcaccccaaatatgtggacctgtacaaggagcagctgatgagccagaaccgggagacgcagcagctctgccaccagaccctgttcatcttcaatgaaccgaagaagctgcacccagggctgcctggaggtccttgggccacacttagaacgccgggcccctgagggccacagggctgagtctccatggactatctttctgtttctcagtaatctcaggggcgatataatcaatgaggtggtcctaaagttgctcaaggctggatggtcccgggaagaaattacgatggaacacctggagccccacctccaggcggagattgtggagaccatagacaatggctttggccacagccgtcttgtgaaggaaaacctgattgactacttcatccccttcctgcctttggagtaccgtcacgtgaggctgtgtgcacgggatgccttcctgagccaggagctcctgtataaagaagagacactggatgaaatagcccagatgatggtgtatgtccccaaggaggaacaactcttttcttcccagggctgcaagtctatttcccagaggattaactacttcctgtcatgaaggctagaggaagacttcctggaactgcctttcttccactaacaggaccctgggacctgtaggagcaccccgtttgggactgtgaggtgtttgagggtgtggactggcatccagcagccactaacaaacacacaactggtgtgtaaaaggcaggccttacattagaagccaagccaatccnnnnnnnnnnnnnnnggaggtcccaccgagatagatagataggaacttggattgctgaattcaaaaacagagcccattcttaagatcacttggtgccttaaagacacgcattccaaagtggaatgtggttgaagaaagtgggccaggtggttgaagaaagccatgtgggagctcagcaaatcccaagggcttattatgacactccagatggtctccttagcatctcagctcttctgcaaggaagagcttgggtgttaggcctcagaggctgtagggtccttgggttacagagccggggagaacgaagttctgtgacccaggggtggagaatacactctaggtttgcaggctggtgggctttcaaattggtacttccagaggaaagccaagctgcttctgttgtgagcgaatcagccaagagcctgaggctgaagggaaaagtacacagaggaagatattttacaaaccaggtcagtgtaggccaagacttatggtctacagattttggcgggggaggggggaccttttcaaagacaatagggggtcttgacatgtttgttgtatgtaaagatgataagattaa

SEQ ID NO: 262581 - DNA, 276 bp, Homo Sapiens; identical to SEQ ID NO: 72659

SEQ ID NO: 262582 - DNA, 864 bp, Homo Sapiens
cccagtccgctgctgcccctccctttcaccttccgtccagcactaagggagtctggccacggcctaatataggagggcttgtgggaggagacacccaccccctctttctgcacctctcccctcttccatgccacccccaggccaggagccaccacagccctgtctgtgactctcagctcccgaggctgggctcttccccagggaagctgcatgaccatggccacatacaggaggagaccctaaaactccattggcctcatgtccagaactgaatcagccagtgcccgagcctgctgcaaccccgacccggcagagcaagcggctctgctacctcagccacgtagctgatggcatccttcaggttcagctcgtggaagacattcaggatccggtctcgagacttctgggccgaccgtctcatgaggaccctgctgaggaacttcctgtcgaagtgggaccacctgtagggacagaccttgggtgtgagcctcaggtgacaggcgccctagagcccgccggacgcgtggcccggccccttctctcctgaattttgtttgctatagtgaccctgtaggcgcgtttaaaatgagggaagcagcccctgccacacgcccaggccgtccgccgttctcccgcctgtcctgttggatggaggccgttagacgcatatgaaactgcatgccgcctcctccagagggtggctcaggacacgcctaacggaattagagtattcgctggttatccggatcggaaagggacggtggcctggccgggacttagaggaaactctggggcacaagggaggtgatgcctgtcacttgggacatgggtgcagccgccagaagccgcctcagggggcacagg

SEQ ID NO: 262583 - DNA, 838 bp, Homo Sapiens
  misc_feature (698)..(698): n is a, c, g, or t
ggagcaggagaagctgaacgtgtgggtggctctgctgaacctggagaacatgtacggctctcaggagtccctgaccaaggtctttgagcgagccgtgcagtacaacgagcctctcaaagtctttctccacctggctgacatctacgccaagtcagagaaattccaggaagctggtgaactctacaaccggatgctgaagcgtttccggcaggagaaagctgtgtggatcaaatacggcgccttccttctgcggaggagccaggctgcagccagtgcaccgcgtgcttgcagcgagccctggagtgcctgcctagcaaggagccatgtggatgtcattgccaagtttgcccagcttgagtttcagctgggtggatgcagagcgggccaaagccatttagtgagaacacgcgtgagcacctacccaaagcgcacagatgtctggtcggtcatatatcgacatgaccatcaagcacaggcagaccagaaggacgtccgggacatctttgagcgggtcattcatctgagcttggcccccaagagaatgaagttcttcttcaagcgctacctggactacgagaagcagcatggcactgagaaggatgtgcaggcagtcaaggccaaggccctggagtatgtggaggccaagagctcagtgctagaggactagtggcaggctggctctgtgggacactgtcaancaaagggccagccccgccccgcctcgagtgcctgggcactcggaaaactgttacctcaggactctatttaaatgctgctttttctgcagcacgcttggggaaatcctgtcaggatgaaaaggaagttgagattttttaaa

SEQ ID NO: 262584 - DNA, 648 bp, Homo Sapiens
tgagccaccatgcctggcctcttggaatatttaataagctaaaaaattcttatacacaggtagattaattaggtagccaggagtggcccctgaaagtatgtctggcaaaacctagaactgcatcctagccatcactgtaccttctgccctccctgctgtctcctctgccagttacagttaaaaggttgtgggtgaggacgcctgggcagagtcccaggcgtctgctgtcagctccccagcccggcctgcctgccgagccatctgggcgtccccacggtggagagtgtggtgcttgtgacgccgtggtgctggggagccatcctggtgggcagatgtgggctctcactggcaagtcagtgtaaagtccccagggactgttcagcaacacgtccctgctgcccctctctctgcaaaagccctggtaacctgcgtttggaaaaatctctaaggatttctgaggagctgtcaggccatgtccttgtccaccctgtgtggggcacggcttcgacatggctctgctcccgtcgtgggctgagaaagaccaggtggggctgtgcctttgggaaggaagccctcccgactgccttttgtgcgaaggtccctgtccatgctgtctccatcccgagccttaccgcgatgggtggccac

SEQ ID NO: 262585 - DNA, 619 bp, Homo Sapiens
  misc_feature (145)..(439): n is a, c, g, or t
  misc_feature (480)..(480): n is a, c, g, or t
  misc_feature (517)..(517): n is a, c, g, or t
  misc_feature (553)..(553): n is a, c, g, or t
tcccagtagtggcatacctgcattaaaaaataatgccttaccaaaaaaagcactctgaatgattggtttcaaaatgatgccacaacataggtggcaccaacactattcaagatcattccatgtcccatctctaaaaaaatttttnnnnnnnnnnnnnnnnnnnnnnnnnnnnnnnnnnnnnnnnnnnnnnnnnnnnnnnnnnnnnnnnnnnnnnnnnnnnnnnnnnnnnnnnnnnnnnnnnnnnnnnnnnnnnnnnnnnnnnnnnnnnnnnnnnnnnnnnnnnnnnnnnnnnnnnnnnnnnnnnnnnnnnnnnnnnnnnnnnnnnnnnnnnnnnnnnnnnnnnnnnnnnnnnnnnnnnnnnnnnnnnnnnnnnnnnnnnnnnnnnnnnnnnnnnnnnnnnnnnnnnnnnnnnnnnnnnnnnnnnnnnnnnnnnnnnnnnagacaaaagaactaaattattctactgcagaacatgattanggtaaatatctccaaagcagaaagacaggtttcatantttcggtagtttgaggtcagtccttccaaatcaaanctggttttttattagtatacagatgggtatagccagtaagttaatgggaagcagtctttttaagcc

SEQ ID NO: 262586 - DNA, 1408 bp, Homo Sapiens
  misc_feature (614)..(614): n is a, c, g, or t
  misc_feature (1243)..(1243): n is a, c, g, or t
cccccgacctgatgtgtctcagtcctgaccggaagatggaagtggaggagctcagccccctggccctaggtcgcttctctctgacccctgcagagggggatactgaggaagatgatggatttgtggacatcctagagagtgacttaaaggatgatgatgcagttcccccaggcatggagagtctcattagtgccccactggtcaagaccttggaaaaggaagaggaaaaggacctcgtcatgtacagcaagtgccagcggctcttccgctctccgtccatgccctgcagcgtgatccggcccatcctcaagaggctggagcggccccaggacagggacacgcccgtgcagaataagcggaggcggagcgtgacccctcctgaggagcagcaggaggctgaggaacctaaagcccgcgtcctccgctcaaaatcactgtgtcacgatgagatcgagaacctcctggacagtgaccaccgagagctgattggagattactctaaggccttcctcctacagacagtagacggaaagcaccaagacctcaagtacatctcaccagaaaacgatggtggccctattgacgggcaagttcagcaacatcgtgggataagntttggtgattgtagactgcagatacccctatgaatatgaaggcgggcacatcaagactgcggtgaacttgcccctggaacgcgacgccgagagcttcctactgaagagccccatcgcgccctgtagcctggacaagagagtcatcctcattttccactgtgaattctcatctgagcgtgggccccgcatgtgccgtttcatcagggaacgagaccgtgctgtcaacgactaccccagcctctactaccctgagatgtatatcctgaaaggcggctacaaggagttcttccctcagcacccgaacttctgtgaaccccagggactaccggccatgaaccacgaggcttcaaggatgagctaaagaccttccgctcaagactcgcagctgggctggggagcggagccggcgggagctctgtagccggctgcaggaccagtgaggggcctgcgccagtcctgctacctcccttgcctttcgaggcctgaagccagctgcctatgggcctgccgggctgagggcctgctggaggcctcaggtgctgtccatgggaaagatggtgtgggtgtcctgcctgtctggcccagccagattccccctgtgtcatcccatcattttccatatcctggtngcccccaacccctggaagagcccagtctgttgagttagttaaagtggggttaaataccagttaaaggccgtattctgtgtcctccaggagctcttggttcctggtaagggttaacctttattttctgggtctgaaagctcctgtgtggtgtcaccgaggggggga

SEQ ID NO: 262587 - DNA, 1258 bp, Homo Sapiens
gtggcgaattcggcacgagggtcctgcctgctgatagccatgagcatgccagtgggcgcctgggcatctccctgacccgcgtgtcagacggcgaaaatgtcattatatcccacttcaactccaaggacgagctcatccaggccaatgtctgcagcggtttcatccccgtgtactgtgggctcatccctccctccctccagggggtgcgctacgtggatggtggcatttcagacaacctgccactctatgagcttaagaacaccatcacagtgtcccccttctcgggcgagagtgacatctgtccgcaggacagctccaccaacatccacgagctgcgggtcaccaacaccagcatccagttcaacctgcgcaacctctaccgcctctccaaggccctcttcccgccggagcccctggtgctgcgagagatgtgcaagcagggataccgggatggcctgcgctttctgcagcggaacggcctcctgaaccggcccaaccccttgctggcgttgccccccgcccgcccccacggcccagaggacaaggaccaggcagtggagagcgcccaagcggaggattactcgcagctgcccggagaagatcacatcctggagcacctgcccgcccggctcaatgaggccctgctggaggcctgcgtggagcccacggacctgctgaccaccctctccaacatgctgcctgtgcgtctggccacggccatgatggtgccctacacgctgccgctggagagcgctctgtccttcaccatccgcttgctggagtggctgcccgacgttcccgaggacatccggtggatgaaggagcagacgggcagcatctgccagtacctggtgatgcgcgccaagaggaagctgggcaggcacctgccctccaggctgccggagcaggtggagctgcgccgcgtccagtcgctgccgtccgtgccgctgtcctgcgccgcctacagagaggcactgccccggctggatgcgcaacaacctcctcgctggggggaccccctggccaaaggggaggagtgccagcgccagctgctgctcggcctcttctgcaccaaggtggcccttcccgcccgaaactcggcgcatgcgcgccaccggcgaaccggttcccgcccccgcgggacccagaatcccccgcaggaccaaccggccggggccctgcccccttggtggacaccccctgtcttcccaggtcccggtcccgtgaacttgggcccctgggggtgttcaagaccccg

SEQ ID NO: 262588 - DNA, 1851 bp, Homo Sapiens
ccaaggtacgaggcctgggtggcgaattcggcacgaggctcattgatgaatttgacaagatgaatgaccaggacagaaccagcatccatgaggccatggagcaacagagcatctccatctcgaaggctggcatcgtcacctccctgcaggctcgctgcacggtcattgctgccgccaaccccataggagggcgctacgacccctcgctgactttctctgagaacgtggacctcacagagcccatcatctcacgctttgacatcctgtgtgtggtgagggacaccgtggacccagtccaggacgagatgctggcccgcttcgtggtgggcagccacgtcagacaccaccccagcaacaaggaggaggaggggctggccaatggcagcgctgctgagcccgccatgcccaacacgtatggcgtggagcccctgccccaggaggtcctgaagaagtacatcatctacgccaaggagagggtccacccgaagctcaaccagatggaccaggacaaggtggccaagatgtacagtgacctgaggaaagaatctatggcgacaggcagcatccccattacggtgcggcacatcgagtccatgatccgcatggcggaggcccacgcgcgcatccatctgcgggactatgtgatcgaagacgacgtcaacatggccatccgcgtgatgctggagagcttcatagacacacagaagttcagcgtcatgcgcagcatgcgcaagacttttgcccgctacctttcattccggcgtgacaacaatgagctgttgctcttcatactgaagcagttagtggcagagcaggtgacatatcagcgcaaccgctttggggcccagcaggacactattgaggtccctgagaaggacttggtggataaggctcgtcagatcaacatccacaacctctctgcattttatgacagtgagctcttcaggatgaacaagttcagccacgacctgaaaaggaaaatgatcctgcagcagttctgaggccctatgccatccataaggattccttgggattctggtttggggtggtcagtgccctctgtgctttatggacacaaaaccagagcacttgatgaactcggggtactagggtcagggcttatagcaggatgtctggctgcacctggcatgactgtttgtttctccaagcctgctttgtgcttctcacctttgggtgggatgccttgccagtgtgtcttacttggttgctgaacatcttgccacctccgagtgctttgtctccactcagtaccttggatcagagctgctgagttcaggatgcctgcgtgtggtttaggtgttagccttcttacatggatgtcaggagagctgctgccctcttggcgtgagttgcgtattcaggctgcttttgctgcctttggccagagagctggttgaagatgtttgtaatcgttttcagtctcctgcaggtttctgtgcccctgtggtggaagagggcacgacagtgccagcgcagcgttctgggctcctcagtcgcaggggtgggatgtgagtcatgcggattatccactcgccacagttatcagctgccattgctccctgtctgtttccccactctcttatttgtgcattcggtttggtttctgtagttttaatttttaataaagttgaataccatctccaaaaaaacacacaaaacactccaggcattcatggtcggggggcggaaaaaaaggtaatgaaatggccactgggccataacctgtttcctgacccacctttcttggacacaaggggaaaaacttgccccgacccccctaaagtgagtcctcataaatttccgaaaacccgaggctaaccccgctataat

SEQ ID NO: 262589 - DNA, 755 bp, Homo Sapiens; identical to SEQ ID NO: 174316

SEQ ID NO: 262590 - DNA, 821 bp, Homo Sapiens
  misc_feature (753)..(753): n is a, c, g, or t
  misc_feature (772)..(772): n is a, c, g, or t
  misc_feature (797)..(797): n is a, c, g, or t
gggggacaccgtggacccagtccaggacgagatgctggcccgcttcgtggtgggcagccacgtcagacaccaccccagcaacaaggaggaggaggggctggccaatggcagcgctgctgagcccgccatgcccaacacgtatggcgtggagcccctgccccaggaggtcctgaagaagtacatcatctacgccaaggagagggtccacccgaagctcaaccagatggaccaggacaaggtggccaagatgtacagtgacctgaggaaagaatctatggcgacaggcagcatccccattacggtgcggcacatcgagtccatgatccgcatggcggaggcccagcgcgcgcatccatctgcgggactatgtgatcgaagacgacgtcaacatggccatccgcgtgatgctggagagcttcatagacacacagaagttcagcgtcatgcgcagatcgaaaggacttttgcccgctacctttcattccggcgtgacaacaatgagctgttgctcttcatactgaagcagttagtggcagagcaggtgacatatcagcgcaaccgctttggggcccagcaggacactattgaggtccctgagaaggacttggtggataaggctcgtcagatgcaacatccacaacctctctggcattttatgacagtggagctctttcaggatggaacaagtttcagccacgaacctggaaaagggaaaatggatcctggcaggcagtttctggagggccctattgnccttcccttaagggtttcnttggggatttttgggttttggggtnggtcagtggccttttgtggttttt

SEQ ID NO: 262591 - DNA, 376 bp, Homo Sapiens
  misc_feature (26)..(26): n is a, c, g, or t
tccgtgtggtttaaggtgttagcccncctaacatggaatgtccaggaagaagctgcctgcccctcttggccgtgaagttgccgtattccaggcctgcttttgcctcctttggcccagagagctggttgaagatgtttgtaatcgttttcagtctcctgcaggtttctgtgccccctgtggtggaagagggcacgacagtgccagcgcagcgtttctgggctcctcagtcgcaggggtgggatgtgagtcatgcggattatccactcgccacagttatcagctgccattgctccctgtctgtttccccactctcttatttgtgcattcggtttggtttctgtagttttaatttttaataaagttgaataaaatataa

SEQ ID NO: 262592 - DNA, 442 bp, Homo Sapiens
  misc_feature (19)..(19): n is a, c, g, or t
acctcccgaatgcctttgnccccccaacctcagtacctgggaatcaaaagctgcctgaagttcaaggaatgccctgccgtgtggtttaggtgttagcccttccttaccatggatgtccaggagagctgcctgcccctcttggcgtgagttgccgtattcaggctgcttttgcctcctttggcccagagagctggttgaagatgtttgtaatcgttttcagtctcctgcaggtttctgtgcccctgtggtggaagaggcacgacagtgccagcgcagcgttctgggctcctcagtcgcaggggtgggatgtgagtcatgcggattatccactcgccacagttatcagctgccattgctccctgtctgtttccccactctcttatttgtgcattcggtttggtttctgtagttttaatttttaataaagttgaataaaatataa

SEQ ID NO: 262593 - DNA, 1260 bp, Homo Sapiens
  misc_feature (709)..(709): n is a, c, g, or t
  misc_feature (1179)..(1202): n is a, c, g, or t
aggctggaccggtccggattcccgggatcatggagctggctggaggggtccccctggaccagtgccagggcctaagccaggacctgcggaaccagatttgcttccagctcctgacgctgtgtctgcgggagctgtttgagttccgattcatgcagactgaccccaactgggccaacttcctgtatgatgcctccagccaccaggtgaccctgctggactttggtgcaagccgggagtttgggacagagttcacagaccattacatcgaggtggtgaaggctgcagctgatggagacagagactgtgtcctgcagaagtccagggacctcaaattcctcacaggctttgaaaccaaggcattctccgacgcccacgtggaggcagtgatgatcctgggggagcctttcgccacccagggcccttatgactttgggtcgggggaaacggcccgccgcatacaggacctcatcccggtgctgctgcggcaccggctgtgtcccccacccgaggagacctatgccctgcaccgcaagctggcaggggctttcctggcctgtgcccacctccgagcccacatcgcctgcagggacctcttccaggacacctaacaccgctactgggccagtcgccagccagacgcagccactgccggcagcctccccaccaaaggggactccctgggtggatccctcatgacagcctccatggngggattcagtccccagagcaggccgtacccggctgtagtgcctcttatcccttcccccgtctgccctgagtccacagaaccccccttggggcttccccagtcttgcctgggctctcctccctggcccaagagctcacgatccctggggctggggaactcccaacttcgtgccctagatcctgcacctccccactcgaaagtggggatccgaaaactaagccaggggaagcggttaacttatccttgccaaacatttgaggggagcccttggggccgctgcatggtcgttatgcagaatcggactcatcaggggggagcccttcacctcttgcttccaagcctcccgtgggaaggcggagatggtccctggagggcagatcttcaactttggccttccctcgcttcctccaaacagcctgaccttcctcccgggtgtccagccctcttccatggtgttttgcaaaggtaannnnnnnnnnnnnnnnnnnnnnnnaacctgaaattctttaaattggaaataagaaaagagccccttctcccttttaaaaaaa

SEQ ID NO: 262594 - DNA, 1504 bp, Homo Sapiens
cccagagccgttgccccaagaggaggagaagcttcccccacggaataccaacccagggatcaagtgtttctgacgtgcgctccctagagcgtgggtagagatgaccgaggaggagctggcccctggacgcagcagtgtggcagtcaacaattgcatccgtcagctctcttaccacaaaaacaacctgcatgaccccatgtctgggggctggggggaaggaaaggatctgctactgcagctggaggatgagacagctaaagctagtggagccacagagccaggcactgctgcacgcccaacccatcatcagcatccgcgtgtggggcgtcgggcgggacagtggaagggactttgcctacgtagctcgtgataagctgacccagatgctcaagtgccacgtgtttcgctgtgaggcacctgccaagaacatcgccaccagcctgcatgagatctgctctaagatcatggccgaacggcgtaatgcccgctgcttggtaaatggactctccctggaccactctaaacttgtggatgtccctttccaagtggaattcccagcgcctaagaatgagttggtccagaagttccaagtctattacctggggaatgtacctgttgctaaacctgttggggtagatgtgattaatggggccctcgagtcagtcctgtcctccagcagccgtgaacaatggaccccaagtcatgtcagtgtggcccctgctaccctcaccatcttgcaccagcagacagaggcagtgctgggagagtgtcgggtgcgtttcctctccttcctggccgtgggcagagatgtccacacgtttgcattcatcatggctgccggcccagcctccttctgctgccacatgttctggtgcgagcccaatgctgccagcctctcagaggctgtgcaggctgcgtgcatgcttcgctaccagaagtgtctggatgcccgttcccaggcctccacctcctgcctcccagcaccccctgctgagtctgtggcacggcgtgtagggtggactgtccgcaggggtgttcagtcgctgtggggctccctgaagcccaaacggctgggggcccataccccatgaagaagcccccaccttccctccacctgcttgtgttgggccccagggaactaaagggtgtgggtcagggaggggtctagaggctattcctaggcctcaggcctcccaaatatgcccctccccagtagctacggttccctgcctaggagctggggagggagagatctaatcccttcaaggaagtgataacactggagtggtaacaagaggagcaggaagcaaggccagccctggttctccatccccatgtgtttcaggtggaacaggaggaactggtccaggccaggcctcatcctcctggacccagcaggggcagaaggaggaagggactggtccaggcatgggtcccttccccctgctccatgggcacctctgctgtattgatatcactaataaagcccgtctgcactgcaaaa

SEQ ID NO: 262595 - DNA, 981 bp, Homo Sapiens
ccacaagaaaagctggggtatcgcgttaagcttgggccccctctggggggattttctaagagccgcgcgcccccgggggggataggagttaatgtacatcactttgtgtggttaccaaaaggggtctttatttgaaaaaaacccaaaggggcccctggggccaacaggacaggcaggccggcttctcaggggtcaggggcatttgggcagatgcgcttgagtgggggggcaccctccgagtcctctgtgtcaccctgggctgcctcagggacaggtggcactggctcaaagacagggtaagcttcgggggcctcagcttccagcagttctggaacaggctcctccttggtcagcattgggggttcgtcggtgctgccacgcagttatgccccccgggatctctctctgggcccagccggtgggggctgagcctcctcaggggaccccttctgggggttccggcaggtgacacagggcggctgggctggggggtgccccccaggactgggctctgtgcccttttgcagggaaccttccgaatggaaactctggttgctgttctcatcattaagatccagcaggatgagagggccaccccctcggggactggcgcccctgccccgacgttcccggccacgggatctctctgccccgccacctgcccgccttcgctcctcctcctggggatccaccactggcacccacttgaagatacgaagggaagtgtcgcccacagtcacccatcgcttctaccatctccggaccttctcgatggtcgccatcaccttcttgatgtcatccttggcccggctccgggtctcggcccgtacagtccggccggccatgctggcggggctggggccggggccgagcccgcggcgggaccgcctcccgtccggcgggctcaggctccgcgccaggcccgggcgccgcgctctcggcctgccgtcccccctggagttggccgcgccctctctcccc

SEQ ID NO: 262596 - DNA, 1241 bp, Homo Sapiens
tcccccggctgggctgccgccggaaggcgcattactggatccccctcgaggtgccacagcacaaaaggagggccagcgagaggccagccaggcggaggtcatagtcctcatccacattcaaggagaaggtggatccgagtcggcatagccgggcacccgcacaggcttcagggctgccgtgatgccctcatggctgagccacacctccagtctttgtgagcggctcacgtagtagatgatgctcttgacatagtaggtgatgaggatcttgcggaggtcgaaaccctgcagcatggaggcagcattattgtcactaatgctatagccctccagcacgtacttgctggctgttacctcccaagccagccagcgctgcccaaaggcagcattgaaggacaggacccgtggcaggtggccaggttcacagcagcaacagccctcgtcctcctccacaccctcggtgatagcctccacctcgcgctgctggcagtaagtgccccggaactcaaggccacgcagctggaaggtgacgaggccattgccaacctcgatgaggtgcaccagggcgttgaggtagtcagaggccaggacgaagcagtcaccagggccatagttgccccagcggcccagcaccaggtccccacacagtgtgtgctgcagcgaacgtgtcaagtgctcatagaagatggagttgaggttgttgtcatcagcgccagggttcctgtccagctgtgtgaccaggcgggtgttggaatgatccacacgtttagtgttgtagtcgcgctcccagaacttgaggggccgagcgtaggacatgatgaagacggcactgcctagcagtgggttgagaggcgtggagaagagccccgagagcagggcctggacgaacagcatggccgagtgtggcacggcaaacggctgggcaaaagcgtggaaagccgagccccaggtgatctgccagggcgcgatgtaggtcagcacgaaacgcagcttgtacagcaagtcccacagcttgctgcaaagcagggacatgaggaagtagtcaagcagaaagccctgggagaggcgcgggtagtcaaagtggaagagcaggacggtgaaggccaacgtcaggtactgctgtggggggcagcagaaggctgagcgcacgagcttcagcccagccacggtcatcagcagcgcccggcagtagaagcagtacttgtccgggtggctgacgactgtgtgggcgtccaccgtga

SEQ ID NO: 262597 - DNA, 1134 bp, Homo Sapiens
gtcatttaaatacaaatatacttacaaaaatcttacacaggctatttacaatcataaaagcgaacagtcctggtaccagagtgtgagggcaagaggtctgtccatcctccctctggcagtcgggccctcgtgtccttttgcctcagggacggaagcttttgcaggagctgagttgttcaaaggagcctgcgaaaagagagttgtctagtgaggaaacctcgagatgtcaggattggcacgaactccacggcgctggctttgggggatcgctgcgccccggccgaggcctgggcatgggctgagccccgggtctcagactgtagtctccccttgtttgctgttggtgagcctcgtgtagaacttcctccagggagttgagggtcttgccggaccagatccagaagcccgacgtgatgcccacgatcagcgtcataaggtacttaatcatgaagaccgtgaagtccgggctcatgggcgggtgcggcggggcgcctccgcccgcctggaggtgagggcaggggatagcgtagctcttgcagctctgggccacccagctgcgttcccactggtcccggaaggcctgctcgtagaagtagcaggcgatgacgatggtggctggcacagtgtacagcacgctgaagacgccaatgcgcaccatgagcttctccagcttctcggtcttggtgccatcgtgcttcatgatggtgcggatgcggaagagcgacacaaagccggccagcagaaaggacgtgccgataaacaggtacacgaagagcggcgccagcacgaagccacgcagcgcgtccacgctgttaagccccacgaagcacacgccgctcagcacatcgccgtccacctggcccagcgccaggatggtgatggtcttgacggccggcacagcccaggcggccaggtggaagtactgagagttggcctcgatggcctcgtggccccacttcatgccggccgccaggaaccaggtgagcgacaggatgacccaccagatggagctggccatgctgaagaagtagagcatcatgaagaggatggtgcagccctccttcttggtgccctgcaccaccgtgcggtaaccgtcctcgcctcgtgccgaattcgccacccaggcctcgctac

SEQ ID NO: 262598 - DNA, 569 bp, Homo Sapiens
  misc_feature (124)..(124): n is a, c, g, or t
  misc_feature (421)..(421): n is a, c, g, or t
  misc_feature (504)..(504): n is a, c, g, or t
atagaccataacatatttatgtagaactgcttgtgtttagcttggaaagagataggaggggggaggcccgccttgagctgtctggtgatcagctctggtcatcccagaggctcagctgagcggngtggttttggaccaacgcaaagcaataagctataagggtggggtgtgtggggacaggggtcagcttgtcatccctgggaagtgggcaggcatggggaagggcagctcacacagcctgtcaaggatgggtccttccatgcatggagtgtcacagcctgcagcggaaggggaattaggacagggtgcaacacggagggaagctttgcactgtctggggagggccaccaggaaggacatgaggtctccccctgtcagctgctgtccggccacaagggagcccccaataaatagggtaccnaagaccatgcagttgaaggcgatgttggaaagcccttggaacaagcgatgccgcggcccagctcctctgcccggcagcgcagnttccagctctgccccatagcgctcctcttcccgttgctccatggcgaaggctcgcacagctccga

SEQ ID NO: 262599 - DNA, 1293 bp, Homo Sapiens
  misc_feature (1157)..(1157): n is a, c, g, or t
aggttgccgtccggttgtttgaccaggagagttgtataaggtcactggagggttctgggaaaccaccggtggccactccttctggaccccactctaacagaacccccagcctccaggaggtgaagattcaacgcatcggtatcctgcaacagctgttgagacaggaagtagaggggctggtagggggccagtgtgtccctcttaatggaggctcttctctggatatggttgaacttcagcccctgctgactgagatttctagaactctgaatgccacagagcataactctgggacttcccaccttcctggactgttaaaacactcagggctgccaaagccctgtcttccagaggagtgcggggaaccacagccctgccctccggcagagcctgggcccccagaggccttctgtaggagtgagcctgagataccagagccctccctccaggaacagcttgaagtaccagagccctaccctccagcagaacccaggcccctagagtcctgctgtaggagtgagcctgagataccggagtcctctcgccaggaacagcttgaggtacctgagccctgccctccagcagaacccaggcccctagagtcctactgtaggattgagcctgagataccggagtcctctcgccaggaacagcttgaggtacctgagccctgccctccagcagaacccgggccccttcagcccagcacccaggggcagtctggacccccagggccctgccctaaggtagagctgggggcatcagagccctgcaccctggaacatagaagtctagagtccagtctaccaccctgctgcagtcagtgggctccagcaaccaccagcctgatcttctcttcccaacacccgctttgtgccagcccccctatctgctcactccagtctttgagacccccagcaaggccaggcaggccttcagcaaatctggcccccttcgaaaccctagccctgagggagcgccttcaaatcgtgtttaaccgccatccactgcttccacgaggctcgtctggacgatgagtgtgccttttacaccagccgagcccctccctcaggccccacccgggtctgcaccaaccctgtggctacattactcgaatggcaggatgccctgtgtttcattccagttggttctgcatncccccagggctctccatgatgagacaaccactcctgccctgccgtacttcttccttttagcccttatttattgtcggtctgcccatgggactgggagccgcccacttttgtcctcaataaagtttctaaagtaaaa

SEQ ID NO: 262600 - DNA, 721 bp, Homo Sapiens
  misc_feature (264)..(264): n is a, c, g, or t
gactgcatagggctcggtggttgctggagcccactgactgcagcagggtggtagactggactctagacttctatgttccagggtgcagggctctgatgcccccagctctaccctagggcagggctgggggtccagactgcccctgggtgctgggctgaaggggcccgggttctgctggagggcagggctcaggtacctcaagctgttcctgccgagaggactccggtatctcagcctcaatcctacagtagaactctaagggcnctgggttctgctggaagggcagggatcaggtacctcaagctgttcctggcgagaggactccggtatctcaggctcactcctacagcaggactctaggggcctgggttctgcaatctggcccctcgaaccctaagccctgagggagcgcctcaaatcgtgtttaaccgccatccactgcttccacgaggctcgtctggacgatgagtgtgccttttacaccagccgagcccctccctcaggccccacccgggtctgcaccaaccctgtggctacattactcgaatggcaggatgccctgtgtttcattccagttggttctgctgccccccagggctctccatgatgagacaaccactcctgccctgccgtacttcttccttttagcccttatttattgtcggtctgcccatgggactgggagccgcccacttttgtcctcaataaagtttctaaagta

SEQ ID NO: 262601 - DNA, 628 bp, Homo Sapiens
  misc_feature (18)..(18): n is a, c, g, or t
  misc_feature (25)..(25): n is a, c, g, or t
  misc_feature (37)..(37): n is a, c, g, or t
  misc_feature (181)..(181): n is a, c, g, or t
  misc_feature (199)..(199): n is a, c, g, or t
  misc_feature (287)..(287): n is a, c, g, or t
atctcattcgcaggggcntaaattncaaccatatccngagaagagcctccattaagggggacacactggcccccttaccagcccctctacctcctgtctcaacagcttgttccaggattacccgatccgctgtggtgggaagagagcacccccagtgtgacatcaagatgtgcgttcagtngtctacccacactgtccntatttcctgatcccccatctcttttccctctttccttcagcccagtcactgttcaatagacatcaaagctgttggccacacagactcnacttgaatcttcacctcctggaggctgggggttctgttagagtggggtccagaaggagtggccaccggtggtttcccagaaccctccagtgaccttatacaactctcctggtcaaacaaccggacggcaacctgctcctgtcaccaaggaacaaggcacacaagcaagccaggctggggcaggagaaagaccagcctgagtcccaccctcatgaggaatggattgaagcccctaactgagaggccctagatgtacattaggaggggcagcagagaagcagtgagagttaggcagcttttccagagagcactttctaatttttaaaattttagtggagacga

SEQ ID NO: 262602 - DNA, 395 bp, Homo Sapiens
ggaagtctaggaccccagacctccctctaaattttccatgcccctcaggcctcagcaatctggcccctcgaaccctagccctgagggagcgcctcaaatcgtgtttaaccgccatccactgcttccacgaggctcgtctggacgatgagtgtgccttttacaccagccgagcccctccctcaggccccacccgggtctgcaccaaccctgtggctacattactcgaatggcaggatgccctgtgtttcattccagttggttctgctgccccccagggctctccatgatgagacaaccactcctgccctgccgtacttcttccttttagcccttatttattgtcggtctgcccatgggactgggagccgcccacttttgtcctcaataaagtttct

SEQ ID NO: 262603 - DNA, 911 bp, Homo Sapiens
  misc_feature (848)..(848): n is a, c, g, or t
  misc_feature (850)..(850): n is a, c, g, or t
ggaacattgaagtttatttggatatcaaggtcccagaacaaggaagtcacttttcagtggatccaaagaatctactccttaaacctggagaagaacatgaggttattgtttcatttactccaaaggatcctgaagcctgcgaggaaaggatcttgaaaatatttgtgcagccatttggacctcagtatgaggtagtgttaaaaggcgaagtcatttcttcaggaagtaaacctctgtcacctggaccttgcttagatattccatcgattttgtccaacaaacaatttctggcttggggaggagtccctctaggtagaacacagcttcagaaactagctttaagaaataattctgcatctacaactcaacatttacgactgcttattagaggacaagatcaggactgctttcagcttcagaacacttttggttcagaacagcgattgaccagtaactgtgagatcagaattcacccaaaggaagacattttcatctctgtattatttgcacctactcgattatcttgcatgttggctagactagaaatcaaacaacttggaaatcgatcacaaccaggcattaagttcacaatacctttgtctggatatggaggaacaagcaatcttattttggaaggcgttaaaaaattatctgacagttacatggtaacagtgaatggcttagtacctggcaaagaaagtaaaattgtttttttctgtccgcaacactggctcccgagcagcttttgttaaagcagtaggttttaaggattctcagaaaaaagttttgctgggatctaaagttattgaagattttttccagataaatttgtactcaaggaaagaacncnaagaaaatgttactttaatatataaatccatcagaacagaggaaatcaataataaaactgc

SEQ ID NO: 262604 - DNA, 859 bp, Homo Sapiens
ggggaagtgaatctagctctgaaggcatggcgcgtaccaagcagactgctcgcaagtccaccggcggcaaggctccacgcaagcagctggccaccaaggcggctcggaagagcgctccggccaccggcggtgtcaagaagccccatcgctatcggcctggtacagtggctctccgcgagattcgccgctaccagaagtccaccgagctgctgatcagaaagctgccttttcagcgtctggtgcgtgagatcgcgcaggacttcaagaccgacttgcgcttccagagctccgcggtgatggcgctgcaagaggcatgcgaggcctacctggtggggctctttgaggacaccaacctgtgcgccatccacgccaagcgggtgactatcatgcccaaggacatccagctcgcacgtcgtatccgcggcgagagggcttgagtctcaaggactcactgattacataccccaaaggctcttttcagagccacccacatgcgcgctgaaaagatctggtttccccccagaatttcttcccgggtacttggtttggccctggaataaataagggccccatttccccgacctttaatacatcctggttcccgaagaaattcacccttattcccttttttgaaaggctaaattttgggggaagtctttaacatcccaaataaatgggccggggaatttttttcccctaaaagccattttgaaggggtaaacccaaaaaagggtccccttccggggaaattggggttctccccaatttttccggaaagaccccgggtttttttaaccccgaaaaggggggcccttcccaaaaatttttccgggggaaaaccctgggaaacctttggggg

SEQ ID NO: 262605 - DNA, 1363 bp, Homo Sapiens
  misc_feature (1128)..(1128): n is a, c, g, or t
  misc_feature (1155)..(1155): n is a, c, g, or t
acccagatcctcatgcagcagaccctccgcaccgtggccttcttatgtgaaacatgtgtgtttgcatttcttggcctgtccatttttagttttcctcacaagtttgaaatttcctttgtcatctggtgcatagtgcttgtactatttggcagagcggtaaacattttccctctttcctacctcctgaatttcttccgggatcataaaatcacaccgaagatgatgttcatcatgtggtttagtggcctgcggggagccatcccctatgccctgagcctacacctggacctggagcccatggagaagcggcagctcatcggcaccaccaccatcgtcatcgtgctcttcaccatcctgctgctgggcggcagcaccatgcccctcattcgcctcatggacatcgaggacgccaaggcacaccgcaggaacaagaaggacgtcaacctcagcaagactgagaagatgggcaacactgtggagtcggagcacctgtcggagctcacggaggaggagtacgaggcccactacatcaggcggcaggaccttaagggcttcgtgtggctggacgccaagtacctgaaccccttcttcactcggaggctgacgcaggaggacctgcaccacgggcgcatccagatgaaaactctcaccaacaagtgggtacgaggaagtacgccagggcccctccggctccgaggacgacgagcaggagctgctctgacgccaggtgccaagggcttcaggcaggcaaggcccaggatgggcgttttgctgcgcacagacactcagcaggggcctccgcagagatgcgtgcatccagcagccccttcaaggacataagagggccggggcgaggtactggctgcagagtcgccttagtccagaacctgacaggcctctggagccaggcgacttcttgggaaactgtcatctcccgactcctccctgagccagcctccgctcagtgtggctcctcagcccacagaggggagggagcatggggccaggtgccagtcatctgtgaagctagggcgcctacccccccacccggaggacccctgcggccccctgcctagaggagcaccatctacaggtgtgccattccccagccactgccttcatgctgcnccccgccggactggcagagccaggggnccacccccctgccctttgagtcatcaagatgccctctgcagccacaaattctgaccctaagtgggcagggccccagaaaatcctggaaaaccctcccggctggcctttttgggaatacttcccgggggctcccctcagaggagaaaccggaaggtggacctttttggtcccttttaccctggattgggcccccttccgcaagtcctaa

SEQ ID NO: 262606 - DNA, 1077 bp, Homo Sapiens
  misc_feature (972)..(972): n is a, c, g, or t
  misc_feature (996)..(996): n is a, c, g, or t
  misc_feature (1020)..(1020): n is a, c, g, or t
  misc_feature (1046)..(1046): n is a, c, g, or t
cccgagccctccgggcaaacgttctcctgcggcaacctagtccgtcgacccacgcgtccgtggtctgctacctgctgcaagtcaaggacagacacaatgggaatatccttttggacgcagaaggccacatcatccacatcgactttggcttcatcctctccagctcaccccgaaatctgggctttgagacgtcagcctttaagctgaccacagagtttgtggatgtgatgggcggcctggatggcgacatgttcaactactataagatgctgatgctgcaagggctgattgccgctcggaaacacatggacaaggtggtgcagatcgtggagatcatgcagcaaggttctcagcttccttgcttccatggctccagcaccattcgaaacctcaaagagaggttccacatgagcatgactgaggagcagctgcagctgctggtggagcagatggtggatggcagtatgcggtctatcaccaccaaactctatgacggcttccagtacctcaccaacggcatcatgtgacacgctcctcagcccaggagtggtggggggtccagggcaccctccctagagggcccttgtctgagaaaccccaaaccaggaaaccccacctacccaaccatccacccaagggaaatggaaggcaagaaacacgaaggatcatgtggtaactgcgagagcttgctgaggggtgggagagccagctgtggggtccagacttgttggggcttccctgccctcctggtctgtgtcagtattaccaccagactgactccaggactcactgccctccagaaaacagaggtgacaaatgtgagggacactggggcctttcttctccttgtaggggtctctcagaggttctttccacaggccatcctcttattccgttctgggggcccagggaagtgggggaaggagtaggttctcggtactttagggatttgatccctgtgggttgggccantggcattggcttgcttgccccagntcttaccccttcccaggggacctnaccccttcccaggggacccgaccctngggcccaagtttccctttgttgggcggggcg

SEQ ID NO: 262607 - DNA, 1082 bp, Homo Sapiens
  misc_feature (52)..(52): n is a, c, g, or t
ttataaaagggtatctacaactcaaactgtcactaaaaatatgttatagaancttgtgggatggtttactcctaaaagggagagacagtcagtgcattgattggcctttacagagtgtcagtgagcggatcacattcacagccatctagtgtcacctcctgcttgccaaagaatgaggtttctttcttgaagaggctgggagaagtttagtgtcctgtggttgcctccagatctagtaatactgcttcccaagccaactggtccattcctgagttcacaggcgctacgttcaaagctgccgccaaacaaccgaatgggtttggcaccatccggtgttcaacttgcccttggccgatgcagcaccccgtccagtggtaaaccgaccgacccttagacacagttcagtcaggatgcccctgcgagagggctagaaatttagaaaccgttcgcgctctgttcctttgtatcgctcttcagtggcacaacttttggctttatttactgatggccctatgtaactgagtaagacagggagaaatattaatccgtgagtggctcccagtaagaccatggccaaatacatcctgaagtagaatatctggaaaatttgagatttggcaaaagccaacaccacaatccctccaaattttgtaagtgtgattccactgaacacggagctgcccatgtgggcaagtgcctcttccgcgcgctccacgcggctgcctttcatgctcaccgtgaacgctctggttatgtcgctgcagaactccacggagatgccacagctcatcaccaggttgaccaaggatacagcgttcagactgatgccccagagccacataactccaaacatgttgaccaagaccatggcgatggtggcacacatgatgactgcagaccagagctcacagcccaggaggaccatggtcaccagaaatatcgcgcccagggacacaccgaggttgaagatagtgtcgtcaatgatggtcaggtactgttcgtagaagaccggacgcgtggtcgacatatcccaggattccgaccgtaccagcctgcttttagtcgggtgttaaccaaatccc

SEQ ID NO: 262608 - DNA, 1362 bp, Homo Sapiens
  misc_feature (236)..(254): n is a, c, g, or t
  misc_feature (344)..(426): n is a, c, g, or t
  misc_feature (1194)..(1255): n is a, c, g, or t
agaaagggctcccccccaaggggcaaaaacaggaaaggccggtgttttttaggggggtggggcttagggaggtggacccccatttgggctgttggaaagaagttaccccttatagcccttcccaaggcattttaaattttcttttggaaaggagttgcctccatagccacccccacggccatagccgcctctgtaaggtccactattactgcgaccgccccagctactgcctccannnnnnnnnnnnnnnnnnntcttcatgggcccataggaggactgatgctggctgtagctgccgaagccgccgaagccgttaccgtagtcgctcccaccgtaggacgaannnnnnnnnnnnnnnnnnnnnnnnnnnnnnnnnnnnnnnnnnnnnnnnnnnnnnnnnnnnnnnnnnnnnnnnnnnnnnnnnnngcccttggaaaggccgttctggtctcgaccaccgccgcgcccccagccgcctcggccgccccgggaggatcgggagccgcctccacccccaccggagtagatatcctccttggggactgctttcttcacctccacgcgatggccctgaatcggatggaacttgaccaccgcggccttgtctgccgcgtcgtgattctggaaatacacgaagccgaatccacgcttcttgccggactgcttgtcggcaataatctcggccttttccacggtgccaaactgcgagaagtgctcgatcaggtcgccctcagccacgtctcctttaaggcctccgacaaagagcttcttaaccttggcgtgggcaccgggccgcgccgaatccttcccgggacaccgcccgcttcagctccacagtgttgccgtccacggcatggggcgaggcggccatggcggcgtccgcctcctccacattggagtaggtcacgaagccaaagcaacgggagcgcttggtctggggattcaccaccaccacgcagtccgtcagagtcccaaaggcctcaaagtggccgcgcaggcccgactcactcgtctgcacattgaggccgccgatgaacagcttacacaactgagaattctccatctccaaggcccgggccttgcccccgccctgcgagctccgaggtttcgccgtcgccgccgttatcgttggttaaggcctctacacagcttgggcccagccgttgctggagccacccccgccgctcaccgacnnnnnnnnnnnnnnnnnnnnnnnnnnnnnnnnnnnnnnnnnnnnnnnnnnnnnnnnnnnnnncggtgccggctaaagggcgagccgaggagactggaagacaaccaaggccaccgctaccgccgccgccgccaccctcgtgccgaattcgccacccaggcctcgctctt

SEQ ID NO: 262609 - DNA, 1000 bp, Homo Sapiens
ggagcgaggcctgggtggcgaattcggcacgagggacggaaccggctcgcgagcgcagctatggctgctggcgtaccctgtgcgttagtcaccagctgctcctccgtcttctcaggagaccagctggtccaacatatccttggaacagaagatcttattgtggaagtgacttccaatgatgctgtgagattttatccctggaccattgataataaatactattcagcagacatcaatctatgtgtggtgccaaacaaatttcttgttactgcagagattgcagaatctgtccaagcatttgtggtttactttgacagcacacaaaaatcgggccttgatagtgtctcctcatggcttccactggcaaaagcatggttacctgaggtgatgatcttggtctgcgatagagtgtctgaagatggtataaaccgacaaaaagctcaagaatggtgcctcaaacatggctttgaattggtagaacttagtccagaggagttgcctgaggaggatgatgacttcccagaatctacaggagtaaagcgaattgtccaagccctgaatgccaatgtgtggtccaatgtagtgatgaagaatgataggaaccaaggctttagccttctcaactcattgactggaacaaaccatagcattgggtcagcagatccctgtcacccagagcaaccccatttgccagcagcagatagtactgaatccctctctgatcatcggggtggtgcatctaacacaacagatgcccaggttgatagcattgtggatcccatggttagatctggatattcaagaattagccagtcttaccactggaaggaggagatgtggaaaaattttgaaagactccttttcaaagttaaaggaaatgaaaagacaaggctgcgacgcttcctcatgaagcaaagaaaagtgcatggcaaaaaaagtgggcacaagcattctgggatggcaatccggggggagaacaaaaatgaaaattggagggccc

SEQ ID NO: 262610 - DNA, 358 bp, Homo Sapiens
ccgcttgctaaattatcctgaagaggtggactgtgtaggtttgataaagggagacccagcagcatctttgcccatcatcagctattcttttacctcatactcaccttatgtaacagaacttataatggaatccaatgtagagctcatagcaaaaaatcacttgcgctttatagatgctgtctataagcttcttcgtgatcaatttaattataaaccaattttgacaaaaaagcagtttacccaatgtgggtttgcagaatggaaaatccaaattgtttgtgatattttgaattgtgtgatgaaaaagcacaaggaattaagcagtcttcagaagattccatcacaacaaagaaagaaa

SEQ ID NO: 262611 - DNA, 337 bp, Homo Sapiens
gaagttgcatttttaggccacattgggaaagttgcacaggagtctgatgaacaaacttcgtgaaacatctccgtaccatgccagtactatacagagaaacccagtcaaccattataccataggttgaggtatttagtacctgaaagtcaacccagtgctccctttgcttattatttgtctataaaaatataaaacccggcatctttacaaaacctgaaattattgtcaataaactatataggaataaaaattttgtgaaaagggaataaaataggaggaaaagattgacaaagggtcagctgtcagcaaattatttaatggtgaaatttttccctaa

SEQ ID NO: 262612 - DNA, 621 bp, Homo Sapiens
  misc_feature (273)..(395): n is a, c, g, or t
accagtggatctgaaatttattattgcttataaaacacatttgatggaataggagtactggtttttcataatggttaaaaatgaaaccagctgtggatttcaaaacacagtgtattctagatcatctaagatccatgctgatttttattgcacaagaattaggtttgaactcttgagctggaacctcagcaaactagagtatatattgttcagtatttctttggaaacatttcattaatgtacttgtcttacagaaatttctgaactttagtnnnnnnnnnnnnnnnnnnnnnnnnnnnnnnnnnnnnnnnnnnnnnnnnnnnnnnnnnnnnnnnnnnnnnnnnnnnnnnnnnnnnnnnnnnnnnnnnnnnnnnnnnnnnnnnnnnnnnnnnnnnctttctcattcgacacaagatcccaagaaagaaatggaactagctactatgtgttcccagggaccacctgataaagtatgcatgcttgatttcctaccatataaaaaccccggggagaaaccgggcgcctatgaacctaaccaaaagaacccccgatgatttaactggttctatcaagcggatccataacgagctcggattcaattgggccccgcgcatgccactc

SEQ ID NO: 262613 - DNA, 352 bp, Homo Sapiens
cttcaggtgctgatgtaacatcagcaaatgcaaagtatagatatcaaaaaacgaggaggatttgatgctacagatgatgcttgtatggagcttcgtttgagcaatcccagtctagtgaagaaactgtcaagcacctcagtgtatgatttgacaccaggagaaaaaatgaagatactccatgctctctgtggaaagctactgaccctagtttcaactagggattttattgaagattatgttgatatattacgacaggcaaagcaggagttccgggaattaaaagcagaacaacatcgaaaagagagggaagaagcagctgccagaattcgtaaaaggaaggaagaaaaactta

SEQ ID NO: 262614 - DNA, 281 bp, Homo Sapiens
  misc_feature (69)..(69): n is a, c, g, or t
  misc_feature (81)..(81): n is a, c, g, or t
aagaagaaaagcccgacacagctgccctcccgcgaagacctgtaatgtgccggacttaaccctttaaantattcagaaagnatgtcccgtggaaaatgtggccctgaggatgccgtctcctgcagtggacagcggcggggaaaggctgcctgctctctaacggttgatcctcatttgtcccttaaacagctgcatttcttggttgttcttaaaaagacttgtatattttgatacagttctttgtaataaaattgaccattgtaggtaatcaggaggagaaa

SEQ ID NO: 262615 - DNA, 530 bp, Homo Sapiens
tttccttcagaacttagctgtctttatgaactgccaccctggaggctcaaataagcctgttcattctcaacaaacataagtctacttcaagcagacagatacggtttcaggaaagtcctgtggccatacggaacatagctaacgtgtacatgataaggattgtaatctatttctccttataatggcaacagtgctgtcttgtcagatgattatttgtctttttaaataaagtgacaatctcgggctccagttattgaatgtcgtccattctctaccataaatctctagtaaatatcagtttcatcaattatgtactgtatgcttataatatctaaaaataaaagtttgatataaataaatgtcctttagtggcaatatactaaaaaacagccctttgcctccagacaaccattaaaatcattttagcattacaggcagcagctaagtatgacgactgccaagggttaatactgcaagtccatttggtctttctttgcacctattactgtgaactaggtccattgctaggt

SEQ ID NO: 262616 - DNA, 287 bp, Homo Sapiens
aatagaggaagcaactcatatattaaataatgaattattttgcatttgaaattgtccaatttttggggaagagaggagccattttggtattctggccctaaaaaaatcagcgttaatttcgacagcttagtctgtggtcctgaaaattatagattatttttacctttattattttgtacttttctggaacaaaatatttacttaggattcacatagatcatacatatctttaatatatgtgacatataaaaatatatatgacatgtatattggataatttgaaatac

SEQ ID NO: 262617 - DNA, 806 bp, Homo Sapiens
gcagcagcatgatcctgacatgacagatgtgggagacccacagcctgcagacactgtgggctggaaggtgggaagggaggggccggtggaggtggagctgtttgaaagtgacacagcagcagtagaagcagtggtgggcgaagcccaggtgaccctcagaacgttgcacaagaacatcagggaaaagaaccagaatcctttaaggaaaatgttcttcatgtatgagagactaaagtgatttttctaagaaagttcagcccttctctgacttacctggacatttctagatacttccaaaggaccctctgggaatccatagcttcctaatctggagatgggaggtcataagggagacgctgtggggttccttgaagtttcttgggttcacagaggagccccctcacttggtgttctcccgtgagccagcctccacctgccaaagacactctggtcctcgtatagtgagtaatggggctcagggcctctccaacaacagagaggagctgatgctgtagggctgaccccgtgacttcctgagtcctcaccctgtccagtgctttgagattcttcccacctccccatcctcaccagccggatcgggcgctgtgcagtgtggtcagcatggtgaagaaagtcatttcctcggtgggcagtattcctctttatctctcattacactggaaatgttatttctgctgtatcatccgtgctcaacgttttagtctgtcaggctcaccttctctctggaaagaatttgcttaacttgacattccatgtgccgctaattaaatatattttgaaagaaa

SEQ ID NO: 262618 - DNA, 692 bp, Homo Sapiens
  misc_feature (460)..(580): n is a, c, g, or t
  misc_feature (582)..(615): n is a, c, g, or t
  misc_feature (618)..(618): n is a, c, g, or t
  misc_feature (624)..(638): n is a, c, g, or t
ggaatcctttctgctccttggtacttagatttgattagctatggacaagattggaggaaatactataaagtggaacctcttgattttggcggtactcagaaacagaaacaacttttcattggtggagaagcttgtctatggggagaatatgtggatgcaactaacctcactccaagattatggcctcgggcaagtgctgttggtgagagactctggagttccaaagatgtcagagatatggatgacgcctatgacagactgacaaggcaccgctgcaggatggtcgaacgtggaatagctgcacaacctctttatgctggatattgtaaccatgagaacatgtaaaaaatggaggggaaaaaggccacagcaatctgtactacaatcaactttattttgaaatcatgtaaaataagatattagactgttttttgaataaaatatttttattgattgaaannnnnnnnnnnnnnnnnnnnnnnnnnnnnnnnnnnnnnnnnnnnnnnnnnnnnnnnnnnnnnnnnnnnnnnnnnnnnnnnnnnnnnnnnnnnnnnnnnnnnnnnnnnnnnnnnnnnnnnnngnnnnnnnnnnnnnnnnnnnnnnnnnnnnnnnnnnttngcccgnnnnnnnnnnnnnnnaaaaaattttttcaccccccctcttggtgggggcgggggcccaccccaagaaag

SEQ ID NO: 262619 - DNA, 423 bp, Homo Sapiens
  misc_feature (157)..(157): n is a, c, g, or t
gtaagtaataatacctgtaaagatatattcagacttgtgactgttttatagatacaaaaaatgttggtgtaacttagaactccatcttgagttgctttaattttcttcccttattttcagtaatgctgtgatttagtgattctaatttaagtttccnaagatgaccatgaatatcaatcctaaaatatctttatgaatgatatcaatcctaaatcaatcctaaaatatctttattcatgttatcctacagacgtggaatagctgcacaacctctttatgctggatattgtaaccatgagaacatgtaaaaaatggaggggaaaaaggccacagcaatctgtactacaatcaactttattttgaaatcatgtaaaataagatattagactgttttttgaataaaatatttttattgattgaaaa

SEQ ID NO: 262620 - DNA, 776 bp, Homo Sapiens; identical to SEQ ID NO: 93951
  misc_feature (197)..(314): n is a, c, g, or t
  misc_feature (425)..(434): n is a, c, g, or t
  misc_feature (460)..(468): n is a, c, g, or t
  misc_feature (540)..(548): n is a, c, g, or t
  misc_feature (631)..(639): n is a, c, g, or t
  misc_feature (692)..(711): n is a, c, g, or t

SEQ ID NO: 262621 - DNA, 539 bp, Homo Sapiens
ttttgagaaaagagccagcagcctctggtcttgttgacaccatcatctgagagtggcaggccaccagagggaagggctaaggacagagccagatctggctgggcatctcaccttctggaggccgaacttgacccgggatggaaataatgaagcagccactggctttcccaaggcctgtgatcctcccgggtcacccagaaatcccaaggtcttatctcctgctcttcccagtctcctctgttagggtaactggttccccaagcgcagagcttctgtgattaccagaagaacactgaaggagtcttcttgtctgtctggagccagctgagatggccctgagatccacagagcctcctccacgcccctggatggaggcgctcctgctcttccaccctttgtatctctcacttggcacccattcccgtaattaatcacaaactccgtctgagctattcctttctaagccatgccctctgtactctgacttgccccaaatagacagatgctcaataaatatttgctgattggctggaaaaaaa

SEQ ID NO: 262622 - DNA, 342 bp, Homo Sapiens
tggattgacctctccggtgcttaagtcagagccacagatggggagggacgccgacaggaagggctggagggaccttctaggggctgggtctccactgaagagcatgcatctcaccatatgtggctctgacttaaggaccgtggattgacctctccggctcacgaccttcgaggagtcagaatcctgcagttggagcctttgatgtctggcttcttcatcctatgacttagagcttcatccgtgctgttgtgtgtgtccgtagctccttgctgtctgttccttcgtttttaattgtgagcagtgttcttctgtctgaataaactaagacgcagtttgtccatc

SEQ ID NO: 262623 - DNA, 499 bp, Homo Sapiens
cagactttgggggaaaatcccagatgccaaaaatttactctttggggcggttgtccactcgtctcttccaggacacagtggtggctctccatgccctgtccaggtatggagcagccactttcaccagaactgagaaaactgcacaggtcaccgttcaggattcacagaccttttctacaaatttccaagtagacaacaacaacctcctattactgcagcagatctcattgccagagctccctggagaatatgtcataacagtaactggggaaagatgtgtgtatcttcaggtagggctccaagcttatatgggtgagagtcaactttaaacttgccaattgaaatggaaactctgttccttccttcctgggaaagtaaaaggcacctctggagacgttaagtaatgaggaagtgaggggtccagaaaaagagagaaactgatagtgtctttgctgtttcacagacatccatgaaatacaatattcttccagagaaagag

SEQ ID NO: 262624 - DNA, 464 bp, Homo Sapiens
gtgagcagagatgtgtgtggacatctctgaccatccatcgctgtattcaaatggattgttctattccattctggtctcaggcatgaccacgtccagtgaagacatttgaggcagcacatctcaggacccaggcaatagactggccccaactcaggctggactaaggtgtgattaattctttgttttttgtgtggaacagctcaccttgtcagacagcctcagggcatctctgagacacaggggcagaaaatgacattcatcttttgagtcctcatccatggagtgctgtgtttggggggctgcatctgctgaagcgagaaccccattctgccaccccaccaggatgcccattctccaggacttctccaacttactattagactaaaccagaacaagcaacaaactgtatttatgcaagcaaaattgatgagaaaattatattcaaataaagcaaaaattaaaaa

SEQ ID NO: 262625 - DNA, 518 bp, Homo Sapiens
  misc_feature (20)..(20): n is a, c, g, or t
gctgcacttgtccccccagnatgtttctgaggagccagactagggctggaattgctgtagagtgacggctgctgcccagagcgtgtcccagacatcacagcggggctcagcagttcccacagcctctgcctgccttggctaagcatgagttaagcagcaaaacgctcctccatgtctggatggggccggcaggtcctgtgtcccctgcacctggaggagagcaggctagaggcacagcggccacatggtgctggctctgaacgttggttggtggctggaaaacagccctgcttctgagggccgctcagttctgcacacgaaaccacctcctgagggctcagctctgcccccgccctgggctgcagcctctgcacgcaagcaccaggcatcctttgtgttgtcaactccgtgtaaccagtaactacagccatttacaattgactccgtttccttttgtaggtttccctgtctgtctgtgttagtagaaaaataaaatcctatgaaatctgagtacgttg

SEQ ID NO: 262626 - DNA, 422 bp, Homo Sapiens
atatttgagcttatttaatattttagaagcttaacaattctcatccacaagttttgacccattaattccccgatagggcactctgctcgggcgaactaagactccatgggtcggcttacaggggaaatagcgcttgtcacccactgacccatcattttttcccttggcgcttcggagctcaagtccaagccagatacctgaagcaaagtcagtggggcccacatacctaacagtacccatctcattggagctcgtgagcaggacctgagacccctcgtgcagcttcacgctcccttcaatgccacctgcggtgggggtgctgctccaactgcgacgcaaagcagctttcgatttggaaaaagcatttcttctgttaatctccttttgggaagaagcagaagttgtgctaaaacttctcctaa

SEQ ID NO: 262627 - DNA, 543 bp, Homo Sapiens
  misc_feature (218)..(218): n is a, c, g, or t
tgacaagctttaccataaatttgaatctgtaatttctgctttgatcaatttgatgtataaggagtggagccagtcaaatttggaaataaaatttcgaggttagaattccaattatgccggtgattcactgcataaaacatacgagcctcagtttcctttttcatctgaaataaaaggagattgactccaggatcttccaaggctgctattccaagagncaggttcataaaggtgattgtcaagctccagtgcaaatgctaataatctggaattttccttcaaaccatctgcctatgcaaaatacaactgggtcacactggaaaggagagagagagctctgattcatatgagaaatcaagaatcgaaccttcatcttgaagatataaaccttttgccatgtaaatgtgaaggaggaaaaaaatggaagagaatctacgattttaaaaggcatattttagtgggttacaatatgttataattgatatttcttactggcctaaaaacaacactatttaaaataatcctgaagagcagagtagctgt

SEQ ID NO: 262628 - DNA, 532 bp, Homo Sapiens
cagccttggaagatcctggagtcaatctccttttatttcagatgaaaactgatgacagggaaagagcccaggaagaaagtttttattcttggtgccttgggcaacgtgtgtatcctccctcaaaagaaggcttggagcaaaatgaacacttacaggaaactgaggctcgtatgtattatgcagtgaatcaccggcataattgggaattctaacctcgaaattttatttccaaatttgactgggctccacttccttatacatcaaattgatcaaagcagaaattacagattcaaatttatggtaaagctaagaaaaagaaagcagaacgatgagtcagaaggtaagaggccacgtaacccaatatttttttagcataaagcattcacgaattttactggcacctcaactaaaatgatgttcttttaaaatcatgtcacttgattataaacatcttgttttaaaaatggaacatataatccaacatcccccaaatttctagactaattcaaacataagagttgatcttaatatg

SEQ ID NO: 262629 - DNA, 111 bp, Homo Sapiens
ggcaagttaaaatataaattcatttaaatatatagttttgtacttttctaccatgtaaatgtgcaatgtatataaaagttataatgtgtatttgtaaataaatgatgagtg

SEQ ID NO: 262630 - DNA, 575 bp, Homo Sapiens
ccaatgcccgcgtgcagcattgttgactgtggccctcctgatgatctacccagtggccgagcggagtacatcacaggtcctggagtgccacctacaaagctgtgattcagtacagctgtgaagagaccttctacacaatgaaagtgaatgatggtaaatatgtgtgtgaggctgatggattctggacgagctccaaaggagaaaaatcactcccagtctgtgagcctgtttgtggactatcagcccgcacaacaggagggcgtatatatggagggcaaaaggcaaaacctggtgattttccttggcaagtcctgatattaggtggaaccacagcagcaggtgcacttttatatgacaactgggtcctaacagctgctcatgccgtctatgagcaaaaacatgatgcatctgccctggacattcgaatgggcaccctgaaaagactatcacctcattatacacaagcctggtctgaagctgtttttatacatgaaggttatactcatgatgctggctttgacaatgacatagcactgattaaattgaataacaaagttgtaatcaatagcaaaaaa

SEQ ID NO: 262631 - DNA, 446 bp, Homo Sapiens
  misc_feature (49)..(49): n is a, c, g, or t
aaacccctctcccgaaaaactgtggccccttgtcctaaagggccccaanaaagctgaaactgtggcaatagctcctctccttccttctcccaaagaaagactcagcagccctaaattcccccaacccccggtatgtgcccattgggtgggatgtccccccacctactcccgttaacccttccccattgtcaagatgtgcccacgggtgcccactgggggcacactgaacttgtagggagtgtgattttgttggaggtgcacatggtctctgaatttgacagagaacaccttccctttccttgccatgtcaccctccagaggaagtcacacctcagcgaggtggtttggcatctggggccaactccattacagctatgagctcactgctgtcagtgacgtttggtgttttctgtactgtgtttcaataaaaactccttcaaggttaa

SEQ ID NO: 262632 - DNA, 806 bp, Homo Sapiens
  misc_feature (217)..(353): n is a, c, g, or t
  misc_feature (362)..(500): n is a, c, g, or t
  misc_feature (604)..(612): n is a, c, g, or t
  misc_feature (678)..(686): n is a, c, g, or t
tttgccacaatgtccttaactctaatgcctggactggccatgttctagtctgttgcgctgttacaatctgtattggtgctagtcagaaaattcctagctcacatagcccaaaagggtgcgagggagaggtggattaccagtattgttcaataatccatggttcaaagactgtataaatgcattttattttaaataaaagcaaaacttttatttaatnnnnnnnnnnnnnnnnnnnnnnnnnnnnnnnnnnnnnnnnnnnnnnnnnnnnnnnnnnnnnnnnnnnnnnnnnnnnnnnnnnnnnnnnnnnnnnnnnnnnnnnnnnnnnnnnnnnnnnnnnnnnnnnnnnnnnnnnnggttggggnnnnnnnnnnnnnnnnnnnnnnnnnnnnnnnnnnnnnnnnnnnnnnnnnnnnnnnnnnnnnnnnnnnnnnnnnnnnnnnnnnnnnnnnnnnnnnnnnnnnnnnnnnnnnnnnnnnnnnnnnnnnnnnnnnnnnnnnnnnggggggaacccggggtttttaaaaaaacccaaagggggttttggggggtcttttcgggatttctcaccaggggggccccagggggctcttatatataaatcttnnnnnnnnngtggcgaatttttggggagagtggtggataattatttaaaaaactttccgcgccccgcgggagaannnnnnnnnaaacgggggtgttggacaaccctttgataccccccccgggggattcaccaccccccttggcggccccttgtggagaaaataaattttctcccccccggtggagaaaaacgccgggggccc

SEQ ID NO: 262633 - DNA, 366 bp, Homo Sapiens
  misc_feature (332)..(332): n is a, c, g, or t
  misc_feature (335)..(335): n is a, c, g, or t
  misc_feature (348)..(348): n is a, c, g, or t
gtccagtacttaagcccctgagttggttggaggtttgaggtcctgggtcgagcagggcagtactggaccaggtctacgtcagcattcaggttcaatggggacaccagtggcttcaaacttcctgatctaattatgtttttagacacttagaagttattgaggactttaaagagcttttgtttatttgggttaatatttatgacatttgacattgaaacaaaaatttaaaatgttatcttttaatttatgttaaaatagcattaataaatcagttataggttaatgaagataggatgttttgtgaaaaagcaatctattgtgtccaaatcaanaanacaaaaagtgtgncactggttaacttttaaa

SEQ ID NO: 262634 - DNA, 791 bp, Homo Sapiens
taaaagctgtctaaaagcagctgtacggtccggaattcccgggatatcgtcgacccacgcgtcggagccaattgcccaatttctaccctaatccaaagtccctggtgtgggtggggttaaacgtgctggtgcatcctaggtcatccaagagtgagcgccaagtcctgagaaggggcacagaactccctggagggtggagatggagcacctgccccccatggcagggtacactctccccacagccttcctccccaccatcccgtggggactctcgggatttaagcactcgtctctctgggaggcccagaccccactccatttataggcacatctccttcatttcctaggtcactgcccctttgtttacagctcctgcctcctcccttgaccacagcctggtttacaaattccatcagctcccagccccacctgccaaagtcccaggtttacaagccacgcttacttgctgtgtctgcgtggaattctctcctctgtcccctccagtctcctcattggagtgacctgaaggtgtggcttcctccactttttctcagtattactttgccttagttttccccaagagggaaggctggaactcttaactctgtaccccttgatagttatttaattctgtttctcctagtggttcacaattgaactgaattgagatggtgtcgggtggctaaggagacacctcacctctccttccccattgtgccgcctttatcaattgcctgtttgtgtgtcgttctaacttccattataaatggagtctcttcagcaagagcaag

SEQ ID NO: 262635 - DNA, 756 bp, Homo Sapiens
  misc_feature (13)..(13): n is a, c, g, or t
  misc_feature (43)..(43): n is a, c, g, or t
  misc_feature (124)..(124): n is a, c, g, or t
  misc_feature (580)..(580): n is a, c, g, or t
gctgtggtccaanggaggaaggccaggaactgtaaaaacaaangggcaagtgaaccctaggaaaatgaaaggaagatgtgccctaataaaatggagtggggttctgggccctcccccagaaaanacgaatgccttaaaatccccgaaaagtcccccacgggatggtggggaaggaaaggctgtggggaaaagtgtacccctgcccatggggggcaggtgctcccatctcccaccctcccagggagttctgtgccccttctcaggacttggcgctcactcttggatgacctaggatgcaccagcacgtttaaccccacccacaccagggactttggattagggtagaaattgggcaaattgctctgcccccagaaacagggtggggaaagcaagttacaagatgttggttgcccttccctgccaggctcattatcagggtctgtctgccctgaatcttccgggctcccaggatctccagttataagaaggagggaggtatatccctatgttggaagatggtcaccgccggcaggactcatccacaatcagggcctttggtgcgcagcccgccctggagctnctcgctgcagcagcagcagctcttcctcatcctcttcgtcgtcgggttgggctgctggagggttgggggcactggggacctcaggctccgggcccagctcctccagtaccgaactctcggaggggtattggtacgtggtctccagggctgtctcgctgaaggagatcttaagctgt

SEQ ID NO: 262636 - DNA, 492 bp, Homo Sapiens
aatgcagtatattcacctgtaaatagtttgtgtaaaatttgacaaaaaaagtatatttactatactgtaaatatatgtgatgatatattgtattattttgcttttttgtaaagcagttagttgctgcacatggataacaacaaaaatttgattattctcgtgttagtattgttaacttctttttgcgactgcgttacatcatttaaagaaaatgctgtgtattgtaaacttaaattgtatatgataacttactgtcctttccatccgggcctaaactttggcagttcctttgtctacaaccttgttaatactgtaaacagttgtacgccagcaggaaaaatactgcccaacagacaaaatcgatcattgtaggggaaaatcatagaaatccatttcagatctttattgttcctcaccccattttcctccttgtgtatgtacttcccccacccccctttttttaagtaaaatgtaaattcaatctgctctaaa

SEQ ID NO: 262637 - DNA, 534 bp, Homo Sapiens
ctgaagctgtactgcctcgctgagaggatgaaggtctccgaggctgccctgtctctccttgtcctcatccttatcattacttcggcttctcgcagccagccaaaagttcctgagtgggtgaacaccccatccacctgctgcctgaagtattatgagaaagtgttgccaaggagactagtggtgggatacagaaaggccctcaactgtcacctgccagcaatcatcttcgtcaccaagagggaaccgaggaagtctgcaccaaccccaatgacgactggggtccaaggagtacatcaaggatcccaacctacctttgctgcctaccaggaacttgtccacggttaaaattattacagcaaagaatggtcaaccccagctcctcaactcccagtgatgaccaggctttagtggaagcccttgtttacagaagagaggggtaaacctatgaaaacaggggaagccttattaggctgaaactagccagtcacattgagagaagcagaacaatgatcaaaataaaggagaagtatttcg

SEQ ID NO: 262638 - DNA, 704 bp, Homo Sapiens
tagtcttagtttagccatttccatcagttgaaatgtggtgtgatctgtgctgtttcgtgtgtttgttttgtgtagcttgttttttaatattcatttaataagatgatgggcaatagcaaacatttttactcccaggaatataatttatcaaatgaactgttttatttgccaaagaaacttgtttttaatatcacgggtaatgggtaagtgtgaaaactaggcttttttttatgaaacaaaaaaaggtgacgaataatatggcttttgtttctgtttctgaagcctgatttcatttatgccaggttttgaaaaacagatctttttcttaagtgaaagcacctttaatttgctctaacggtacatcctgtaaagacagaattctgcatagccttttaggtgtttttacagtatgtgaaaaatacaagactcattctagagttaaattaccaatcttggttgatattatctgcttccatttttattaatttggaaattaatatgttgctagtaaatattggtttttacagtacccagtttgaaaatgtaagttatcaaaacttaatgtagtgaatttgtgtaaccatgttgtattgttgagaatgtatttttatttaaattttattttcttatcaagagtattataaaaattaacttttgtaactgtcgcttggaaataactcaaataaattacaagaagcctgtca

SEQ ID NO: 262639 - DNA, 489 bp, Homo Sapiens
  misc_feature (23)..(23): n is a, c, g, or t
  misc_feature (30)..(30): n is a, c, g, or t
gggccccctgactgggagttgancgccttncccggggctaaacccttttcccagctggatgaagaatttgagtgctctgatccctctacagagcttcccctgacccattctgaaggagcccccattccctgggaaatattcccctagaaacttcccaaatcccctaagcagaccactgataaaaccatgtagaaaatttgttattttgcaacctcgctggactctcagtctctgagcagtgaatgattcagtgttaaatgtgatgaatactgtattttgtattgtttcaattgcatctcccagataatgtgaaaatggtccaggagaaggccaattcctatacgcagcgtgctttaaaaaataaataagaaacaactctttgagaaacaacaatttctactttgaagtcataccaatgaaaaaatgtatatgcacttataattttcctaataaagttctgtactcaaatgtagccaccaacagtttgaa

SEQ ID NO: 262640 - DNA, 384 bp, Homo Sapiens
ccacaccccaggccgcgcccgcgcctgcgcctcagccccggcttcatcttccctgtcttgttcctgggcgcagagggctcctccggcgccgccgagctgcgcccgctgccttcacaccccggacatccgcgccacacgtgagtgtccccgcacccctcccccaggaccgtggaagtcccagattcgggcctgctctggggcttctggggtccccagcctcggtcactctgacgggtgaagggaagaagaaatgatggagaaaacggtgctccttcatggagggaccaaaaaaggacatacaatctatgtcaatagatgagggttttccctccataagtttaactttaaaagtgtatttaaggtgccgggcgcagtggctcacac

SEQ ID NO: 262641 - DNA, 404 bp, Homo Sapiens
  misc_feature (39)..(39): n is a, c, g, or t
  misc_feature (59)..(67): n is a, c, g, or t
tgtggggaggaagagaaggacagggtgttggggtattgngatcttcttaccacaatagnnnnnnnnngatatacgacctccacctcctccagaccccctcccctcctgtgtcccttgtaaatagaaccagcccagcccgtctcctcttcccttccctggcccccgggtgtaaatagattgttataatttttttcttaaagaaaacgtcgattcgcaccgtccaacctggccccgcccctcctacagctgtaactcccctcctgtcctctgcccccaaggtctactccctcctcaccccaccctggagggccaggggagtggagagagctcctgatgtcttagtttccacagtaaggtttgcctgtgtacagacctccgttcaataaattattggcatgaaaaaa

SEQ ID NO: 262642 - DNA, 345 bp, Homo Sapiens
  misc_feature (195)..(242): n is a, c, g, or t
ggtggaagtatctcagtctctgcataagaggattaaagtatgaaaggatcatttaatgactgttttacttataagtcattaagtaatccaccatttcttatggatgatgcttaagcctggtgaggtttgtactctaaggagcccagatcataatgcagtgcatttccttagcccttagagtttcttgcaaacatnnnnnnnnnnnnnnnnnnnnnnnnnnnnnnnnnnnnnnnnnnnnnnnncagtacctgtttacagtaattaaatatgttttttctttatctttctttctacttcaaccaaaatcagatctttgaggttttgctgacattgttggtggttttg

SEQ ID NO: 262643 - DNA, 708 bp, Homo Sapiens
ggtcttttggtttttaaaggcaaaaaagtaactttattgactgctaatcttaccatgaaatatctataagaaataattacaaaataatgcaggtttctttttacatacttttggtatcatcttgatatgatgatcctttcacagaaaggattatttacagtttatgtagatataaagctcactgttgcatatacaaatgtagatgtgcagaggcaatatataccaaaacgggtatactgacaagcgatagatatgtaagaaatgcagaataaataacagctttatatatttcctttcctttgttatttttaaaaacaatttccaaatacaaaacatggattattcaaagtggatttttcctatacatatatataattctgctgcaaacagtggatcaaaaagcagaagtgttcttagcatgattcatctttgaaaacccatagaactattcataaatccaattagaaagaacatgtgcaaaaccaccaacaatgtcagcaaaacctcaaagatctgattttggttgaagtagagagaaaataaacataaagcagtacctgtttacagtaattacatatgttttttctttatctttctttcttaaatatgtctttttttaaatgtttgcaagaaactctaagggctaaggaaatgcactgcattatgatctgggctccttagagtacaacctcaccaggcttaagcatc

SEQ ID NO: 262644 - DNA, 381 bp, Homo Sapiens
  misc_feature (56)..(56): n is a, c, g, or t
ggctgggtaggacccagaaatgcacttgtattacagagtgttaaggctggttgccnatagtatggaacagaaacacctctccttggtctccctagtaatggttcaagttcttcccaggaagtcttacatattataactttgttcattatctttcccttatagcatcattttcccttttgtagagtggaaatcagactagctgctaaacatattaaggttaatcctccagaaatgtactgggggggcattttagtcacaacaacttacatttggctttggaagttgttaacaaagcatagtcgatgtttttaaatcaaacataatttgtatcttggaacttacattttgacatttgaataaaacaaaaagactaaatgaaaa

SEQ ID NO: 262645 - DNA, 584 bp, Homo Sapiens
  misc_feature (89)..(111): n is a, c, g, or t
  misc_feature (158)..(168): n is a, c, g, or t
ggtgtccgtttgtattgaataatttgctacatttgtaaaatgtaagaggtatataatatatgtatatttctaacgtaaaaaaacataannnnnnnnnnnnnnnnnnnnnnncttaaaaagatgagagaaacatattttttcaggaaaaacaaactttnnnnnnnnnnngaggagaaataaaaccttttctcccctttccccatcctctatctatccctctttcccaggaacaaatcaaaaggtggattatcttctgaagaatggaaactgttagtccagaatgatgtctttttctcaatgcagtgagttatagattctctagttttctccctagggatgggaagggggcattgaggcaagcctggagaggagcccggggagcagggtcatgaacttttttctttagtgaaggaggaatacaatcaagggttttgtattcagaatgttgtgcaatattttggaatgggacattggtgtgtttagagattttagtttaaaaacaaaacaaaaagattgatcaaatctgtacagtttctattgttccagatttttttaagtttgtattaaaagcatgatacataata

SEQ ID NO: 262646 - DNA, 396 bp, Homo Sapiens
ctgggtcagagaaaacttcttgactaaaactggtcagaactcatcacagaaatgaaatacagtggtctctctctcccagaactggttgcagctaaaacagagagatctgactgctggctataggattttggacttaatgactgaaattgcaaattgtcctttttcttggcattacagattttgccaaaataactttttgtatcaaatattgatgtgtgaaagtgaaggagctagtctgctgaaccaggaatagtttgagatattgaactgtcatttttgcacatttgaatactttgcaggctggctttgtataaacttatcctctggtttcctatatgttgtaaatatttagaccataatttcattataaataaatctataaatattcaaaaaaaa

SEQ ID NO: 262647 - DNA, 498 bp, Homo Sapiens
tgggctccagttctaccggccccatgttgacatcgtgtccaacaagacaccaagagaagcagggagtggctgaccttcattttccttatcaacacacagggggccctctgcacccaccaacatctttgtctcctgaaaaatggcctttgtcagttatttttaaaaactggtgctaatcctgagacacggagatactcccgggaagccatccgagcctggacacactgagatgaaaccacaaacacgccgagaggaaaagacattgattccagccctcaaagcaacgggacaaaaaacaaacaggaggcttccctccccccccagggggcagcggccggtgtctgcggctctgcgggaagggctctcactgtgaccagattgtggcttctgattgtattgtagaatttctggcccagcttttaaggttcaaggcttcccccctttgcttttatcttattttcttgtttaataaagatacgcctgtgtgagaagcaaaaa

SEQ ID NO: 262648 - DNA, 939 bp, Homo Sapiens
  misc_feature (789)..(791): n is a, c, g, or t
  misc_feature (794)..(794): n is a, c, g, or t
  misc_feature (801)..(803): n is a, c, g, or t
  misc_feature (805)..(845): n is a, c, g, or t
  misc_feature (849)..(849): n is a, c, g, or t
aagtagcgaggcctgggtggcgaattcggcacgaggagcgcgtccaggtgggaggttagtgtggcccgggcgtccgctcctcagcggatgtggcagccccgagccatggctctcgccgtccgagtcgtttattgtggcgcttgaggctacaagtccaagtatcttcagctcaagaagaagttagaagatgagttccccggccgcctggacatctgcggcgagggaactccccaggccaccgggttctttgaagtgatggtagccgggaagttgattcactctaagaagaaaggcgatggctacgtggacacagaaagcaagtttctgaagttggtggccgccatcaaagccgccttggctcagggctaatgcgccctgaaggcagagtccagggaccttgacccagcccctctcagcagacgcttcatgataggaaggactgaaaagtcttgtggacacctggtctttccctgatgttctcgtggctgctgttgggggcagagattgacgcccccggtctttgcctctgagcgggagagtctgtgtgtatgtgtcttccccggaatccacaccaccccaccctcctcctgtcccgtggtttcatcatatctctttgcataccccatgtcttccccagttgtcccctggagtttgggggggacatcccgcctcaggcatccttctcaaggggaagccaagagaggcatcagggatgggtgggtttctgattgtgggcaacgtttgcaaccgttcacgattcaataaatattgggatgaaatttacccggnnnaanaaaacannnannnnnnnnnnnnnnnnnnnnnnnnnnnnnnnnnnnnnnnnngcanaaaccacaagcgccaaaaacccagacaccacaacccagcaaaagcggcgagcaggacggcccagccacgcacccccggccgacatcccat

SEQ ID NO: 262649 - DNA, 481 bp, Homo Sapiens
  misc_feature (16)..(16): n is a, c, g, or t
  misc_feature (36)..(36): n is a, c, g, or t
  misc_feature (41)..(41): n is a, c, g, or t
  misc_feature (65)..(65): n is a, c, g, or t
ttggtggccgcccatnaaaagccgcccttgggcctnaaggnctaaatgcgcccctgaaaggcaanaagccccaggaaccttgaaccccagccccctcctcaagaagacgccttccatgaataggaaaggactgaaaaagtcttgtggaaaccctggtctttcccctgatgttcctcgtggctgctgttgggggcagagattgacgcccccggtctttgcctctgagcgggagagtctgtgtgtatgtgtcttccccggaatccaaaccaccccaccctcctcctgtcccgtggtttcatcatatctctttgcataccccatgtcttccccagttgtcccctggagtttggggggacatcccccctcaggcatccttctcaaggggaagccaagagaggcatcaggatgggtgggtttctgattgtggcaacgtttgcaaccgttcacgattcaataaatattggatgaatttaaccgaaat

SEQ ID NO: 262650 - DNA, 439 bp, Homo Sapiens
agacctagcgcgtccaggtgggaggttagtgtggcccgggcgtccgctcctcagcgaatgtggcagccccgagccatggctctcgccgtccgagtcgtttattgtggcgcttgaggctacaagtccaagtatcttcagctcaagaagaagttagaagatgagttccccggccgcctggacatctgcggcgagggaactccccaggccaccgggttctttgaagtgatggtagccgggaagttgattcactctaagaagaaaggcgatggctacgtgggacacagaaagcaagtttcttgaagttggtgggccgccattcaaagccgccttggcttcagggcttaatgcgccctgaaaggcagagttccaggggacctttgaacccagcccttttcagcagacgtttcattgatagggaaggattgaaaatttttgttgg

SEQ ID NO: 262651 - DNA, 316 bp, Homo Sapiens
gacataaatttatttttatttcacaatccacaaaacatttcaaattaaagaaatacattaaaagtctccagtttttgctttaatttcacatttcatacactcacaatatttaggaaatagtcattttgactgtcttataactgggataagggtgcagcaacaattctgccagatggttaaatgccccagaggatttctgctcttctcttcctaattagggagctataaagcagtttttactcccaacacaaattcttgataaaaaccatactctttgctgatttttcatgttagacattaaggatgacatgcaagt

SEQ ID NO: 262652 - DNA, 458 bp, Homo Sapiens
  misc_feature (81)..(81): n is a, c, g, or t
  misc_feature (131)..(131): n is a, c, g, or t
  misc_feature (151)..(151): n is a, c, g, or t
  misc_feature (174)..(174): n is a, c, g, or t
ccttccctttgtgttggaatttgttttaaaacccaaaaaaccacctgtgtaaaccctcccacaattaacaatttccttaanttgtttggtcaactgcctaaaacccttaacagctccttccccctttcccngggggattgtgcacggccancttgaacctgtcacgtggtcaanccccggcccccatcagaggctgggggaggcggcacattggccagtgtgtcacactgagctgggcacccacaggctgcctcatgaccctcctctccagcaggtagtgggtgaatgtgtgaaggtcttgcctgaatccatcaggacttgggaaacagagaaccctgtgggggcggctgtgggggaggtccctgccagtgtttagaagagcctgactgtgttcagtgccttggagcagaaagccagggtcctgagtggctgaaataaaagcctctggtggaacctgc

SEQ ID NO: 262653 - DNA, 964 bp, Homo Sapiens
cggcagtaactctaacggttttaaggtagcgaggcctgggtggcgaattcggcacgaggcctcagctcagtcacgtctcccagcctgccacccacacatgcgagtgacagtggcagtagtcgctggagcaaagactatgacgtctgcgtgtgccacagtgaggaagacctggtggccgcccaggacctggtctcctacttggaaggcagcactgccagcctgcgctgcttcctgcaactccgggatgcaaccccaggcggcgctatagtgtccgagctgtgccaggcactgagcagtagtcactgccgggtgctgctcatcacgccgggcttccttcaggacccctggtgcaagtaccagatgctgcaggccctgaccgaggctccaggggccgagggctgcaccatccccctgctgtcgggcctcagcagagctgcctacccacctgagctccgattcatgtactacgtcgatggcaggggccctgatggtggctttcgtcaagtcaaagaagctgtcatgcgttatctgcagacactcagttgacacttgttatatcatgggaccccggaaattggagtgaagctagaaacagaaaacccatgcagggcctcggattcccacaaatgtgacaagaggtatagggagtgagtcgcagcgctttgctcgtgaccctgggatcagagcacccatcaggcttccattactgtgggctccctaagaagaccatggagagcttggggactcccccaggaaggccgtgaaagctggggattccccctaggaaagccatgaggaagctggggactccccaagaaggccatgaggaagccagaaattgaaggggggaaaggaaaagggaacctgatcaatggatggcccagcaaggactcatcctcctgccctaactgggacaaggaagcctgggcacccaacctttctgtccttccccctggaaactggg

SEQ ID NO: 262654 - DNA, 1053 bp, Homo Sapiens
  misc_feature (842)..(842): n is a, c, g, or t
  misc_feature (936)..(973): n is a, c, g, or t
ggcctgggtggcgaattcggcacgaggcgcaatcatctgctgacgacctcaccccgtccgtgacctcccacgaggcctccgacctcttccctaaccggagtggatctcgtttcctggctgatgaagacagagagcctggctcttctgcctcctccgacaccgaggaggactctcttcctgccaacaaatgtaagaaggagatcatggtgggacctcagttccaagctgacctcagcaacctgcacttgaaccggcactgtgagaagatctacgagaacgaagaccagctgctctgggaccccagcgtcctccctgagagggaggtggaggagttcctgtacagggcggtgaagcggcgttggcacgagatggccgggcctcagctcccagagggagaagccgtgaaagacagtgagcaggcgctgtacgagttggtgaaatgcaacttcaatgtggaggaggccctgcgaaggctgcggttcaacgtgaaggtgatccgagatgggctctgtgcttggagtgaagaggagtgcaggaactttgagcacggcttccgtgtgcatggaaagaactttcacctgatccaggccaacaaggtgcgcacacggtcagtgggcgagtgtgtccagtactactacctgtggaagaagccggagcgctaccactacttcgcccagcagacgcggctgggccggaggaagtacgtcccgtccggaaccacggacgcagaccaggacctggatggcagcgaccccgatggccccggccgtccgccgcccggagcaagacaccctgactgggatgcgcacagatccactggagcgtggatggcacgggccggntggtctcgatgaaccccggagtggccctccggatggactccccgtcctcggagcccagggccgtggttccctttccaccaacttgagatgaaannnnnnnnnnnnnnnnnnnnnnnnnnnnnnnnnnnnnnacagccctgggccgaacccagccccttttcccaaccccggcttggttcatgtgtttccgggagcgccaacaagcccagac

SEQ ID NO: 262655 - DNA, 1098 bp, Homo Sapiens
  misc_feature (887)..(887): n is a, c, g, or t
ggcctgggtggcgaattcggcacgaggatggcggcggccggggccccggatggcatggaggaacctggcatggacacggaggccgagactgtggctactgaggctcccgcgcggcccgtcaactgcctggaggctgaagccgcggcgggggcggcggctgaggactccggcgccgcacgaggcagcctgcagccggccccggcccagccccctggggaccccgcagcccaggcctcggtcagcaacggcgaagacgcgggcggcggcgcgggcagggagctggtggacttgaagatcatctggaataagaccaagcatgacgtgaagttccccctggacagcacaggctccgagctgaaacagaagatccactcgattacaggtctcccgcctgccatgcagaaagtcatgtataagggactcgtccccgaggataaaacattgagagaaataaaagtgaccagtggggccaagatcatggtggttggctccaccatcaatgatgttttagcagtaaacacacccaaagatgctgcgcagcaggatgcaaaggccgaagagaacaagaaggagcctctctgcaggcagaaacaacacaggaaagtgttggataaaggaaaacctgaagatgtgatgccatctgctaagggggcccaggagcgcctgccaacggtaccgctgtccggcatgcacaataaatctggaggaaaagtgagactcacctttaaactagaacaagaccagctgtggattggcactaaagagcggactgagaaattgcccatgggctccataaaaaatgtgggtcagtgaacctatcgaaggacatgaagactaccacatgatggcgtttcagttgggccccacggaagcctcttactactggntgtactgggttccaactccatatgtggatgcaatcaaagaacctggggctggggaaatgggcaatatatttttggaaagcccttttcaccctcctggccccaaggagaccggaaccccaaagagcaagggacaacttgcccgggaaaaaggccccgcaacattccccctggaaatatccaaaaagattccgcggaacctctttgctcccct

SEQ ID NO: 262656 - DNA, 1149 bp, Homo Sapiens
  misc_feature (34)..(34): n is a, c, g, or t
  misc_feature (895)..(895): n is a, c, g, or t
aataatattgatatatagaactgttgggggggcnacctcccaccgtagcgaggcctgggtggcgaattcggcacgagggagtgctcctttccatggggtttggatttgtggaatacaggaagccggagcaagcccagaaagctctcaagcagctccagggtcacgtcgtggacggccacaagctggaagtgaggatctcggaacgagccactaagccagccgtgacattggctcggaagaaacaagttcccagaaagcagaccacctccaagatcctggtgcggaacatccccttccaggcccacagccgggagatccgagagctcttcagcacctttggggagttgaagacggtccgcctgccaaagaagatgactgggacaggcacacacagaggcttcggctttgtggacttcctcaccaagcaggatgcgaagagagccttcaacgccctgtgtcacagcacccacttgtacgggcggaggctggtgctggagtgggccgactccgaggtgaccctgcaggccctgcggcggaagacggccgctcactttcacgagcccccgaagaaaaagcggtctgtggtgttggacgagatcctggagcagctggaaggcagtgacagcgacagtgaggagcagacccttcagctgtgagctggcaccgagagggtgtgtggctccggggccctggggaccgggacagccgctccagcttctgcactcaccaccatggtgggcttggggggggccggggccgcgcaaaccggcaaaggcggggcccccaccccctggcaactggggttcaaaaggggtccgcgagggaagaaacatggcccaatgcgggggaaaggggccttcacggggtccactgtcgctcaagccggggggctaancacgaagccggtggggcttccgcacacacatgtgaagcgggggtgcgtagggtgagctatccttgggactgtgcgcggagcccccggcccgcttcgaacgacaacaaaacctggtaatacggaagccgtatgaggggacagcgaactctacaccttgctgcggccagacagggtgagcagtcggcggcgcaagcgaggagaaacccgccggggggtactgcgagtaaaccgcgccgctcgggggtgaatacccc

SEQ ID NO: 262657 - DNA, 1091 bp, Homo Sapiens
tgcgaggcctgggtggcgaattcggcacgagggtctttgccaggttgccccatgcagccacccatcctcagcatcctaacttgagggggcaggagagggctttgtttttataatccggattaaatttcccttccctgggcacaagtgcctcatgagggcccggggctgctggttgggagggaaagcatccccgtttttgcagtgaggaggccggccgagggctggggttccacttagacccttggcagaatggctgttgaggggcaggcgctgcccagtgcccacgtctggaaagctaattcccgggtggacgctgaacatacctgctgagagactctgtcccctggtttccaggacagttgtcacaagctgagtggggggggactcccaggacttgagggacccagtcccaccccaaactgctccccctcccccaaattccctttctcctcctgctctttctccccgctgtgcctcccccagttacccacagaagtgcctgcctctccagcgctcacagaacacacaaaaagggacaggaattggtcactgggtagtggccgtggctcctgacgatccagaccagcgtctggcccaagccattcagaggtggggtctggggcctgggggttttgtgtcgtgacactttgtctcaaggagattccacatagggatttgaattaggctttctgcttgccaaggcctgtggcatctgagcctgggctgaagggccgggcaagcctcccctgagccttttggaagccgagttcactctctgcctgcccaggggagcaccggcttggttctgggggcttcctcctaacatctcaggtttttatccttgccttaaatttcttttccaggaaaaaacccttccctgccaaaggtgactgtgttttctgccgccgaaggagggcccggtccctccaggctcagtgtggcttctccctgacccccgccctagaacttttgccagtgccttttctgaaactcctgtgtcccgggccccccaggcggagaaggatatgccggattctccctggggctgggctctaggagaccccaaatttgacaccacagaaagcaaataa

SEQ ID NO: 262658 - DNA, 1057 bp, Homo Sapiens
  misc_feature (858)..(858): n is a, c, g, or t
  misc_feature (1002)..(1002): n is a, c, g, or t
aggtagcgaggcctgggtggcgaattcggcacgagggcccgtcccgccggtgtctggcttgcctcagctcacaggcttttcccgagcgccagtccctgccaggacctccgcagccagcaccttctcttgcgacctttttcttaccctctcattcctccctcgccccttcagccctgtcacctcctccttcctagatggcctcccgtgtccttccctttccactgattttatttttccgtttccaaaccaccgtcttgtgatgcctgccatgcttgcgtaccttgcaggacctgaacccgcggcgggacatctcctcctggctggcccagtggttccctagaaccccagccaggtccgtggtggccctgaagacccccatcaaggtggagctggtggcagggaaaacctacaggtggtgtgtgtgtggccgcagcaagaagcagcccttctgtgacggctcccacttcttccaacgcactggcctatctccactcaagttcaaggcccaagagacccgcatggtggcactctgtacctgcaaggccactcagaggcccccgtactgcgatggcacccacaggagtgagcgcgtgcagaaggcagaagtgggctccccactctgagggggctgctgctgtccagccacaggtggccttggctccaggcctctgacaggcacccccttctgtgggaaaggaaacaggtgctgagcccaagagactctggtacccactgctggctcatgaaggaagaattattccttataacctaaaagtctccagtctggggcaggcgggagtgggccctggttcaatgtttgctgatggggaagatggcaaaaacaagcctgcccaaccncgggaggggcggccttcggagattctgaaaaaccttggtcggcccgcttcgggccccctcgagaaacttttttctaaacccctttccgttttggcggccgccggggcccccagttagggtgaacggggaaacatgggtggccanaaaacttgtgttttcccctatgggagaggaattcccgggggccaccatgagacct

SEQ ID NO: 262659 - DNA, 948 bp, Homo Sapiens
taaggtagcgaggcctgggtggcgaattcggcacgaggaagacaaacctctcgcaaagccagaagcagatgctctcaaaaacaggcctaaggaatctgttcccagaagaggcctggggagcagcttttggggctcagaggccagtctggggggaggcaggcagtgtgactgaaggccggcgcaggcctgtttcggactagggtgtagcatatttagtaggatgctcacatgttgtagggatgggtgagggctaaggggcttggctcttgtacgggatggatgatgtgagcgcacagttcgtagggtcaggcgtcttgcggtaggaaaggggcagggttcgatacctctggggtgtggcgtgttctctcttgcccacctccccaagctcctttaaccaggagcttccctcccagagtgagctacgtcttgggaggattgaagcagggaggtggcagtggctagagttgctcagatcggctcagatgaaggcccaggggtcaaagcatttgctcaccacaactgagtctggaaggcactgtgcagccaaaccctcttgtccaatcacatgcaggccccaggcccctcagaaacgccctggtggagggaggagcccaacagatagggtcagggagtcagtggggaaagcagaggggagagcttagagtgaaacttgaaactgctatggacatggaggtcagatgggaacttggaactgggcatgaatcctgaatggtggggaaacttgaagccatcacagccaagaaggtggggttccatgacctgccctgaggtcagcagctcccagactcctttgccctcactagggaaaccccagtcaccggacttgtccccaaggaagtgaagagaggccccatttttgagtgttgtgtgtccaaaacagtgttgtgtcactggtggtcatgttgcttagttgaagagaataaaggg

SEQ ID NO: 262660 - DNA, 1405 bp, Homo Sapiens
  misc_feature (1237)..(1256): n is a, c, g, or t
  misc_feature (1258)..(1262): n is a, c, g, or t
  misc_feature (1264)..(1264): n is a, c, g, or t
taggtagcgaggcctgggtggcgaattcggcacgagggtcatctccaaaccttccaaaaagaagcagtcattgaaaaatgctgacttatgcattgcctcaggaacaaaggtggctctgtttaatcgactacgatcccagacagttagtaccagatacttgcatgtagaaggaggtaattttcatgccagttcacagcagtggggagccttttttattcatctcttggatgatgatgaatcagaaggagaagaattcacagtccgagatggctacatccattatggacaaacagtcaaacttgtgtgctcagttactggcatggcactcccaagattgataattaggaaagttgataagcagaccgcattattggatgcagatgatcctgtgtcacaactccataaatgtgcattttaccttaaggatacagaaagaatgtatttgtgcctttctcaagaaagaataattcaatttcaggccactccatgtccaaaagaaccaaataaagagatgataaatgatggcgcttcctggacaatcattagcacagataaggcagagtatacattttatgagggaatgggccctgtccttgccccagtcactcctgtgcctgtggtagagagccttcagttgaatggcggtggggacgtagcaatgcttgaacttacaggacagaatttcactccaaatttacgagtgtggtttggggatgtagaagctgaaactatgtacaggtgtggagagagtatgctctgtgtcgtcccagacatttctgcattccgagaaggttggagatgggtccggcaaccagtccaggttccagtaactttggtccgaaatgatggaatcatttattccaccagccttacctttacctacacaccagaaccagggccgcggccacattgcagtgcagcaggagcaatccttcgagccaattcaagccaggtgccccctaacgaatcaaacacaaacagcgagggaagttacacaaacgccagcacaaattcaaccagtgtcacatcatctacagccacagtggtatcctaactaccgtctttttgctaggacttaaactgacttgagtgtggcaaaaagttaacaaaaaaggagaaaaaatgaacaatcgtttgtggtttcttgggaaaacttttcataccaggtgatactattcaaaaaccccgttgtctccctgcaagtgctgatttgaaatgcagaagccacagtaaaaannnnnnnnnnnnnnnnnnnnannnnncntgttggccgcctcgtccctccacaagatacttactagattcttcttgttgcgccgcggccccaggaaggaagagcatggtggtcatatgttgtcttacgaggaacatgcctgatcgagaacagctgggtagtattcccaac

SEQ ID NO: 262661 - DNA, 1229 bp, Homo Sapiens
  misc_feature (875)..(875): n is a, c, g, or t
gtagcgaggcctgggtggcgaattcggcacgagggaaatagtgaccaagaaatgcagcagctaaacttggaaggaaagaactattgcacagccaaaacattgtatatatctgactcagacaagcgaaagcacttcatgttgtctgtaaagatgttctatggcaacagtgatgacattggtgtgttcctcagcaagcggataaaagtcatctccaaaccttccaaaaagaagcagtcattgaaaaatgctgacttatgcattgcctcaggaacaaaggtggctctgtttaatcgactacgatcccagacagttagtaccagatacttgcatgtagaaggaggtaattttcatgccagttcacagcagtggggagccttttttattcatctcttggatgatgatgaatcagaaggagaagaattcacagtccgagatggctacatccattatggacaaacagtcaaacttgtgtgctcagttactggcatggcactcccaagattgataattaggaaagttgataagcagaccgcattattggatgcagatgatcctgtgtcacaactccataaatgtgcattttaccttaaggatacagaaagaatgtatttgtgcctttctcaagaaagaataattcaatttcaggccactccatgtccaaaagaaccaaataaagagatgataaatgatggcgcttcctggacaatcattagcacagataaggcagagtatacattttatgagggaatgggccctgtccttgccccagtcactcctgtgcctgtggtagagagccttcagttgaatggcggtggggacgtagcaatgcttgaactttacaggacagaatttcactccaaatttaccagtgtggntttggggatgtagaagctgaaactatgtacaggtgtggagagagtatgctctgtgtcgtcccagacatttctgcattccgagaaagttggagatgggtcccggcaaccagtccaggttccagtaactttggtccgaaatgatgggatcatttattccaccagcccttacctttatctacacaccagaaaccaggccgcggccacattgcagtgcagcaagagcaatcccttcgaagccaattcaagccagggtgccccctaacgaatccaacccaacccgccgaggggaatttcaccaacaccagcccaaatccaaccagtgtcacatcatctaaaagccacagtggtattcct

SEQ ID NO: 262662 - DNA, 729 bp, Homo Sapiens
taaggtagcgaggcctgggtggcgaattcggcacgaggctatgccttgggagctgtggggggcgtctgcgccctggccaatgtcctgggggctcaggtgtgccagctggagcgactgtgctgcacggggcaatgggaagatgcccagaaactgcagcaccgcctcattgagccaaacgctgcggtgacccggcgctttgggatcccagggctgaagaaaatcatggactggtttggctactatggaggcccctgccgcgcccccttgcaggagctgagccccgctgaggaggaggcactgcgcatggatttcaccagcaacggctggctctgagggcaggcagggtccatggctggcctgagcccatctcagcctcctgccttgcacttgcagcctgaagcggagagcacagggggatgagggtggcaggcagcggggagccgatagaggctcctttgcctgctgtggtcctccaggcagcctttcacaggcacgcccatgcatatctcctattctaacggcccctgacctctcccttttggatcctaaactgtgtctctggtctgaagactgggaaggagcaatttctcaatttatctttctactgtggatgctttcctacgccctgaggcacatgaagtcagaaaggaagggcagaggggcaagtaggcacagtaagggaatcggcttagctcgcgcacccagtcggaagacaagagcttccacccg

SEQ ID NO: 262663 - DNA, 1008 bp, Homo Sapiens
aaaccgtggcagtactataacggtttaaggtagcgaggctgggtggcggtcgcctggtgacccctgtgagttatgcatctgccaggcagatggctcggtgagctgcaagaggacagactgtgtggactcctgccctcacccgatccggatccctggacagtgctgcccagactgttcagcaggctgcacctacacaggcagaatcttctataacaacgagaccttcccgtctgtgctggacccatgtctgagctgcatctgcctgctgggctcagtggcctgttcccccgtggactgccccatcacctgtacctaccctttccaccctgacggggagtgctgccccgtgtgccgagactgcaactacgagggaaggaaggtggcgaatggccaggtgttcaccttggatgatgaaccctgcacccggtgcacgtgccagctgggagaggtgagctgtgagaaggttccctgccagcgggcctgtgccgaccctgccctgcttcctggggactgctgctcttcctgtccagattccctgtctcctctggaagaaaagcaggggctctcccctcacggaaatgtggcattcagcaaagctggtcggagcctgcatggagacactgaggcccctgtcaactgtagctcctgtcctgggcccccgacagcatcaccctcgaggccggtgcttcatctcctccagctccttttaagaacgaacttgatgaaaacacagactttacctacaagcccggcaggagctcatggtccacactcactcgcctttggggctgacacccactttcccagggggagcctggggcctccccctccactctcaccaagggccttccaaccctcccaggaagccccacctccacctcttagctttcccaaggggcctcctccagcccacctcccggtggactcccaaaagggtttcggtcctccagccttcttggggcccccataaacaagtgttaagggtggcccttccccccggcccgggga

SEQ ID NO: 262664 - DNA, 970 bp, Homo Sapiens
ccccgttggcggtacagccccagtgtatggaatcccagccggacgcaactcttcctccaggagaacttgtgcagtcccaacccttctcaaaagatgagccaggccacgcggtccaggggaggatgctgacagtggaaacgacttcctccattcttacagcacattccaaaacacttcttgggaacaaggttacatccagccttgggggtcttccatcctcaccagggcccctgcaggagggagcccagggcatcccccaccaggttcatccttggagctgccctgcacacaccctgggccactggcagaggtcctctctccagagtctcccggacacagtgacctccttacatggtggactcttccccccgagaagcccccactgggggctgctgggggccagggtgggtggtggctgcaagggctgtggagagtctagaggtggtgggagaaagcacgcgaggcccgaggagggtgatgggggtcttcgaggggctggggtccatcatggaaagtgctgaagcttccgtcaggagggtgccaggcagaggaggccacctggacactatctgggccccagaggctgagaacgagcgctctggagtcacaggaggtggctgaggagcccctggggaagctagaggtagagtgggggctcctggaggggtcgaaggccctggtgagagtcgaggggaggccccaggctcccctgggaaagtggctgtcagccccaaagcgagtgagtgtggaccatgagctcctgccgggcttgtaggtaaagtctgtgttttcatcaagttcgttcttaaaaggagctggaggagatgaagcaccggcctcgagggtgatgctgtcgggggcccaggacaggagctacagttgacaggggcctcagtgtctccatgcaggctccgaccagctttgctgaatgccacatttccgtgaggcctcgtgccgaattcgccacccc

SEQ ID NO: 262665 - DNA, 1149 bp, Homo Sapiens
  misc_feature (1060)..(1060): n is a, c, g, or t
aaccagccagtgtacaacacagctataacgacggcagtactataacggttctaaggtagcgaggcctgggtggcgaatcggcacgaggctctgtgactgcacttagcattcttcagcacctggtgtgccacagcggagcagtcgtctccctattactgtcaggagtgggggcagattctgctgctggggaaggaaacaggagcctggttcacaggcttagtgatggagatatgacctcagccctaaggggggttgctgatgaccaaggacagcacccactgttgaagatgcttcttcacctgttggctttctcttctgcagcaacaggtcaccttcaagccagtgtcctgacccagtgccttaaggttttggtgaaattagccgaaaacacttcctgtgatttcttgcccaggttccagtgtgtgttccaagtgctgccaaagtgcctcagcccagagacacccctgcctagcgtgctgctggctgttgagctcctctccctgctggcggaccacgaccagctggcacctcagctctgttcccactcagaaggctgcctcctgctgctgctgtacatgtacatcacatcacggcctgacagagtggccttggagacacaatggctccagctggaacaagaggtggtgtggctcctggctaagcttggtgtgcagagccccttgcccccagtcactggctccaactgccagtgtaatgtggaggtggtcagagcgctcacggtgatgttgcacagacagtggctgacagttgcggagggcagggggacccccaaggaccgaccagcagaggcggacagtgcgctgtctgcgggacacggtgctgctgctgcacggcctatcgcagaaggacaagctcttcatgaatgcactgcgtggaggtcctgcatcagtttgacccaggtgatgccgggggtcagcatgctcatccgagggcttcctgatgtgacggactgtgaagaggcagccctggatgacctctgtgccgcggaaaccgatgtggaagaccccgaggtggagtgtggctgaggacctgagtgtcncacacatggtggcaccagcaccactcctttccttaccacatcaactgattaaagcagtgaccagcaggaactgcccagagaactggaaa

SEQ ID NO: 262666 - DNA, 990 bp, Homo Sapiens
  misc_feature (921)..(921): n is a, c, g, or t
  misc_feature (940)..(940): n is a, c, g, or t
gagcgaggcctgggtggcgaattcggcacgagggataccccatggagcaactgtaaaacgaatgtacatctacagtggcaacagcctgcaggataccaaggctcccatgatgcctctgagctgtttcctgggcaatgtctatgctgagagtgtagatgttcttcgagatggaactggacctgcaggtttacgacttcgcctacttgctgcaggttgtggacctggcctattagcagatgccaagatgcgggtatttgaacgttcagtgtattttggtgattcctgccaagatgttcttagcatgcttggctctccacacaaagtcttctataaatcagaagacaagatgaaaattcattctccttcccctcataaacaagttccatcgaagtgtaatgactacttttttaactacttcactcttggagtggacatcctctttgatgcgaatacacacaaagtgaagaagtttgttctacacaccaattaccctgggcattataatttcaacatttatcatcgctgtgagttcaagatcccactagccataaagaaagaaaacgcagatggtcagacagaaacatgcacgacctacagcaagtgggacaacatccaggagctcctgggccaccctgtggagaagcctgttgtcctgcacaggtcttcctccccaaacaacaccaacccatttggttccacattctgctttggtcttcagcgaatgatctttgaggtcatgcagaacaaccacattgcctcggtgaccctgtatggcccccccaggcctggtagccacctgagaacagcggaactcccctagggacaccaccacccatgcccctctgtcccgtggaactgtgcatcacatccctgctcagtgggcctctgtaccacccctggtggggttttcttggacactgnccagtgcttaaaggcttgntgtgaaatttttctgaggttggccttcagctggggtgctctggccagggg

SEQ ID NO: 262667 - DNA, 952 bp, Homo Sapiens
  misc_feature (746)..(746): n is a, c, g, or t
  misc_feature (871)..(871): n is a, c, g, or t
agcgcgccagtactccccggtgtaaggtagcgaggcctgggtggcgaattcggcacgagggtacttatggatgaagaagctctgcaaagtgacaataggaacaaaacatcggcagtttctggcttggatcatatttcctttttccttcagactgtgaagaaaagtgagggaaaaaaggtgagagacaaaggaattgggtatacctcgtttaaacctgctcagtttctctgctctgccttgaggagacactgtagtaagcatttgatagagacagtgatcccacttcacgtagttacctgaggcacatgccatagataggcagcatctcctttaaatcaactgcaacagggattacgaaatcagttggggcaggcattatttctcaagcagattgttttgtatcctctacagcaaaagggcaaaggtcttattctgtagaactggattctaagatgcaatttcttcattcctttagctctcgccatctgtcactgtttaactctttgtggctatgtggtttgtctccccacatagcttctaagttcttagagagaagacattgggtcttactgtatgtcccctgtgcctggaatagggcttgaggaggggtggtccagagctgagctagcacatatggtaaccactagcctcatgagctatttaatttaaaactaagattaactgaagttaaaaattcagttcctcagttgcaccagccacatccttaagtactcagtagccgcacnatagcttgtggttaccatattggataggacagataaaggacattgccatcatcatacaaagttctcttggatagcactggtgtaaagcatccataaactaagtaatctacatatgcttttaaggncagattgttttaagacattttggaattggttttttttctgtgaatataacggaggatggggggggtaagggatttaaccta

SEQ ID NO: 262668 - DNA, 980 bp, Homo Sapiens
  misc_feature (54)..(210): n is a, c, g, or t
gggcagtactactcacggtgttaaggtagcgaggcctgggtggcgaattcggcnnnnnnnnnnnnnnnnnnnnnnnnnnnnnnnnnnnnnnnnnnnnnnnnnnnnnnnnnnnnnnnnnnnnnnnnnnnnnnnnnnnnnnnnnnnnnnnnnnnnnnnnnnnnnnnnnnnnnnnnnnnnnnnnnnnnnnnnnnnnnnnnnnnnnnnnnnnnngagtgtattctatcaggattctgactagagtgctctagagtatgacatagcataggcaatgtcttaacaagcttcaaaattctaggaacaatgaaactaggaaaaaagctctgaaaaatgccagggattcaactgcctccctggcctttccctgccaatcaatgtgccccagcagccaattaacacagcactgtgtgcaggcttgtaaagtagaccttccagttctgcgtataatcaagaccttattgtccatgaactcaatgttagagaaggtttagctgtctaccaactcttgtgcagagtttctgtgaagtcacgtacagggttgcaacgaatctggaaaaccaacatgcagacatttctgaggacagatctttgaacactttctattgtacaaggtacccaaaatgggatgcaaacttgaatctggttgatcttctgaaaatacatacctgtgttttaagatctgcttgagcaaacctttgaaccatggaaatttgaaacaatgatttccagggtcgaaataattccagtatagccatataaatacgcacaaatgaatctggcttagcacagggttacaacataatcttttatcctttagtgcatttggcaaataggtggtgtatgggaaataaaacatagatcttgcatattaatggaaacatagctctgcataatcaggctggggaaaattagcattctgtgaacaaagtcaacaaattctggcctcgcattagttttcctattataattaaaacttagttttg

SEQ ID NO: 262669 - DNA, 1729 bp, Homo Sapiens
  misc_feature (1056)..(1065): n is a, c, g, or t
  misc_feature (1321)..(1321): n is a, c, g, or t
cgtcccctcccgtttgtccgcggcaccccattacgtcctaagtagcgaggcctgggtggcgaattcggcacgaggggcgggcgagcccccgaggcccgagggagagggaagagcgccgggcccgggtcgcggaggcgggcgccgccggaacgcgaagcgcggggctactgcgggcaggcgcgagttcgcgcagcaccgcccccggcgtgacctgctggtcgcttccggcgcgggaggagaatgtggccgccttgcgggacgctccggaccctggccttggcgcggtcgcggggagcccgggcctgcagcggggatgggggcgtttcctacacgcagggccagagtccggagccgcggacccgcgagtatttctactacgtggaccaccagggccagcttttcctggatgattccaaaatgaagaatttcatcacctgcttcaaagacccgcagttcctggtcaccttcttctcccgcctgagacccaaccgcagcgggcgctacgaggccgctttccccttcctctcgccctgcggcagagagcgcaacttcctgcgctgcgaggaccggccggtggtcttcacgcacctgctgaccgccgaccacgggcctccgcgcctctcctactgcggcggtggcgaggccctggccgtgcccttcgagccggcgcgcctgctgcccctgggcgccaacgggcgcctgtaccacccggcgccagaacgtgcggccggcgttattatttagcgctccggcctggtcttcgagctcagcgcctgcttcgagtacgggcccttctcgcctaaaactgacatcccccaccgtccccgatgaaaccctaaggccccccctgctaactccagctcctgcaggcgcccctccgaccgccgcccggcgggccaccgggcgcctctttggcgcgccccaaggttgcacgtaaaccccttcctgttcaccgggcgctccgcctctgatgtgacgaacccacgcccagcctctccggtgcatcccgcccccctaatggaccgcgcgcttgaaatgttcgacacggtcctgcgnnnnnnnnnngcgcgccacacctatcctacaccgccccccctctattacacaagcccccccgcctcggagccataagtgacaagccacaactctcccctggccctgctcttctacagcacgttggtgttgggcggggggggcgcccaacttcagtgtttttgttgcgccttcctccccccacctccgccgtcatagtcgagtcgcggctcgcgccattcgtgtcctaccgccctcggcgatcggtttttcacccagcattttctcntctctcgcgtcccccgcgcgcgcctcctctctgtcttctcgtttgtccgcgccgagatttctcggtgtctcgccccggccgccggctcgtcgtcccgcccggtcgtgcctctagccgggcggggcggttgatcgtctgcgcgtcgcgaactttacccccggcggaccgactgatcacacctatcttcctccctcctgtttcccgccacgacggggcctctagtctctcgccttaacccgcctgcctttcgcctcacacttacgccactttccgcgacaccgcccgttaatatgcatcgcctccctcccttcgttcctctacggtggccgccgcaccccctgccgactgaggtggtgccgttatccggcgcccgcgcttcgcgtcctgcaaccggccccctcttccgcg

SEQ ID NO: 262670 - DNA, 791 bp, Homo Sapiens
  misc_feature (746)..(746): n is a, c, g, or t
cggcagtactctcacggttaaggtagcgaggctgggtggcgaattcggcacgagggcaagctgttagagatgcagccacggaaaccgtgacaactgccatgtcacaagaaaatacctgccagtcaacagagtttgccttctgccaggtggatgcctccatcgctctggccctggccctggccgtcctgtgtgatctgctccagcagtgggaccagttggcccctggactgcccatcctgctgggatggctgttgggagagagtgatgacctcgtggcctgtgtggagagcatgcatcaggtggaagaagactacctgtttgaaaaagcagaagtcaacttttgggccgagaccctgatctttgtgaaatacctctgcaagcacctcttctgtctcctctcaaagtccggctggcgtcccccaagccctgagatgctctgtcaccttcaaaggatggtgtcagagcagtgccacctcctgtctcagttcttcagagagcttccaccagctgctgagtttgtgaagacagtggagttcacaagactacgcattcaagaggaaaggactttggcttgcttgaggctgctggcctttttggaaggaaaggaaggggaagacaccctagttctcagtgtttgggactcttatgcagaatcgaggcagttaactcttccaagaacagaagcggcatgttgaagaaaatctgggggattgggatggggggtatgtgtggatttttcctccacntaaatctgcaggaaacatgttgaacataaattcaaaaattttatc

SEQ ID NO: 262671 - DNA, 1004 bp, Homo Sapiens
  misc_feature (678)..(678): n is a, c, g, or t
  misc_feature (747)..(747): n is a, c, g, or t
ggcagtaacctcgggttataggtagcgaggcctgggtggcgaaatcggcacgaggggatgacggagagtccgaggcggccaagcgagctgattcagccgatagctgagaaaatcattgccaagtacaaagccaaagaggaggaggcaccccttctgttcttcgtagccggggaggatgacatgactgactccctgcgagattacaccaacctgcctgaggctgcccctttgctcaccatcctggacatgtcagcccgggccaagtacgtgatggacgtggaggagatcacccccgccatcgtggaggcctttgtgaatgacttcctagcagagaagctcaaaccggagcccatctagcgtggctccggcctcctgagacgttatttaaaactcagccttctcctcctccccctccttccttccgcccttggacttacccagcgtgccccgaatcccaccacccaagtgtccagcctctctgtggtgccttgtttctgcagtaacctcctcagccagcaccctggggtgcggaatcagcagcggcagagtccaccgtgtttggagactctgtttgggagcacgggatggccgggggcccggccagagcggggctgcatggctttcgcaaagtcactagctttaggtgaaggatctgccagggtgtcctgggcagagtgnagcgtggagggcccgtggggtcccgctcgggctctgactctgacgtcggcacacacggccccggacggncagagggggaaccgccgggtgacaccctgcgtggcaggctgagctgaaaaagggcctccgccttatagctgcgggtggaggactcccttttcctaagcgaaccaagtctcctccagtctgagaagaaaaaccagccaacttctgggggttctcagggcaggggatacttccaaaagccaacaaggaaacccctcacaacaggtttttttgcggtgaaacacaaaaaaatcgcaacctctaggggcaatggggctctt

SEQ ID NO: 262672 - DNA, 999 bp, Homo Sapiens
  misc_feature (34)..(34): n is a, c, g, or t
tccgctggctgattcccacaaccccaggggtgcntggctgaggagtttactgcagaaaccaaggcaccaacagagaggcctggacacttggggtgttgggattcgggggcacgctgggtaagtccaagggcggaaggaaaggaggggggaggaggagaaggctgagttttaaataacgtctcaggaggccggagccacgctagatgggctccggtttgagcttctctgctaggaagtcattcacaaaggcctccacgatggcgggggtgatctcctccacgtccatcacgtacttggcccgggctgacatgtccaggatggtgagcaaaggggcagcctcaggcaggttggtgtaatctcgcagggagtcagtcatgtcatcctccccggctacgaagaacagaaggggtgcctcctcctctttggctttgtacttggcaatgattttctcagctatcggctgaatcagctgcttggccgcctcggactctccgtcatcctcagaatctacaaaaaggacgaggcaggggccctcgttaagctgcgcggcgttggagtcggagagctccagcacgggcttggggtgccaggggaactcccggcagtcctcgtcgttcagcacctccacccgcccctgccgcgtgatcacctcgccctgcgggtccagcatgatgagcgtggggatgccttggattccgtacagccggttgaggcgcgaccgccgggcctcatccgtgtaggggacggcgagccagggcatctcactgaagtactgtttgaaggactcctccgacctgtctgcactaacgaagatgatctcgaagttctggcctgcctccttgatcttccggtaggattccaccaggacccgggtgaggcttcggcagggcggacaccaatgtgcggagaaatagacgcccacgtgagacccctccaggctgctgctctccagagactgcccattgtttctaagcaagggccctgcaatgacttccgtaa

SEQ ID NO: 262673 - DNA, 927 bp, Homo Sapiens
  misc_feature (799)..(799): n is a, c, g, or t
  misc_feature (804)..(804): n is a, c, g, or t
gctgggtggcgaattcggcacgaggggggtctcacgtgggcgtctatttctccgcacattggtgtccgccctgccgaagcctcacccgggtcctggtggaatcctaccggaagatcaaggaggcaggccagaacttcgagatcatcttcgttagtgcagacaggtcggaggagtccttcaaacagtacttcagtgagatgccctggctcgccgtcccctacacggatgaggcccggcggtcgcgcctcaaccggctgtacggaatccaaggcatccccacgctcatcatgctggacccgcagggcgaggtgatcacgcggcaggggcgggtggaggtgctgaacgacgaggactgccgggagttcccctggcaccccaagcccgtgctggagctctccgactccaacgccgcgcagcttaacgagggcccctgcctcgtcctttttgtagattctgaggatgacggagagtccgaggcggccaagcagctgattcagccgatagctgagaaaatcattgccaagtacaaagccaaagaggaggaggcaccccttctgttcttcgtagccggggaggatgacatgactgactccctgcgagattacaccaacctgcctgaggctgcccctttgctcaccatcctggacatgtcagcccgggccaagtacgtgatggacgtggaggagatcacccccgccatcgtggaagcctttgtgaatgacttcctagcagagaagctcaaaccgggagcccatctagcgtggctccggccctcctgagacgttatttaaaactcagnctttntcctcctccccctccttccttccggccttggacttacccaggcgtgccccgaatccccaccaccaaagtgtcccagccctctctgggggggccttggttccgcagtaaaactcctcaccagcc

SEQ ID NO: 262674 - DNA, 1408 bp, Homo Sapiens
ggcctgggtggcgaattcggcacgagggaatgacgcccgggacctgcatggccaggcagagtcagcagctgcagtgtggaagggacacgtgatggaccgtaggaagaaggcactgaccgactacaagaagctgcgggccttctttgtggaggaggaggagcatttcctgcaggaggctgagaaggaggaggggctccctgaggacgagctggctgaccccactgagcggttcaggtcactgctgcaggcggtctcggagctggagaagaagcatcgcaacctgggcctcagcatgctgctgcagtgatggcgccaacccgtggcagtcccagagctggaggcaggaggatggatcctcatctccatgggaagtgtcagcgtgtggctgccagggaagcgtggcaggcgcctggccttgggtccatctacatagttgcgtgtttcaacaatgtccatttatccttcaccccgaggcgtgttttgggggctgcaaacacctcccggtagaggctggacctgaggacccttcccacctgtgcccgtcccttcctgaagtcctagccacagcccatcctccatgagtcccggcagctctgggtcatgcccttccctggtcacccatctgcccctcacccgtcatccagggacccagaccctgcaccttccatgtgggcccacagatccttggcaggtacctgaggtgcaccattgagtgtcggatttggggttagcatccagaaagaagaatgcgcatgacgctctgtgaaggctggaactcaggtcttcagggagagaaaggaagactggattgcaccttgatgcctcctgaggaggcggcccccccttgaggtgggcgtgggcccggcccagccttatccaagtcgctctgtccaccgccccccttcctggcccccaccccagctcctgtgcctcccaggagccctccctgtgctccacctgcctccgcagaaggaagcctcttatcatctgtattccatagggtgaggggactggcaggtggctaaccccatttagcatctccaggccctgccatggtgtctcatcttgctgttatctctagctctttccctcctcccatttcctttagtagttgaattttgcaaagcttgtagcagtagctcagttgcctgcagcatccttgtgtgtagataaattagtcgacagaaactcagcactggggacaggattgcaaagtcggggacatagatgcagacagttgttgagatttggggatagccgggcttgtgagcggtgcccatttccagatgaagcctttcagcccttctgagtccccggcccttggtgcgatgtctgtgagtttgacctgcccagcgtgtgggctggctcaatgctgaataaagtgggtttgtgtaacccaaacgctctg

SEQ ID NO: 262675 - DNA, 979 bp, Homo Sapiens
cggcagtaccctacggtttaaggtagcgaggcctgggtggcgaattcggcacgaggctgagtagctggaactacagattgtcttcttacataatgatagatacattgaatttcattcgcaatcaggtttttactacaaaaccagaataccaaagtttgggagagatttctcttaccactatccatcctgtgacttgtactttgttggtgcaagttctgaagtttataggttaaacttagaacaaggacgatacctgaatcctctacaaactgatgctgcggagaataatgtttgtgacataaattcagtgcatggcttgtttgccacaggaaccatagagggtagagtggagtgctgggacccaagaactcgaaacagagttggcctgttagactgcgccttaaacagtgtcacagcagattcagagataaacagtttaccaacaatctctgctttgaaatttaatggtgccttgaccatggcagttggaacaaccacagggcaggttttattatatgaccttcgatctgataagccattgctagttaaagatcaccagtatgggctgcccattaagtccgttcatttccaggattcattagatctgattttgtctgctgactctcgaattgtcaagatgtggaataagaactccggaaaaatatttacttccttggagccagagcatgaccttaatgatgtttgtctctaccccaactcaggcatgcttctgacggccaatgaaacccccaagatgggcatctattacattccattctctaaaccagtggctgtcccagttctctaaaccaaagtctgccacccagccgtttctggtgatgaccgacaccgttcaatatctgctggggccctgggggggtagcccattaatccacatggaacctgttggaccctttgaaaaggtttggggtccggcttccttcgggggggttccctccttagaaaaccctgaccccaa

SEQ ID NO: 262676 - DNA, 740 bp, Homo Sapiens
ggggaattcggcacgaggcaagatggcggcgtccgtgcgacaggcacgcagcctactaggtgtggcggcgaccctggccccgggttcccgtggctaccgggcgcggccgcccccgcgccgcaggccgggaccccggtggccagaccccgaggacctcctgaccccgcggtggcagctgggaccgcgctacgcggctaagcagttcgcgcgttacggcgccgcctccggggtggtccccggttcgttatggccgtcgccggagcagctgcgggagctggaggccgaagaacgcgaatggtacccgagcctggcgaccatgcaggagtcgctgcgggtgaagcagctggccgaagagcagaagcgtcgggagagggagcagcacatcgcagagtgcatggccaagatgccacagatgattgtgaactggcagcagcagcagcgggagaactgggagaaggcccaggctgacaaggagaggagggcccgactgcaggctgaggcccaggagctcctgggctaccaggtggacccaaggagtgcccgcttccaggagctgctccaggacctagagaagaaggagcgcaagcgcctcaaggaggaaaaacagaaacggaagaaggaggcgcgagctgctgcattggctgcagctgtggctcaagacccagcagcctctggggcacccagctcctgaggctttgtcccttcccaataaagcctgctacctggcagtacccctgaag

SEQ ID NO: 262677 - DNA, 1061 bp, Homo Sapiens
  misc_feature (878)..(878): n is a, c, g, or t
ttaaaggtagcgaggctgggtgcagaattcggcacgagggtctgtgttcctgcacttttcccgggctctgagctggattgatggggccagtctcccccctcccatcttgaggtcgttctccacattccttccagcacacctgtcctttccatagccctttttggacctttagaaccacagatgataggaccagcccaatgagccacagtcagagagtagattgtgcatgtgtgagcacccagctactggggacgggggctctcccacgacccctcctcctgtgtttgccagagctcccatctgccccactcgcctttgccccgtcatcgatgattcaggcagagccagatgcgttaggtccctggaggaaggactgactggaccagagggaccctctggctcaggagggttgggtccctgggaggccggcagccaggccacagaatccacacgtggaccattgtgggtccctgggaggccggcagccaggccacggaatccacacgtggaccattgtgggtcccttgggaggccagcagccagactacggaatccacatgtggaccatgggaagtcagtctcttgcgtgtcctagaccttgtgggtggcgccctgcataggggagcagggggaacgggtctgatgtccctgtgctggctgaaggctcagagctgcccgcactccgtagctcatgggatgtgctgggcctgcctttggcgccatgctgcagactccagtgggcctggtttctgcagaatgtccatggtggccgctgcagaattgcaaaggtccctgtagagtaaacctgaggaagaagctgggggtgatggctcgggctcggaccaaccagatgagcctcctgaaagccccctccctgnctgcctgctgacccgtgggcccagctcactcattgccctcagcagccacccagggttggggcaaaagggttagggtcaggttgaccaggaagctgcccaagggacttgggttttgagggtttctcttggaacgcctttagaaaccaggggcctctgttaaagggccccccattttaccccttg

SEQ ID NO: 262678 - DNA, 994 bp, Homo Sapiens
  misc_feature (703)..(703): n is a, c, g, or t
  misc_feature (759)..(759): n is a, c, g, or t
  misc_feature (775)..(775): n is a, c, g, or t
  misc_feature (797)..(797): n is a, c, g, or t
  misc_feature (806)..(806): n is a, c, g, or t
  misc_feature (808)..(808): n is a, c, g, or t
  misc_feature (810)..(810): n is a, c, g, or t
  misc_feature (833)..(833): n is a, c, g, or t
  misc_feature (854)..(862): n is a, c, g, or t
  misc_feature (901)..(901): n is a, c, g, or t
  misc_feature (908)..(909): n is a, c, g, or t
  misc_feature (912)..(912): n is a, c, g, or t
  misc_feature (940)..(941): n is a, c, g, or t
cggcagtactccccggtgtataggtagcgaggcctgggtggcgaattcggcacgaggctagaaccttctctccaagtctggggctaggggcaaggcaccaacaaataatcatacaactacagtaagagaggtttggaatcaaggagacgaaaggtgatagggaccaacccagtcctgggctaccccagcagttagtgactaagaggaggccgggcttggcggaccctctctatggagcgctgtgcctttaagtgcggagaggactctgggttggacttctggggcactgctctgggatgggtgcagtgcggaggacaggctgggggctggggccagggaggagcaccaagtgccagaagcagggcctgcttggttaggggccgagggcccaaaggcatcaggctggacaagatgacctcacagggagcccttccagcttcaggctctttcccctgatggcaagggctaaccctccacccgcatcccccacactccaccatgtctacacctggcggctctagcagatggttatctcccctcccccaccccacgcctccacccggccccgcctgtccgtctgccagtctgccaacagccccactcctggcctttcatctcatgccacggcagccagcctgatgctgcaatcccccacccccggctgtccagctccacagcctctccctgggcttgggccccatangagccaaagacctgggaccccccaggctttggccccctgctgcagacctgcccagngtggtcctgggggggntggccccctccttccccggtcnacccccccncncngggcctcctttcccggggcccgnggacccgcccccgtgaggctnnnnnnnnntacccgtttcctccgtggggccggccccttccttccccnccccccnnggnccttggggactcctcctttgctccgggnnggccttttcccgcccctgttcctttctcgacattcgaggcccccgcgtacccc

SEQ ID NO: 262679 - DNA, 885 bp, Homo Sapiens
  misc_feature (613)..(613): n is a, c, g, or t
  misc_feature (742)..(742): n is a, c, g, or t
  misc_feature (748)..(757): n is a, c, g, or t
tagcgaggcctgggtggcgaattcggcacgaggcatggacctgcacttggcctcttcgggaagatcctccttccaggccccaggctggatgctgggttctggggctgagagtggggctagactgggctggctgccttctgcggagcttctccagccaccaaggctgcctgccccatcccatccctttctaagcaggaaggtctcatgcctgagaatgcctaggccagctccttagacacctatcagagaagcagcatcaacctaggagcagtgggccctggctctgtcactaaatggcagtgagatgtcagacaaattcattcccttctctcagcctccactccctgtctgaaaccagaagactggatcaaggggttcccactggctcctccagcaagacctcggtctttgcttgtcctgctcagatgctggtcatcctgggcatgtccccagtgtggactctggactgggaagggggcaggcccctttggacctgcagttggcctcagcagaaggccttgccttgtgtatgtgactccatatcccgggagcagttgacctttgccaaacactttacagttctgggaggaggaggtaacatagatgcctgggncctgatggtggggccatacccatgtgtcgcctctcactctggcagcctcagaggccccttgctgctggctcccatctccctcccatttgcagaccaaggaaggaagagcaagctgtacaaagggaacanaacccnnnnnnnnnntgtgtaaccagggtggacccccttctctgaaaaggcccaaaaccaggggggaaagcaccagcccttcagtgccagcccccttcctgacccccacccttaaaaatgggaaagccttccaccctggcagg

SEQ ID NO: 262680 - DNA, 754 bp, Homo Sapiens
ctgggcctccacccgctgcctcccctgccacccgcggcctgctcctccacccgcccaggagagccccacctcctccacccctgcctctcctgccagcgccggcctcccctgccacctgccccagtgcccaggaccaaccaaggccctgacagccctgccttctgccctctgccctgcatgggcaggcatttgttccctacctgggtggcctgctcccctgcctgggccctgacttcagctccctgtagtgaagtccaggagggtgggacaggcctgtcaggcctctgggaatctcccaaatcccagaactcaccactcaccatgggcctttaaatgcagtaaactccacctaaccagattcaggggcactatgcccactgcctcctcttcagactctttgcatttcagtgaagagcctggaagaaacccaggggcctcctatgcacagatcttgcagcccagaaccaagtcagcctccctgcgactgcccaggcacactgcccaccaccccacccccgaaacaatgccagcccgctgctttttctatcctcccagtcacctttgcagacaaagaccaggggcagctcccgagggcactgtgaaggctcccatgccacacagtgagaactgtagcctctgcgtccaaggcacacagggtactttctggacccactgctggacagacttgaaggtgtcatgcccggtgtgtgcaggaggaaactaacagttcagtaaactctgccttgaccagcat

SEQ ID NO: 262681 - DNA, 1011 bp, Homo Sapiens
cggcagtactccccgggtataggtagcgaggctgggtggcgaattcggcacgaggcacgcacctggtgccactgaagccttcaaagccattggcacagcatatgcggtactcagcaacccggagaagaggaagcagtatgaccagttcggcgatgacaagagccaggcggcccggcacggccatgggcatggggatttccaccgtggctttgaggccgacatctcccctgaagacctcttcaacatgttctttggcggcggcttcccttctagtaacgtccacgtctacagcaacggccgcatgcgctatacctaccagcaaaggcaggaccgcagggacaaccagggtgatggcgggctaggggtgtttgtgcagctgatgcctatcctcatcctgattctcgtgtcagctctcagccagctcatggtctccagtccaccctacagtctgagtccaagaccgtccgtgggccacatccacaggcgagtcactgaccacctgggtgtcgtctactatgtgggagacactttctccgaagagtacacaggctccagcctcaaaacagtcgagcggaatgtggaagatgattatatcgccaacctccggaacaactgctggaaggagaagcagcagaaggaaggcttgctgtaccgggcacgctactttggcgacacagatatgtaccacagagcacagaagatgggcacccccagctgcagccgactgtcagagactatgaaatccctggagaatttttggtgacatgcactgagccaaggggatgcactgtatatttgaggaaagacaaacaaagaaacaaaattaaaatggaattggaggccgaacgctgcacagctggccctctctctcacccagtaaatgcagaaagctcttaggacagacagaaaacctgccatgggggtgctttccctcccctccaggggctggcgggaggcttcccaatcgcctctcttctaaggatacggaaaccatggccaacgaaagtagaa

SEQ ID NO: 262682 - DNA, 723 bp, Homo Sapiens
  misc_feature (20)..(20): n is a, c, g, or t
ggcagtactcttgggtgttnggtagcgaggctgggtggcgaattcggcacgaggtaggggaagaaaaaatagatcctctggcaaggacccctgaaacacttgtccccacagccccataagctcgagccttccacttccacaagaccaacctgtcactcctggagcccacatcttcaggccaccaggggcaggacaaataggtcctccgtgaagacccctgaaacagttgtccccacagcccctgagctccagccttccacctccacagaccagcctgttacccctgagcctacgtctcaggctactaggggaagaacagatagatcctctgtcaagactcctgaaacagttgtccccacagcccctgagctacaggcttccgactccacagaccagcctgtcacctctgagcccacatctcggaccactaggggaagaaaaaatcggtcctctgtcaagacccctgaaacagttgtgcccgcagcccctgagctccagccttccaactccacagaccaacctgtcacccctgagcccacatctcgggccactaggggcaggacaaataggtcctctgtcaagacccctgaatcaatggtccctatagcccctgagctatcagccttccacctccagaaaacagcttgtcacccctgagcccacatctcgggcactatgtgcaggacaaataggtcctctgtcaagaccctgaacagttgtccc

SEQ ID NO: 262683 - DNA, 874 bp, Homo Sapiens
  misc_feature (718)..(718): n is a, c, g, or t
  misc_feature (758)..(758): n is a, c, g, or t
cggcagtactctaacgggtataaggtagcgaggcctgggtggcgaattcggcacgaggagcttagaaagcttatttcattagtaaatggtttgaaccgtcaaggtccagctgtggtttccactgatggaggaacaggaagaagaggagccttgacatttatctcaagcgccagcagcttctcttggatcaggaagacataaaagtccaatgtcatcttcaatttgtgcaggctccccttggagttgcagagccagtgaagggaagtagaacagttaaaaaaacacccggggaagtgataaatcacagagagagattgcatatgcgggaaaggtgtctcccacaattaaaacaagtggccagagcctccctggcgacctctggtctgcattgccagccctgaagatggctcctaaattacttaagtttaataggtagttaatatagccaaccctccttatgaccccagtgggctgaatggctctgcttgctttaggaactgggcgttgtatggtagagcatcttggccttgacataaaaggtagcatactggctccccagccctgaaccttccctgctagagcaaggcaggggtgagagggggaaggaaagaaaaaggagtggggagtggggtggggagcaaggatgaacagggagcagtagcagcaccagatgtgggcatagcacactgggaagaaattgcagtggccgatctgaaantcttcctctccgccttcctgggttctggtgggaaccccangggaagggaatttaggaaactggcaaggctggctccttaagggctcccctccccgggaggggggaaccccctttggggcttccattccccgggaaaggggccaccctctccccacc

SEQ ID NO: 262684 - DNA, 1060 bp, Homo Sapiens
ggacggcagtactacaacgggcttaaggaagcgaggcctgggtggcgaattcggcacgaggctgggatgagagcgggtcttctgccttcattttggatgcacatcccgctttagccccggcagcctttggtccggctcgtgtccctggggattctcggatctccgaggacaccggacgggagcgcttggccatcctctctccggcagaggagcagacgtttgctttccaagtgcaaaactacagacacgcgcgcgcacacacgcaagcacacgcggagagagaggaaccttgccggtccgaggcagctctgcgcgtcccctcctgcgcttagcatcctcggcccagcgcggcccgcaccgccatggaggtgctggagagcggggagcagggcgtgctgcagtgggaccgcaagctgagcgagctgtcagagcccggggacggcgaggccctcatgtaccacacgcacttctcagaacttctggatgagttttcccagaacgtcttgggtcagctcctgaatgatcctttcctctcagagaagagtgtgtcaatggaggtggaaccttccccgacgtccccggcgcctctcatccaggctgagcacagctactccctgtgcgaggagcctcgggcccagtcgcccttcacccacattaccagtgacagcttcaatgacgatgaggtggaaagtgagaaatggtacctgtctacagacttcccttcaacatccatcaagacagagccaattacagacgaaccacccccaggactcgttccgtctgtcactctgaccatcacagccatctcccaccccgttggaaaaaggaggaacctcctctggaaatgaacactggggggttgattccctcggtgccagaccatttattcctaaaattaaagctggagcctcatgaagtggatcagtttctaaacttctctcctaaagaaggtctgtctgccctccctgtgtccctttgggttatggatatggtctctgggtctacagagagggaatatggcgagagagctgggatgagttacaccacgagatgttgtagc

SEQ ID NO: 262685 - DNA, 1022 bp, Homo Sapiens
ggaacggcagtaactactacgggttaaggtagcgaggcctgggtggcgaattcggcacgaggggacagggcctcggcttcactgtcaacctgccctggaaccaggttgggatgggaaacgctgactacgtggctgccttcctgcacctgctgctcccactggcctttgagtttgaccctgagctggtgctggtctcggcaggatttgactcagccatcggggaccctgaggggcaaatgcaggccacgccagagtgcttcgcccacctcacacagctgctgcaggtgctggccggcggccgggtctgtgccgtgctggagggcggctaccacctggagtcactggcggagtcagtgtgcatgacagtacagacgctgctgggtgacccggccccacccctgtcagggccaatggcgccatgtcagagtgccctagagtccatccagagtgcccgtgctgcccaggccccgcactggaagagcctccagcagcaagatgtgaccgctgtgccgatgagccccagcagccactccccagaggggaggcctccacctctgctgcctgggggtccagtgtgtaaggcagctgcatctgcaccgagctccctcctggaccagccgtgcctctgccccgcaccctctgtccgcaccgctgttgccctgacaacgccggatatcacattggttctgccccctgacgtcatccaacaggaagcgtcagccctgagggaggagacagaagcctgggccaggccacacgagtccctggcccgggaggaggccctcactgcacttgggaagctcctgtacctcttaaatgggatgctggatgggcaggtgaacagtggtatagcagccactccagcctctgctgcagcagccaccctggatgtggctggttccgaaaaggcctgtcccaccgaacccaaaggttgctgggcgtgggccctgggaaaactggaaccggcctccaaccctcccccatgaaggggagagatccttgggcttgaaaatcaggggcaa

SEQ ID NO: 262686 - DNA, 1131 bp, Homo Sapiens
ttttatgttttttttctttggggggggactcaactaaccttagcacgcggcctgggtggcgattcggcacgaggggacagggcctcggcttcactgtcaacctgccctggaaccaggttgggatgggaaacgctgactacgtggctgccttcctgcacctgctgctcccactggcctttgagtttgaccctgagctggtgctggtctcggcaggatttgactcagccatcggggaccctgaggggcaaatgcaggccacgccagagtgcttcgcccacctcacacagctgctgcaggtgctggccggcggccgggtctgtgccgtgctggagggcggctaccacctggagtcactggcggagtcagtgtgcatgacagtacagacgctgctgggtgacccggccccacccctgtcagggccaatggcgccatgtcagagtgccctagagtccatccagagtgcccgtgctgcccaggccccgcactggaagagcctccagcagcaagatgtgaccgctgtgccgatgagccccagcagccactccccagaggggaggcctccacctctgctgcctgggggtccagtgtgtaaggcagctgcatctgcaccgagctccctcctggaccagccgtgcctctgccccgcacccctctggtccgcaccgctgttgccctgacaacgcccggatatcacattggctcctgcccccctgaacctcatcccaacaggaaaacggccagcccctggaaggaaggaagacaagaaagccctggggcccaaggcccacaccgaattcccctggccccgggggagggaaggcccctccaactggcactttgggggaagcctccctgataccctctttaaaatggggcatgcctcgggaatcgggccacggcggaaacacgtgggctaataaccaaacccaccttcccagcccctcccttggctggcacgcacagccccaccccctggggaatgggggggcttggctttccgggaaaaagggccccggttccccccacggggaagcccccacaaaagggccttgcccttgttagcccctggggccccccctgggggcaaaacaatccttgggtgaaacccgggggcacctccccccgagaaac

SEQ ID NO: 262687 - DNA, 1113 bp, Homo Sapiens
  misc_feature (995)..(995): n is a, c, g, or t
  misc_feature (1103)..(1103): n is a, c, g, or t
cggcagtaactcccacggttttaaggtagcgaggctgggtggcgaattcggcacgaggggagcgttcctgaaaggagctgagcaggacaatcctaaccagtacagctggggagagaactatgcaggcagctccgggctgatgagtgcatcacccgagctcggcccggcgcagcgggcgcggagtggcacttttgacttgctggaaatggaccggctggagaggccactggttgacctgccgctcctcctggacccgccctcctacgtgcccgacacggtggacctcaccgatgacgctctggcccgaaaatactggctcacctgctttgaggaggccctggacggggtagtgaagcgcgcagtggcgagccagccagactctgtggatgcagccgagagggcggagaagttccggcagaagtactggaacaagcttcagaccctgaggcagcagcccttcgcctatgggaccctgaccgtgcgcagcctgctggacaccagggagcactgtctgaacgagttcaacttcccggatccctactccaaagtgaagcagcgggagaatggcgtggcgctgaggtgcttccccggggtcgtgcgctccctggacgcgctgggctgggaggaacggcagctggcgctggtgaaaggcctcctggcggggaatgtcttcgactggggggccaaagccgtgtctgctgtccttgaatccgacccctacttttgggtttgaagaagcaagaggaagttacaagaaagaccctggctcgtgggattcctacagcgagtggcttcagagattaaaggggccccctcataaatgtgcccttaattttcgcagataacagtggaatagacatcattttgggaggcttcccctttggcaggaagctactccctaaagggacagaggtcatccctggcgggcaactcaggccccgccctgaacgacgtgacccacagcgagtccctcatcgtggcagagcgtattgcgngcatggaccctgtcgtgcactctgcgctccaggaagagaggctgctgctggtgcagacgggctccagctccccgtgcctcgacctcagccgcctggataaaggggctngccgcactgg

SEQ ID NO: 262688 - DNA, 994 bp, Homo Sapiens
cggcagtactctcacggtgctaaggtagcgaggcctgggtggcgaattcggcacgaggccctggactactacgggctgtacgacgaccgtgggcgcccctatggctacccagctgtgtgtgaggaggacctgatgcccgaggatgaccagcgggccacgcgcaacctcttcattggtaacctggaccacagcgtatctgaggtggagctgcgaagggccttcgagaaatatggcatcatcgaggaggtggtcatcaagaggcctgcccgtggccagggcggtgcctatgccttcctcaagttccagaacctggacatggcccatagggctaaggtggccatgtcgggccgagtgattggtcgcaaccccattaagataggctatggcaaggccaaccccaccactcgtctctgggtgggtggcctgggacctaacacgtcactggcggctctggcccgagagtttgaccgctttgggagcattcggaccattgatcacgtcaaaggagatagctttgcctatattcagtacgagagcttggacgcagcccaggccgcctgtgctaaaatgaggggttttcccttgggtggaccagaccgcaggctccgcgtggattttgccaaagcagaggagactcggtacccccagcagtaccagccctcgccactccctgtgcattatgagctgctcacagatggatacacccggcaccgcaacctggacgccgaccctggtgcgggacaggacgcccccacaccttctgtactcagaccgagaccggactttttttggaaggggactggaaccacccccgtaaaaactcctaaccgcgaaacggccttgaaggcttacagccgctcaatggcgcacaccggaagtgggaagccctcggggggcaagaatgaaaaccctggttctgccccaccccctggaaaaacaaaggggaaaacggggaaagcctttttccggtacccctgcggaaggaaagatctaa

SEQ ID NO: 262689 - DNA, 1038 bp, Homo Sapiens
ggtagcgaggctgggtggcgaattcggcacgagggagcagagggagcagcagagaaggggcaaagggctatcaatgtaatttgcctctacagctaaacacacaggccgtaatcatagccattttactaaatgcccataaaactaaaaaacaaataggaaacctccggattacagggccttctctgagcagggagtggcgcaatcaagtgctatctgcgctaagtcccagcttgcagtgagtgacccaggaggcgcgggtaaacagagagaggaccccgttccctgtcccccccatcaaacctccaaggctgaatgcctccgaggctgagcgccgggggaacggggggcttcctgggaacgcagtcccctccgtgtgggggtcctcagctcccctgtgtgagcctgtgccatgcggaacgggaccacagcctcagcctcacaacgtgcctgtgacccagcgggagtggaacccaggcctctggcaccggggaccctcagaaccctgcctgcaagggaaccccagactttgaggggaacagcctcgtgcagccctcatttctcccttacagctgtgggacttcacagacaagcaaaagaaagggagcattttagcaagagcagcctcaacgtcaccccctagagagcagaaaaaaagggatgctaccccaggtcttactctagggtctcccctcggccacactccctgactcaacagaatctcaagcgccagaatcaccaaaggacattctaagtgtcattccgccctgagtgtcagaaaatgcctgcagtggcatctcaagtgggcccaacagcctgaatgtaagggaggtgtggcccccggaaggaagggccgcccctagcaaaaagaggcacccaaggacaccaaaacaggccgtgggaagccaggcaagacaaggtggcacacaacaggcaaagcccgggaacgcggcggccaaagtggcgaagggacaaccaaggcacagaaccatgcccgaaccaggctcacccgcacaacatactagaaacgcgacattcaaa

SEQ ID NO: 262690 - DNA, 1005 bp, Homo Sapiens
  misc_feature (589)..(589): n is a, c, g, or t
tgtcctagatttaacctcaccacagggggttaaggtagcgaggctgggtggcgaattcggcacgagggggaagccatggcagctaccattgacatgaatttccagagtgatctattgtcaatatttgaagaaaatcttttctgagcgcacctaggtggcttctgactttgattttctggcaaaacattgactttccatagtgttaggggcggctggtggaggtgggatcagcggccaggggatgcctcagggtctggccctcctgcatgctatgcccggggcaggcctgacgggcagctgaggattgcagagcctgtctgccttacggccagttggacagacgtcccgccaaccaccatccctcacaggacgtccgctcagacacacgccttgttacgagcaagtgccggctggacccaagccctgcatccccacatgcggggcagaggcccgtctctccgccaaatgtctacacagtatacacaggacatcgttgctgccgccgtgactggttttctgtccccaagaacgtgacgttcgtgatgtcctgccacgccgggagtctttccccatcatccccagacatcgncactccgctcccagcgaggacagggcaggcctgcgtgggctggaggcggggcgagtgcggcttactccacattcactcgatccgtcactttctaccttgcattcattaccccttcgatagtcctctcccttccacgtctctcacactgcagacctctgtctctcctcatgtgatcaccacactactatactctctacctttctcctctgttcatgtcgtcgtgtttctctaacttccatttctcgtctctcactcattctctcccttcgttctaccacactccaatacttaattaaatcccacacaacaactcattcttaccactcaccatcacatcctccattactcactctatactctcacttttttccatccttgtaaatccacatcatatcacccctactttcttcaccaca

SEQ ID NO: 262691 - DNA, 1003 bp, Homo Sapiens
gcccaagtttaacctcccctccaggggtaacggtagcgaggcctgggtggcgaattcggcacgaggagaagccttgatgtagaacacacaactttgtatagcaataatagcactgcaaacaaatcctctgtcaattccatggaacagccggcacttcaaggaagcagtagattatcacctggtacagactccagctctaacttggggggtgtcaaattggagggtaaaaagtctcccctgtcttccattcttttcagtgctttagattctgacacaaggataacagctttactgcggcgacaggctgacattgagagccgtgcccgcagattacaaaagcgcttacaggttgtgcaagccaagcaggttgagaggcatatacaacatcagctgggtggatttttggagaagactttgagcaaactgccaaacttggaatccttgagaccacggagccagttgatgctgactcgaaaggctgaagctgccttgagaaaagctgccagtgagaccaccacttcagagggacttagcaactttctgaaaagcaattcaatttcagaagaattggagagatttacagctagtggcatagccaacttgaggtgcagtgaacaggcatttgattcagatgtcactgacagtagttcaggaggggagtctgatattgaagaggaagaactgaccagagctgatcccgagcagcgtcatgtacccctgagacgcaggtcagaatggaaatgggctgcagaccgggcagctattgtcagccgctggaactggcttcaggctcatgtttctgacttggaatatcgaattcgtcagcaaacagacatttacaaacagatacgtgctaataaggggttgatagtttcctgggggaggtacctccccccagagcatacaacagacttatttcttccactttagttctgaggtgaagacagatcatgggactgataaattgattgagtctgtttctcagccattgggaaaacatggg

SEQ ID NO: 262692 - DNA, 1392 bp, Homo Sapiens
aaggtagcgaggcctgggtggcgaattcggcacgaggcgatgcttcacttttgacagaggggatatcagtcgcttccctcctgccagacctggcagcctgggtgtcatggagtactacctgatggatgctgcctccttgctgcctgttctggccctcggcctgcagcctggggacatcgtgcttgacctatgtgcagctcctgggggaaagacactagcgttgcttcagactggctgttgccgcaatcttgctgccaatgatctctccccgtcccgaatagccagactacagaagatccttcacagctatgtgcctgaagagatcagggatggaaatcaagttcgagttacctcatgggatggcaggaaatggggagaactggagggggacacctatgaccgggtgctggtggatgtgccctgtaccacagaccgccactcccttcatgaggaggagaacaacatctttaagcggtcaaggaagaaggagcgacagatattgcctgtgctgcaagtgcagcttcttgcggctggactccttgccaccaaaccaggaggccatgttgtctattctacctgctcactctcacacttacagaacgagtatgtggtgcaaggtgccattgagctcctggccaatcaatacagcatccaggtacaggtggaagatctgactcacttccgaagggttttcatggacacattttgtttcttctcatcctgtcaaggttggggagctggtaataccaaacctcatggccaattttggccccatgtacttctgcaaaatgcgtaggctgacatagtatcacccaatccctgaagcaagaatacaaagggtatactctgttggatgcaccagaaactggaaactgggaccagtggcagagatgcactctcggtcctgtctccatcctgttcgtgtctttctgcagttttcggcaataagaagtagaagatttgctgtcctgctgtccaattgtggagcatcagcaggtttccaactcactcattaacccctaccccatctccaggcctgtactaaagtttgctgcccgcttaggggcttagaaggagaagccagtgagcaggctcacactaagttgtaaacataggagaagcatttggccaataaagttgttgaaactctatagacctggggctgcagttggggacttcatgtcagtgcaaatgccattagttccatttgtaccagccagttactgagcccctgtcacccttgaagtgagttccacctgaccagtcttgagcagccaacaggctcaattaagcccgcctggtttttccatatggctcatgatctaatttaaggaacaagtaactaaaaatgttaagccagtgcaaaataatctgcttacctactcacattgg

SEQ ID NO: 262693 - DNA, 974 bp, Homo Sapiens
  misc_feature (679)..(679): n is a, c, g, or t
  misc_feature (685)..(685): n is a, c, g, or t
  misc_feature (707)..(707): n is a, c, g, or t
  misc_feature (711)..(711): n is a, c, g, or t
  misc_feature (715)..(715): n is a, c, g, or t
  misc_feature (718)..(718): n is a, c, g, or t
  misc_feature (721)..(721): n is a, c, g, or t
  misc_feature (733)..(733): n is a, c, g, or t
aggtagcgaggcctgggtggcgaattcggcacgaggggaccagctgcggctggtgaggcccaagcccgtgggggcgcctgcaggggactccccggatcagctgctgctggagccctgtgcagagccggagcggagcctcagaccctacagtttggtgcggccgctactggtgtctgccctgcggcccgtggtgctgttgcctgagtgcctggcgccccggctcatccgtaacctgctagacctgcccagctcccggctggacttccaagtgtgcccagcggaaagcctctctggggaggaactgtgcccatcctcagcgcctggagcccccaaggctcagcctgccacccctgggctaggcagcaggatccgggccatccaggagtctgttgggaagaagcactgcctgctggagctgggtgctcggggtgtgcgggagctggtgcagaacgagatctaccccatcgtcatccacgtggaggtgactgagaagaatgtccgggaagtcaggggtctgctgggccggccgggctggcgggactcagagctgctgcggcagtgccgtggctcagagcaggtgcctctgggggctgccctgctcctgggttgcacgtgcccgaccattgagtgcggacacgcagaggagctggccaaggtggtgcgcggccgcatcctgcangagcangcccgcctcctgttgggtggantgcngcancancanaggctgccccanccaccaattgagccttgaagctcattctgataccgcacctttctcccaaaaccaacgtgggaccctaggggtctattggggaaaactagcgccctcccaaccctgaagacttcctaaaaactttggacccctcaaaagagcaggaccacttggcctcattaacgctgtacccccaacagatgtctctatagccccctcccgaagcctaagtggcgaaacccccggaaaaaagcaagcccac

SEQ ID NO: 262694 - DNA, 953 bp, Homo Sapiens
agcgaggcctgggtggcgaattcggcacgagggttggatctctgtgtcctggatgttgactgccttgaatttccttatggtatacttgctgcttcggccttgtatcatttctcgtcatctgaattgatgcaaaaggtttcagggtatcagtggtgcgacatagagaactgtgtcaagtggatggttccatttgccatggttataagggagacggggagctcaaaacctgaagcacttcaggggcgtcgcctgatgaagatgcacacaacatacagacccacagagacagcttggatttgctggacaaagcccgagcaaagaaagccatggttgtctgaacaaaatagggcttctcctctccccagtgggctcctcaccccgccacagagcggtaagaagcagagcagcgggccggaaatggcgtgaccaccccatccttctccaccaaagacagttgcgcgcctgctccacgttctcttctgtctgttgcagcggaggcgtgcgtttgcttttacagatatctgaatggaagagtgtttcttccacaacagaagtatttctgtggatggcatcaaacagggcaaagtgttctttattgaatgcttataggtctcctctaaataagtgggtcaagtacaccagccacctccagacaccagtgcgtgctcacgatgctgctatggcaaggtgctacttgacctaagggactcccacaagcaaacaaaagcttgaaggctgtggagggccacggtggcatggctctccctcgcaggtgttctgggctccgttgtaccaaggggagcacagggggttgcgggcaagcgttgtgcagagcccatagccagtgggagggggctgcctctccacaatatcattgacacgtgtacaatgcctttgaataactgtttgtaagtgtggtatattcatcattttcataacataatctggtttgc

SEQ ID NO: 262695 - DNA, 1002 bp, Homo Sapiens
gcccacacctttcttaaccctggcctgggtggcgaattcggcacgagggttggatctctgtgtcctggatgttgactgccttgaatttccttatggtatacttgctgcttcggccttgtatcatttctcgtcatctgaattgatgcaaaaggtttcagggtatcagtggtgcgacatagagaactgtgtcaagtggatggttccatttgccatggttataagggagacggggagctcaaaactgaagcacttcaggggcgtcgctgatgaagatgcacacaacatacagacccacagagacagcttggatttgctggacaaagcccgagcaaagaaagccatgttgtctgaacaaaatagggcttctcctctccccagtgggctcctcaccccgccacagagcggtaagaagcagagcagcgggccggaaatggcgtgaccaccccatccttctccaccaaagacagttgcgcgcctgctccacgttctcttctgtctgttgcagcggaggcgtgcgtttgcttttacagatatctgaatggaagagtgtttcttccacaacagaagtatttctgtggatggcatcaaacagggcaaagtgttttttattgaatgcttataggttttttttaaataagtgggtcaagtacaccagccacctccagacaccagtgcgtgctcccgatgctgctatggaaggtgctacttgacctaagggactcccacaacaacaaaagcttgaaacctgtgggagggcccaccggggccgtggcttctcctcgccagggggttccggggcccccgttgtaccccacgggggacaagggcgcttgaggggaaaaccgttgtgcaaaagcccctaacccccccgtggacaggggggccttgcccctcctccacattaaccccctttggcagggtggtacaatgccctttcggtagactctgtttacgccaacaagcgtaccaaaacacccaagcagttgtttgtaaacacacaga

SEQ ID NO: 262696 - DNA, 967 bp, Homo Sapiens
  misc_feature (913)..(913): n is a, c, g, or t
  misc_feature (945)..(945): n is a, c, g, or t
aaggtagcgaggcctgggtggcgaattcggcacgagggagcaacagatcctgggagaaacagaaaagagccaggctgcagtacgaaaagcaaatggaggagcgatggcgaaaactggaagagcagcggcagcgggaggaccaaaagagagctgctgtggaagagaaaaggaaacagaagctccgggaggaggaggaacggctggaggcgatgatgcgccggtccctggagcgcacacagcagctggagctgaaaaagaagtattcgtggggagcaccactggccattggacccggaggacatgatgcatgtgacaaactttcaacatcaactatgagtttgccaaagccaacggagcctcccatgagtaaacgcctgtcttcatccaccgtggcaatatcctattccccagaccgagtattccatgtctgtcctcgtttagctcctcttggccctcttaacccttcttacaagtcttcacccactcgaaacattgagaagaagaaagctacatctacgtctacatctggtgcaggagatgttgggaaagaagccctttcaggaggagaggcctctctggtggagaaggtgaagcgggggcaacgaacagcaacttctcttcctgttgtgaacttcgggtcccctctgagaagatgtgagttttctggaggcattcctaagagaccatcttctcctgtgatatccaagacagctactaaagcttatccacagtctccaaagacaacgaaacctccctacccagggtcctcctgtgaagtacccgcttacctgccctttctggccaagacatgccccagaaggaaagcgggagaaagagaagagccacaaggaaaagggaaaggtaccttgggctcagcaggctgctggccccgcaaaggaaaggaaagccctanagaagcatgtagtgggaccagcatggccgcgnaaaaacatggctgctgccgcag

SEQ ID NO: 262697 - DNA, 942 bp, Homo Sapiens
taggagcgaggcctgggtggcgaattcggcacgagggagcaacagatcctggagaaacagaaaagagccaggctgcagtacgaaaagcaaatggaggagcgatggcgaaaactggaagagcagcggcagcgggaggaccaaaagagagctgctgtggaagagaaaaggaaacagaagctccgggaggaggaggaacggctggaggcgatgatgcgccggtccctggagcgcacacagcagctggagctgaaaaagaagtattcgtggggagcaccactggccattggacccggaggacatgatgcatgtgacaaactttcaacatcaactatgagtttgccaaagccaacggagcctcccatgagtaaacgcctgtcttcatccaccgtggcaatatcctattccccagaccgagtattccatgtctgtcctcgtttagctcctcttggccctcttaacccttcttacaagtcttcacccactcgaaacattgagaagaagaaagctacatctacgtctacatctggtgcaggagatgttgggaaagaagccctttcaggaggagaggcctctctggtggagaaggtgaagcgggggcaacgaacagcaacttctcttcctgttgtgaacttcgggtcccctctgagaagatgtgagttttctggaggcattcctaagagaccatcttctcctgtgatatccaagacagctactaaagcttatccacagtctccaaagacaacgaaacctccctacccagggtctcctgtgaagtaccgcttacctgccctttctggccaagacatgcccaagagggaaagcggagaaagagaagagcaacaaggaaaagggaagggtaccttgggctcaacagggctgctggccccgcaagggagaggaaagcccctaaaagaaagcattgtagttggaacaaggcattgc

SEQ ID NO: 262698 - DNA, 934 bp, Homo Sapiens
taggtagcgaggccacggtggcgaattcggcacgagggagcaacagatcctgggagaaacagaaaagagccaggctgcagtacgaaaagcaaatggaggagcgatggcgaaaactggaagagcagcggcagcgggaggaccaaaagagagctgctgtggaagagaaaaggaaacagaagctccgggaggaggaggaacggctggaggcgatgatgcgccggtccctggagcgcacacagcagctggagctgaaaaagaagtattcgtggggagcaccactggccattggacccggaggacatgatgcatgtgacaaactttcaacatcaactatgagtttgccaaagccaacggagcctcccatgagtaaacgcctgtcttcatccaccgtggcaatatcctattccccagaccgagtattccatgtctgtcctcgtttagctcctcttggccctcttaacccttcttacaagtcttcacccactcgaaacattgagaagaagaaagctacatctacgtctacatctggtgcaggagatgttgggaaagaagccctttcaggaggagaggcctctctggtggagaaggtgaagcgggggcaacgaacagcaacttctcttcctgttgtgaacttcgggtcccctctgagaagatgtgagttttctggaggcattcctaagagaccatctttctcctgtgatatccaagacagctactaaagctttatcccccagttctcccaaagaccaacgaaaacctcccctaccccaggggtcctccctggtgaaggtaaccgccttaccctggcccctttcctgggccaagcacctgccccacagaaggaaaagcccgccctaaaataaaaaccagccccccctggggtatagggggaaaggcgcacccctctgggcttcccacacaggcccgcctttgg

SEQ ID NO: 262699 - DNA, 954 bp, Homo Sapiens
gaggcagtactctacggcttaaggtagcgaggcctggtggcgaattccggcacgaggggtggtagtggcggtggcagcatgatgggcggagagtctgctgacaaggccactgcggctgcagccgctgcctcccctgttggccaatgggcatgacctggcggcggcatggcggtggacaaaagcaaccctacctcaaagcacaaaagtggtgctgtggccagcctgctgagcaaggcagagcgggccacggagctggcagccgagggacagctgacgctgcagcagtttgcgcagtccacagagatgctgaagcgcgtggtgcaggagcatctcccgctgatgagcgaggcgggtgctggcctgcctgacatggaggctgtggcaggtgccgaagccctcaatggccagtccgacttcccctacctgggcgctttccccatcaacccaggcctcttcattatgaccccggcaggtgtgttcctggccgagagcgcgctgcacatggcgggcctggctgagtaccccatgcagggagagctggcctctgccatcagctccggcaagaagaagcggaaacgctgcggcatgtgcgcgccctgccggcggcgcatcaactgcgagcagtgcagcagttgtaggaatcgaaagactggccatcagatttgcaaattcagaaaatgtgaggaactcaaaaagaagccttccgctgctctggagaaggtgatgcttccgacgggagccgccttccggtggtttcagtgacggcggcggaacccaaagctgccctctccgtgcaatgtcactgctcgtgtggtctccagcaagggattcgggcgaagacaaacggatgcacccgtctttagaaccaaaaatattctctcacagatttcattcctgtttttatatatatattttttgttgtcgttttaacatctccacgtccctagcaccaaa

SEQ ID NO: 262700 - DNA, 1163 bp, Homo Sapiens
  misc_feature (1054)..(1054): n is a, c, g, or t
ggacggccagtactacaacggtctttaaggtagcgaggcctgggtggcgaattcggcacgaggctcaagatccccatggacaacaaggaggtcccgggtgaggcgcccgcgccgtccgccgacccggcgcgtccccacgcgtgccccgactgcggccgcgccttcgcgcgccgctccacgctggcgaagcacgcgcgcacgcacacgggcgaacggcccttcgggtgcaccgagtgcgggcggcgcttctcacagaagtcggcgctgaccaaacacggccgcacgcacacgggcgagcggccctacgagtgccccgagtgcgacaaacgcttctcggccgcctcgaacctgcggcagcaccggcggcggcacacgggcgagaagccgtacgcatgcgcgcactgcggccgcccgcttcgcgcagagctccaactacgcacagcacctgcgcgtgcacacgggcgagaagccgtacgcgtgcccggactgcggacgcgcctttggcggcagctcgtgcctggcgcgccaccgacgcacgcacacgggcgagcggccctacgcttgcgccgactgcggcacgcgcttcgctcagagctcggcgctggccaagcaccggcgcgtgcacacgggcgagaagccgcaccgctgcgctgtgtgtggccgtcgcttcggccaccgctccaacctggcggagcacgcgcgcacgcacacaggcgagcggccctacccctgcgccgagtgcggccgccgcttccgcctaagctcgcacttcattcgccaccgacgcgcgcacatgcggcgccgcctgtatatttgcgccggctgcggcagggacttcaagctgccccctggcggccacggccgccactgccaccgaacgttgcccggaaatggaagggccacttaaacccccccgggcttgccgaaaggccccccctcggggtcttaaactggccgggccaggcccaagggttcctccttgccccccggtaaccgggggtaccgggacgagaaggcgccacaacacggcccgtggtgcgcccgaggacacggngtgaacaccgagcacaccacgtcaagactccgcgccgcggcgacaaaataagcgcccgggacgcctcgacttatcccaacgcgttagatcgcagtgtgcggggacccca

SEQ ID NO: 262701 - DNA, 689 bp, Homo Sapiens
tgttccaataccccccacgcggtaatacagctctcaaatgagattcttcaaattttacgtttttgtccattctggctcattctttgcttcctcatcatcagattcaatcttgggcaaacatggtttagggctgagtcttggaatatgctggagaaacccaatatgggcttgtcttctgctgctatggcatgacgcataatggcttcccgaggattactgtcatcggtcttgtccaaagcaatgttcttcacaatataggaagagagagtgcccccgtgggttccaactcggccaccacgacctgggcctagctacaggaggttcaggtttatgcgacttcaggggataccagtctgtccttctccagctgtattcctatgtactccgttaggcggggctcacggaacataagcaaggcatgaggggtgatgatgtagtcctgagtaagagtctcagcttgttattgccttccgctgggatataaaccacacataatatttgctcccctctgactcttgttggggtcgtagatagactttagccaatccatttccagttccaagccatgatctaggttcagcttcggatgccacaggcagcgaacaacactcgcatctgtgatgtctatttcatacaccctttggaaagtcctacgctcaaagaaaacaagtttgccgctgccacatcct

SEQ ID NO: 262702 - DNA, 464 bp, Homo Sapiens
cccaaacctgtcccatacccctcccactcatgcaaacagctctcaaatgagattcttcaaattttacgttttttccattctggctcattctttgcttcctcatcatcagattcaacttgggcaaacatggttttggtgggtggatggatagccatggaggcagaaagaggcctctgcaggaagaacctgggagagcggagaggaggtggtgaggcaggggagcactatggaatggccctgaggccaggaggggctcaggatgaccaggcaaaagcacagctggtccaggatggaggggaggcctgcacaacatgagcaggaggctagaggagacagaccatgaggcccggggagacccctcactcgagaatctcctgcagcttgctgtccaggaatagaaagttgtattttagtcctttccaaggcttgaatggctcatcatcattgtacacaaagttttcccc

SEQ ID NO: 262703 - DNA, 725 bp, Homo Sapiens
ctcttgcttgttaataaccactgactgacagacttgcttttccataagtttaagcttttatcactgagagcccatctgttgccatccctcagaaagtcaagtacttgtgtagatggagtgcatgcacagagtatgttcctgaaagtatctcatgttttcaacatgaaattttctgtttctaagaccaagtaaagaaaataatttgcttttacacccgttaggggagcaaaattatgtgtggttaaaacccagcggaaggcaaaacaagctgagactctaactcaggactacatcatcacccctcatgccttgcctatgttccgtgagccccgccaacggagtacaaggaaacagctggagaaggacagactggatcccctgaagtcgcataaacctgaacctcctgtagcaggcccaggtcgtggtggccgagttggaacccacgggggcactctctcttcctatattgtgaagaacattgctttggacaagaccgatgacagtaatcctcgggaagccattttgcgtcatgccaaagcagcagaagacagcccatattgggtttctccagcatattccaagactcagcccaaaaccatgtttgcccaagttgaatctgatgatgaggaagcaaagaatgagccagaatggaaaaaacgtaaaatttgaagaatctcatttgagagctgtttgcatgagtgggaggggtatgggacaggtttggg

SEQ ID NO: 262704 - DNA, 723 bp, Homo Sapiens
  misc_feature (288)..(288): n is a, c, g, or t
  misc_feature (421)..(421): n is a, c, g, or t
tatgtacatgtgcatgtacatatagtattctccaaagactgtttactgcagttgctcaggaactgcttttgattcacaccacgctgctttcagaaattcagaacaacacttttgaaagggtgcatggataaaatctgaggttttttgcttctcgtctttttctgtgtacatatttgtcctaagtttatggcacagggtagaccttaagtattcctcctccatccttcattcttcacccctccattgggatcctcaagttctaatgaattccaattataccttacatcnagcaagttaaaaaaagtactttaaaataaagcaaagggagactgttgctcaaccatcaggaaaccagttgtcagaagacatcattggttctagtgcttcctacggaaataagaaacgataaatattgcactgnaatgtttgtggtttggagtccctgaataataaagagggaatatatttgcagaaagtcgcatagggttttttaatgcagaattttgtcagaagacaatggcgctgcatgtttttctttgagtgcaaatgtcaaattgctaagatttttttaagatggcatgtgctttgaaaagaagatattgcatttttaagagtttaaaaatcttatgagtgagaaatattaaaaaaatcttattttcaacctctttagaagaaataaaagatgtttctcctatctccttataactaccgtagggactgtag

SEQ ID NO: 262705 - DNA, 906 bp, Homo Sapiens
gcttggccagggtgtgagctgcccggacagacagccacagcccaggccgcctggcccctgacagagcgcgtcacacaactctggctcaccgcctcagacaacctcatggtttcgtggccccccatcgccggtctcagtccagagcgattctttccctggtggaggcactccagtccacgcacttacacctatgttctttcgtcaacgttcctaccacgcgctgcgaccaagaccccggggaaggcggtccctcgtgcatcctacagctacgacacgctgcagtactgcgacttcttgggctcccgggcggccatctgggtcaccatcctgtgcatggcacggctcaagacagtcctgaaataccagtgctgtttcgttctgggtacactggtcatcgccatgtccttgcagctggaccgcaggggacatgtggaacatgctggggccctgcctctttgccttcgtgatcatggcctccatgtgggcttaccgctgcgggcaccggcgccagtgctaccccacctcgtggcagcgctgggccttctacctcctgcccggcgtctctatggcctctgtgggcatcgccatctacacctccatgatgactagcgacaactactactacacccacagcatctggcacatcctgctggccgggaacgcagccttgctgctgccgccacctgaccagcccgccgagccctgggcctgctcgcagaaattcccctgccactatcagatctgcaagaacgatcgggaggaactgtacgcagtgacgtgacactggcctggggacagctgctgctctgatgacctcttcagccaggagctgtatcgagggggaggcgcctggtccagccctggacagattgatttccagctgaataaattggcctagataccctc

SEQ ID NO: 262706 - DNA, 1617 bp, Homo Sapiens
ggaagcagtggtatcaacgcagagtggctattacggcggcgcagcgaaaatggcggcttccaggtgggcgcgcaaggccgtggtcctgctttgtgcctctgacctgctgctgctgctgctactgctaccaccgcctgggtcctgcgcggccgaaggctcgcccgggacgcccgacgagtctaccccacctccccggaagaagaagaaggatattcgcgattacaatgatgcagacatggcgcgtcttctggagcaatgggagaaagatgatgacattgaagaaggagatcttccagagcacaagagaccttcagcacctgtcgacttctcaaagatagacccaagcaagcctgaaagcatattgaaaatgacgaaaaaagggaagactctcatgatgtttgtcactgtatcaggaagccctactgagaaggagacagaggaaattacgagcctctggcagggcagccttttcaatgccaactatgacgtccagaggttcattgtgggatcagaccgtgctatcttcatgcttcgcgatgggagctacgcctgggagatcaaggactttttggtcggtcaagacaggtgtgctgatgtaactctggagggccaggtgtaccccggcaaaggaggaggaagcaaagagaaaaataaaaccaagcacgacaagggcaaaaaaaagaaggaaggagatctgaaatctcggtcttccaaggaagaaaatcgagctgggaataaaagagaagacctgtgatggggcagcagtgacgcgctgtggggggacaggtggacgtggagagctctttgcccagctcctggggtgggagtggtctcaggcaactgcacaccggatgacattctagtgtcttctagaaagggtctgccacatgaccagtttgtggtcaaagaattactgcttaataggcttcaagtaagaagacagatgttttctaattaatactggacactgacaaattcatgtttactataaaatctccttacatggaaatgtgactgtgttgctttttcccatttacacttggtgagtcatcaactctactgagattccactcccctccaagcacctgctgtgattgggtggcctgctctgatcagatagcaaattctgatcagagaagactttaaaactcctgacttaattgagtaaactcttcatgccatatacatcatttttcattatggaaaagggaaaaataatgctttgtgaaattcagatgtctggaagccagggaagccaggggtgggtaaatcccaaaatctatggcaggaaatggcggagaaataaaaaaacatgcccccttggaaatccctaaagagagttttggaatttccctttgactttggatccctactctcatccaggaaaaagaaactcctgtgggggccggttcaaggcttttactgggggtccggggcacaagctaaggggggttcccgggtcccgcgtttcccctcacctccaggaaacaacacaaccccgctcgcggcgggcacagggggcgctacttatggtctcccctatataaccggggggggccgccgtttccacacggcggctcttataggtcgcgggcgcaactcccacaaattccctcc

SEQ ID NO: 262707 - DNA, 876 bp, Homo Sapiens
  misc_feature (314)..(338): n is a, c, g, or t
tgggtgccctggtataagttgactctgggcaggccccggcgcagaggatgtgaggaggaggaatcttggccgtccttcatggcactggctgccatcggttcctccacaggttggaatcctttcagagaggagtctcctggttttgctaagtggtggccctgcttcttcccagttgaaactactcttcgtctacttaggtctctctcttctatgctggctgtgactcctgccctgacatagtggccaaggtgcttttcttcctcccaggcccagtgggtggaatctgtccccacctggcactgaggagaatggtnnnnnnnnnnnnnnnnnnnnnnnnnatgtgatttttgcgccttgtggcagcacatcctcacacccaaagaagtttgtaaatgttccagaacaacctagagaacacctgagtactaagcagcagttttgcaaggatgggagactgggatagcttcccatcacagaactgtgttccatcaaaaagacactaagggatttccttctgggcctcagttctatttgtaagatggagaataatcctctctgtgaactccttgcaaagatgatatgaggctaagagaatatcaagtccccaggtctggaagaaaagtagaaaagagtagtactattgtccaatgtcatgaaagtggtaaaagtgggaaccagtgtgctttgaaaccaaattagaaacacattccttgggaaggcaaagttttctgggacttgatcatacacttttatatggttgggacttctctcttcgggagatgatatcttgtttaaggagacctcttttcagttcatcaagttcatcagatatttgagtgcccactctgtgcccaaataaatatgagctggggatcg

SEQ ID NO: 262708 - DNA, 488 bp, Homo Sapiens
  misc_feature (11)..(11): n is a, c, g, or t
  misc_feature (50)..(50): n is a, c, g, or t
aaatcccaggncccttccaatcccaccggacccaggccctgggctagggncagagcagcccccgccccagggcaatgttggacccccttttactttgtaaaatttgtatttaatcccctttaggtttgcaaagggggtaggggcaaagtcaggggctggccaaagggtctgctccctggacagagaggaaggaggtggagcagctggggctggggcacagcctgggcattctgtggggaggccgtcctcggggtggggtggggccgagtggctgccctgcccccctcatttgcatggctcctcccccactcaagcaatagggccccgccataggaagacccccagagagagggtcagcaggggggccccgcctgcgcctcccctcctaatagcccatggtggggctaggctgggctcacccccctccccagctattttatgtctgtaattaaatatgttaaaataaagtcattatcggaagtcaaaaa

SEQ ID NO: 262709 - DNA, 871 bp, Homo Sapiens
ggggggctgagtggaagcagatgcctgcacaagccaagtgtgtcttattgatctgtacaagctgatagaaggaccatctgctgaaatccagggctcctgagttggtgggtttgcttgtgaagcttctaggacaaggcgcagccagatggaagggagagggtcacagggcttcctaaatgcagccgcatcacctgtcaactcgctgcagtttcagagacagtggaagctgctctttacctcaaaagcacaaagcagaattcgcaacttcacatgtctcaagagctccaagatcctttggtctcgtgtccttgggcaccccgtaactggactggggacaaatttgttacgtgtttccaaggctacagacatggcgccatcctcacaggcctagctcatgtcatggatcaggtgctttgctggggggatacaatgacccatgtggtctgcgtcttctgccattggcttgaactgggcaccccctgaagtctccatctcagctgtatattctagtccaaattttcctggctcccctgctccctcccaggtcctgcacactgtctttttgccaacacctcagccctgtttgctatttcatgtctgcatggtacgagacaccccttcacggcatacactgccatggtatgtacatatgcatccacgtgtgtgtatgtgtagcatgtagctcattctgctcagcctctggcgccgttccacatttgctcccagccccattgctgtcactgtcgtcccagatgtccttgccatggccacagacaatctgccgtctcctggaaacgctggggctgcccttcagagagctggcagccccagcagtcgggcctgctttgcagaaaagactggacccaactcc

SEQ ID NO: 262710 - DNA, 619 bp, Homo Sapiens
  misc_feature (16)..(16): n is a, c, g, or t
  misc_feature (22)..(22): n is a, c, g, or t
  misc_feature (387)..(547): n is a, c, g, or t
  misc_feature (555)..(572): n is a, c, g, or t
ccgagcccggttattnggaagngcaagcctcacccacagaggagtggaacctgaggccccccccagatgttggcctccggtgtcccaagcccacagcggtctggctgttgggaagatggccccggaatggactcatacccattggcacattaggctaatccctggttttatgtgaagtcagcaattaagtgttcccactagaactgacctaagccactgattaatatttaatgagggaaggtaggggagaatctagccattttataatgccagaaatctatatatgttatctgatgccatttttctgaagtagcctcacatgtggtccccctgcagttcagcagttaacagatgacttttttagtgtaataaaatgtttatcatctnnnnnnnnnnnnnnnnnnnnnnnnnnnnnnnnnnnnnnnnnnnnnnnnnnnnnnnnnnnnnnnnnnnnnnnnnnnnnnnnnnnnnnnnnnnnnnnnnnnnnnnnnnnnnnnnnnnnnnnnnnnnnnnnnnnnnnnnnnnnnnnnnnnnnnnnnnnnnnnnncctgtggnnnnnnnnnnnnnnnnnnaaaaaaatttttaaacacttttttgtggggcgggggccccccaagga

SEQ ID NO: 262711 - DNA, 497 bp, Homo Sapiens
gggaatttatcaaaggggggactacttagatttggggcttcaaacctgagtctagcacaatgcagctggaggccagggctactcctacaaacccaagttctgactccttccagggaagtatcagcttaagaaaccttgatcaggaaagtgacactggtctttcaaagagccctctttaccctcccatccctgccctccacactgcaagctgcattccagccacaacgcccttttctaaatctattttcattcatctcctattctggtctgtagccttgattccaaccattgaagtgcacggagacagcccagtggcttgtcagattggtaaataatgacacctggtggataaatgttacattctagaagactattctggtcagcctaggtctgaaacactaaggagactcggcctagagatagggccatccacttgcctacaggcactctgcttttattattaaaaatagtcactttgttactataataaaatttaa

SEQ ID NO: 262712 - DNA, 764 bp, Homo Sapiens
tgctacttgcgtggccagcgaatgtatactgttcaccaggctctgtcacagggaggctggcaacgccatggcctggggctgccagagccacagggccctgtcggagtaaggggcagacggagtggccccagccagaatgacacgctgggcagcgttcagccatcacccgggttcaggcttcctgtcctcaccaggggccagcgagagagcagcagtgttcgctcctatggctgccgaggcgagcagcttcccgggctccatgaggtgaagtcaccgctttactgtgggagaggagcctggatcccactccgtagtgaaggcttcttggcccagcagtgacaaggtgcgggctgcagtggcatctgtcacaggagagcgcagtcaagggtgtcctgggaggaacgctggtggcgaccagggctgtgtgtggggcctggaccggtaggcacggagaggtccgcacgctgggacgctgccggatgtcagttttattcagggaagaggggctcccatggcccgatccctctcccaagaccctcctttcacaggggcaggtctgctaagaccccaagctgttcagatacggtagaatatctgcgttgcacaggatggaggccaaaggttaaatacaattgcaaggcgtggcctttgctgaaccaagtgcccaaagcggccccaggtgaccgctgtggtcccgaccctgcgacaacaattggcagggccacggaaccgacgggaatacgcttgaggactccccgtcacaa

SEQ ID NO: 262713 - DNA, 1140 bp, Homo Sapiens
  misc_feature (821)..(821): n is a, c, g, or t
  misc_feature (870)..(881): n is a, c, g, or t
tggttctcacaccctgttggagtcagctttcaatgagttgcctgtgtcccctgctactgctcccatcctggctggcaggagcgtgcatgtttccatccggatttgcctcttttatttaatgccaaagttttagccaacagacatcttccgacttttagttgctgtttcagcattctgttctgcactgctgggctggctctctgccccaacccatgggcacatggcaccctggctgggccatttcaatggctcaaagcctactgggggcatcaaggaagagctgggctgcatcagtcccttcatgggtcttgctaatggaaagtagcatatatgtgctttaaaaatattaatccttttgaaaagaactgagaagaaaaatgtataattttatcccatttttaatattttggtctagcaacttgtgatacatagatgacaattttgtgagtttttcaaatgtgtgtacagatttttgtaaatatgactcttttgtaattaactcatgtacagcctcatcctgtatagtttaatgatgaatgtgcaggggacctgtctcaggctcctatatggttcctgggccttatagccaggtttgtgtggcgctcccgacttttgtgactgactggtgtcttcccatttggactgtggcctggccagagccccttgcatatccccactgtcaggggcagccaggactgttcccatcctcctggaatgggggaaccttccttatcccctgcccacatcccctctccaataaagcacctgtgccctcagcaatggcctgccatgggctgttgctggggatgtttgtacttaanaaaacccacaccccggcccacacccatcctctcctgtcatgaacctcannnnnnnnnnnngagaaccaggcgacaacgactatcggcggacacaccgaagtgatgcctaatgacctcccccttttgtgggggcccttgggctctctagaaaaaaatcctcatgaaaacatttctttttggggcgggagggggcccccttttgaggtaaagaccccaaccggggccccaaagaggtggttttccctcagaaaaaacaccccgccgacctggaccacatcagccgctcgcgggttgtcctccccgctaaacaaaaaaagcc

SEQ ID NO: 262714 - DNA, 946 bp, Homo Sapiens
ggtgcgggttgggggtggcgcgcccagggtcttctttcgttggctcgtgtgtgggttgcgtcactggtcttctggctgtgtgcctgtttctctggtgtgggtggtgggttctcgttcttatgccctttgatctgccttcttggtttttgtttttgagctcagccctttggctttgtggcttgctgactccttcaagatgggtgtgtcgatctgcgtgtgtgtcctggggttcccgagggatgctgctggcttgtacctgggcccacagagcctggcttttggtccccatgcacttgcagtactggctgctggtgttttgtagcctgtgtgggtctggctgtgtgaccaaggtgaattagcacaggttagggtgtgtgccacacccaatgcacctcagggccaagccgtggtgcgtgtctggcctttcaggtccaggccagtgggcctggtagcacatgtctgtcctcagagcaggggccagatgattttcctccctggtttgcagctgttttcaaagcccccgataatcgctcttttccactccaagatgccctcataaaccaatgtggcaagactactggacttctatcaatggtactctaatcagtccttattatcccagcttgctgaggggcagggagagcgcctcttcctctgggcagcgctatctagataggtaagtgggggcggggaagggtgcatagctgttttagctgagggacgtggtgccgacgtccccaaacctagctaggctaagtcaagatcaacattccagggttggtaatgttggatgatgaaacattcatttttaccttgtggatgctagtgctgtagagttcactgttgtacacagtctgttttctatttgttaagaaaaactacagcatcattgcataattcttgatggtaataaatttgaataatcagatttcttacaaaccaggaa

SEQ ID NO: 262715 - DNA, 1654 bp, Homo Sapiens
  misc_feature (742)..(774): n is a, c, g, or t
  misc_feature (816)..(835): n is a, c, g, or t
  misc_feature (885)..(901): n is a, c, g, or t
  misc_feature (1013)..(1044): n is a, c, g, or t
  misc_feature (1097)..(1097): n is a, c, g, or t
  misc_feature (1178)..(1178): n is a, c, g, or t
  misc_feature (1182)..(1182): n is a, c, g, or t
  misc_feature (1270)..(1270): n is a, c, g, or t
  misc_feature (1273)..(1273): n is a, c, g, or t
  misc_feature (1446)..(1446): n is a, c, g, or t
  misc_feature (1490)..(1490): n is a, c, g, or t
  misc_feature (1520)..(1520): n is a, c, g, or t
  misc_feature (1555)..(1564): n is a, c, g, or t
cgagcagcggaacgaacgcgaggcggccgcaggtaccgcaagatgaaggagcggctgggtgtgtacggagatccggaagcaggcaaccgtatgagcttcggagagatcgaggaggacgcctaccaggaggtacctgggattcagcctgggccacctgggcaagtcgggcagtgggcgtgtgcggcagacatcaggtaaacgaggccactcaaggccaggatctccaagacgctgcagcggaccgctgcagaagcagagcgtcgtatatggcgggaagtccaccatccgcgaccgctcctcgggcacggctctccagcgtggccttcaccccactccagggcctggagattgtgaacccacaggcggcagagaagaaggtggctgaggccaaccagaagtatttctccagcatggctgagttcctcaaggtcaagggcgagaagagtggccttatgtccacctgaatgactgcgtgtgtccaaggtggcttcccactgaagggacacagaggtccagtccttctgaagggctaggatcgggttctggcagggagaacctgccctgccactggccccattgctgggactgcccagggaggaggccttggaagagtccggcctggcctcccccaggaccgagatcaccgcccagtatgggctagagcaggtcttcatcatgccttgtcttttttaactgagaaaggagattttttgaaaagagtacaattaaaaggacattgtcnnnnnnnnnnnnnnnnnnnnnnnnnnnnnnnnncaaagcaaaacaaacaccctgaaacaaccaaaaaagtaacgnnnnnnnnnnnnnnnnnnnncagaaaagcgaacgcccaacaaaaaccaagaagggggaaaaagccgcggnnnnnnnnnnnnnnnnntttggggggcccgccccgccccccaaaaaattttttcaaaaccctttcgttgtggggcggggcgcccccgaaagggaaaaaggcgaacaggggcaaaaacggggggtccccnnnnnnnnnnnnnnnnnnnnnnnnnnnnnnnngggggtgtgggactccccccccccaatataaaaaaacaacccccgccgggggngggcacacacccacaacgcggttctttattaaacaaaaatactccccaaagaggggggaggcctcctgtgagaggagggtntctntgtacgcgggggatactccataatccgcccgaggcggggcgccccacacgggccggagcacctccatagtaatatagaaaatattacnccncccgccccgcgcgcccctgggggaacactctcttatggtgggaagaatgaagggaggtggtgggaacaacctctcctactataaaacacatttttttcctgcgcaccacgcaaagatggtggcaggcacctcttcactctcacgaaaaagcgggggggagaggatagcgagangaaactcgctgcagatatgcatcgcgcccccgcgcgagagaganttataacacgaccggtctcgtgggtgtggntgccggggcgcgacgagataaataaataatccgtnnnnnnnnnngtgtgggagagacacaaagcggggccgggcgcaaaagaaaaagaacgcggcccgcgccatcaattgttggcgcccgcgccggcttaaaaa

SEQ ID NO: 262716 - DNA, 1035 bp, Homo Sapiens
gatgtggacgtggcgacgtgccgtgtgggcgggggtccccatgggtgggtctgcgcctccctgtggccttcgtgtggccctgtatcgcggcttactggtctcggcgggctatgttctgtaatgggttccctctctcatccgttgttacttggttcccttccaattgccctcttggtcctgtggtgcccttcgtcatactaacgggttgttttttaagggaccctgaaagtgctcctgtgtgtaaaacgcccagtgtggcatggtaaaaatctgagcgcaagctacatgttccctggctttctgtcctcttagtggtcaactccccagtcagcgcacacactaggattcagtaacgcgttcctcagccacgatgtccccgtgagagtccataagctccgtcgattgctaaacgctgctgaccgtattcagtagcaagaaagagtcttacttgttcaaagggattgtttcctggcagcctgggctaaatccatgtagttaatactcctcccaacactagacacctggctattcaggtacggaagggagatctgccgctgcttctagggtcaccagatgtacggccctctgcagatatgagcgctggcccctcttcagagcacagctaccctagggcactttctctttgaggtggagagacccataaagccttgaccacatcactccatatggggaggagaaggatccctgtcaccgttctgcactctcggtcacggggcccttgttgcagccctaggcctcatctgtgggaagggagtccatggcatcatatctgcccccacgcacagtctcccttagccgctaggtccagaacttagactgtcgaagaaaatacaggccggaaggccaagaaggcgctaagggggatgggagggcaggttttccaggctggagtcggttccacccactcgcctgtccacaggcttccttgtaagcaagtcagcagcacagctactcacgctgccatctggacttattttatgtcaatctgtttataaataaaaaccaatatagata

SEQ ID NO: 262717 - DNA, 337 bp, Homo Sapiens
ggtggggggagggggctctgtggggtgggacattcacatcatttcactctggtctgagtggtggcctgagaaccatggtggcatggaccaccctcatccatgcaactccaggccccatgggaacggatgtggaaggaagaactgtcaccctcttaaggcccagggtcggagcccagggcctctcccttcctgtcgttcaatggacgtggtggtggctgttccacacccattttgttgcagttcctgtgagacaggagaggctgagccaagggaactgtgaaggggatgggcaggagggcttgtgcagggttttgtaagcaatgatctagtttcacta

SEQ ID NO: 262718 - DNA, 988 bp, Homo Sapiens
  misc_feature (46)..(67): n is a, c, g, or t
  misc_feature (783)..(836): n is a, c, g, or t
ggcctgggtggcgaattcggcacgagggagagaactagtctcgagnnnnnnnnnnnnnnnnnnnnnnctggttgcagattcatgtttaatagaacgcccttctgaaatgcatccaaaatagagaagctttctcccgaactgcaaaagccataaaaatgcaaaatgcttctttaggaaaaactgaatcaaaattacgccttaatgttccaagcaacacgaaacctactctgtgccccagggcaggtgccggcagcagccatggccccgaccagctcacatgaaacctagtctgtgccccagggcagtgcaggcggcagccgtggccccgaccaactcacaggaaacctactctgtgccccagggcaggtgccggtggcagccatggccccgaccagctcacaggaaacctactctgtgccccggggcaggtgcaggcggcagccatggccccgaccagctcacaggaaacctactctgtgccctggggcaggtgcaggcagcagccatggccccgaccagctcacaggaaacctagtctgtgccccaaggcagtgcaggcggcagccgcggccccaaccaactcacaggaaacctactctgtgccccacggccaggggccggggccccccagcggccccaaccaggcccgcaagaaagggacccggggccgcggggggcggcgcctggccagggccgtggcccggcccctcccgccgccccggcgtctagcggggccgtgaagccgggcaggcgcgcgtgcacacggctggcgcgcgcagggannnnnnnnnnnnnnnnnnnnnnnnnnnnnnnnnnnnnnnnnnnnnnnnnnnnnntcggacgatcggggccgggggggagatccgctctagtgagcccctagcccgaggccaggctacgtcagccatactcgcgactcatcataaaccgccgacaccgctcggtgcgcggcgcggcggcggacgcgtgtggggttgaggggccgaga

SEQ ID NO: 262719 - DNA, 1547 bp, Homo Sapiens
  misc_feature (22)..(22): n is a, c, g, or t
  misc_feature (78)..(78): n is a, c, g, or t
  misc_feature (144)..(144): n is a, c, g, or t
acccgacggggcccggccactngcctaccctcgagtcccgcagccttaacaggatgggatcgagggtccccatgggtnggctcagagataggaccctggttttaaatccctcccagcctggtgctggtgatgggccctggctanctccagggccaatgcacccccgcctcacacacgcactccttctcctcaaggccagggcatgagggccgtcaccgcctctccgggcctgctgtcagcttgcagcccgggctacagaggccagctggggatctgcctgaggacagagaacatggtctcacttgcagggccctgcctcccaagccccgccctcagaaagtccaagtaccttttcagctttgttaactgcccccatcccaacccagggaggcctgtgtcaactctgggcacaagctgccaccaccagccacccacagcccaccccagcacaccttcacacgggaccacagccgcgctgccgagggccaagcacaaaggttccagtgagcgcatgtcccagcccctggtggccaggctccccttgctgagccgctgccacttcaccctgtgggaagtggccccagccatctcctctagaccaaggcaggcagccccgacatctgcttcctctatcgcccaatgcaaaatcgatgaaatggggagttctctgggccaggccacattcacattcccctccccctgtggtccagtgaagcctccggaccccaggctctgctctgccctgccctgcacccccctcgtcagaagtacatgaggggcgcagagatgagcacacagctttgggcacggtccagggcaaactgaaatgtacgcctgaattttgtaaacagaagtattaaatgtctctttcgtgcgcccggccgtgccggccgacatacaggccctggtcgcccgcctgccggcccgcgagaacccttttccaagagcattggcgggttggcccggcgggcccccagaagggcaacggaaccctcggccgtagccggtctttccaacgagaagccgggcacacgtgacatagcggtctggcattcccccgcccactccaacagaaacgccccggggggcaatgccgagccgcgtctccgcaacaaattcccgcaatggccgctttcttgaagtgcacttccggggaatccctccacacccgcgcgagtcccagcagaggcccccggagtttcccaaatttacccccccctgcccctggcacgacttcttgcatgagggcgcgcgtggtggcgaactgctcccgagcagccgtcctcgtgcgctgggagcgtgggaaaccccgttgctcccagcagcgccctcggtcgtggcccgtcgggcagtccccgcgagcggtggaaagctaactgacccctttggcgtcgcacattggagggacagggaagagtagcgacgcacaagcgcgacggaccgaagctctccggccacgagaagaagcgggcgcggagctgtactcagcggaccgcccggtcgagacttgtcgcaaccccgccggggccccacacgcgaccacgcgg

SEQ ID NO: 262720 - DNA, 593 bp, Homo Sapiens
taaccagtaggtgtggcattgaatttggccagtgttagcatctacagccatcaccgagatgagtcctactgccgttgctctgcccgagggccctcctaaggttatagatcggtatcagcagggaggccgtcccgctggttttctaggagagcccacaggaggaagggagcctcttcaggggcactggaatcttttgtgccaggggcttcttttcatcagagccaggggagtacattgcagtgacttcttaaacatttgtgtgggacagacgagcgtgagggaggttttaagccaggcacaaagttagtttccaatactagttaataaatctatttttcttcatttccttattttgcacagaagctggtaatctaggacctacagtgtgaacaacatttatatgaatattttgtgtacattggtttacttgggcttggtatgatacatcactactataagttccttgaacactgtggatcccctaatgtgtatgaatgactgaggctttgtgaattaagggacgtttgtgggaataaagctatttgatggggccaaaaaaccgcgccccaaaacatagaatacgcttgtcgggc

SEQ ID NO: 262721 - DNA, 1108 bp, Homo Sapiens
  misc_feature (35)..(35): n is a, c, g, or t
  misc_feature (172)..(173): n is a, c, g, or t
ttaagagtaatttttgttgctttattaaatttttnctcacagaattctttataaaaacaccatgtccctaaaatgtcattcaacatatatgcacaccttcgatgtataggacactgatcaaaaaagacagagaaatgtgtccctggggtttgcttttgtcagtttgtttttnnaaaggcagggtctcagtatgctgcccagggatggattcaaactcctggggctcaagtaattctcttgcctcagcctggggactacaggcacataccaccacacctggcttcatgttcccggtattagtacaatgccaaaatatttaaaattcttaaaggttaactcaaatatcttaagttttacttcacttacaatttcaataatgctgaaattttgattgaatattgtgtttgtagtgctacctctttttcgttcataagaacaaaagcctatcattctcttagtttctaaaaaatatatgttcatatggtttagatacatatataaatatgttacacaaaacaatgttttttgagttgtaaataaataaaaattttaaggaaaccaaattaggataaaagttaaagttataatacatttaataaattaattctaaagtttagatgatgttttggttcttcttcatgaaagaaatgtacgaactgtacccttgattgtactcctacaaataggacactttcttaaagaaggagcacaatctttgcatactactagatgaccacaaggaataaacactatggacacttctttgtccatacacactttacatgttctttcttcttgtagtctccgcaattgttcttccactggtagatctgaaacatcttctgtgggaatatattttatgtcctgttgcacaaataaatgctcatataacacagcttcagcttcttgcagagagtttctgaatacagtggctgcaatatttccttttactaaaatcgtatcaatcagttctcttgcttgtaaagacgtctgtgtcttctgtttaataacatcatgttcttgttcattaataattccggcagttagtagactatccaggattggaattacacaagtcaaatgttgaaaaagtgccattctattcttc

SEQ ID NO: 262722 - DNA, 718 bp, Homo Sapiens
gtgcgaaggaccggctgactataggcaagcaccttgatatgggctctccccagcctaaggacacgggacagagggtggccctcgcccaggccagagagggagaagaggaccagccagagtgcccggcgccctacctgcacagagtctaggtggaaatcagaagaggaagtggaaagtgatgacgagtatcttgccctccccgctcggctgacacaggtttctagcctggtttcgtatctaggatccatttctaccttggttaccctgcccactggggacatcaacagcagagccccttggaagtgtcagacagtgatgggccagcttccttcccttcaagctccagccaaagccagcttccccctggagctgccctccaaggatctggggatcctgagggccagaatccctgtttcctgcgctccttcgtccgtgcccacgactccgcaggggaaggcagtctggggagcagccaggccctcggggtctcctctggactgctgaaaacacgcccctccttgccagctaggttggaccggtggccattctcagacccagatgttgaagggcagcttcccaggaaaggaggagaacagggaaaagaatcactggtgcaatgtgtgaaggtaatgacactcaacgttaggaagctttgtgtacaggtgtcttgtctcttcccccaatccactaacatcataataaaacatgttcatgtcgc

SEQ ID NO: 262723 - DNA, 817 bp, Homo Sapiens
gggcacagctccatatattgccactgggttgttcggtaagtcatgcaccaaggacttcagaaagttgcgttcactccgagtcatgtcagtaggtgcacgggaaccccatgggcagcctcgtcgatctcctgaagaaaaggcagtgcccgtggtctgcctactgtactatcactcgctggttgatgtgaccgccaggcctcctctcgtagccttggacaaaggatacacctgaaccagaatagttttctcaccctcacattgaaatgaggattcttgcttaataacagcacttgccgccagtgggaggagggaggttctcatttattcccacagtttctcgtgggccttatggaatgaccatgttttcctgtgagcggtagggtgtagtcattgcgccacgccgtcattccaaagccttacgttcccgcaagctgccagccaggaggtgataaccacccgtcccagagtttctctcggctctttttttaaaagtcccccaacaaataggattcttgctgggaaaggaagttcggtaaggaaatgtcaaatctggtttttaaacaaggtccaaccctgcaatgaagcagccacttcagcccagagagattataagaactgatgtggccagagtgcctacccactgtggccccggtgctctgcccccacgccccgaccatctggtcttggtagatgtcctagacggctgagccatgtgcaataagaacatagatcctaaaggatcctctggaagctgtatttcttgaattagaattctcaaattgtacatctgttaatatatgtttattatgtgactggc

SEQ ID NO: 262724 - DNA, 669 bp, Homo Sapiens
  misc_feature (368)..(376): n is a, c, g, or t
aggacagctcagcccagagagttgatagcgccacccaagactgtcaaaccccctgaggatcaactgaagtcggagaacctcgaggtgtccagttccttcaactacagtgtgctgcagcatcttggccagtttccaccccttatgcctaacaagcagatcgcggagtcggccaatagcagtagcccccagagctctgcgcggggaaagcccgccatgtcctatgccagcgctctgcggcccctccaaagcccaggccccctcctgagcaggccaagaagagtagcgaccctctgtctctcttccaaggaactgagcctagggagctcatctggcagcaatggcttttactcatattttaaataatcacnnnnnnnnnccctcaagggagaatgttttaatttctgtttgtatcagtagaattaaggtagttggactttcatcctatagatgccacagttcccctttgttttaatattaaatatgttctcacttaattgctttgctgctagacttgcaactaatttttttaaagtatattccattattttgcatttttgatgtgtcaaaactttgacagcttttatgtagaataaaaaaatttttaaatttgtgtattgttacatatgtttgcatcaagctagcagccaagaggttaattgtgcaactaat

SEQ ID NO: 262725 - DNA, 766 bp, Homo Sapiens
gagctctgccctttaaccggaaacgtctccctgctcaccccacccccgcgcagacgcagtgctgagcaaacagctaccggacaaagagtgacgcccggagctggagttatggcggctacggagccgatcttggcggccactgggagtcccgcggcggtgccaccggagaaactggaaggagccggttcgagctcagcccctgagcgtaactgtgtgggctcctcgctgccagaggcctcaccgcctgcccctgagccttccagtcccaacgccgcggtccctgaagccatccctacgccccgagctgcggcctccgcggccctggagctgcctctcgggcccgcacccgtgagcgtagcgcctcaggccgaagctgaagcgcgctccacaccaggccccgccggctctagactcggtcccgagacgttccgccagcgtttccggcagttccgctaccaggatgcggcgggtccccgggaggctttccggcagctgcgggagctgtcccgccagtggctgcggcctgacatccgcaccaaggagcagatcgtggagatgctggtgcaagagcagctgctcgccatcctgcccgaggcggctcgggcccggcggatccgccgccgcacggatgtgcgcatcactggctgagcggtggagctgcgggcggccagggccgggcgctctgtgcggactggggccatgatctggcccgggggcctgagcctgggaccccaccccgtgttaatgaaaaatgagttttggcagc

SEQ ID NO: 262726 - DNA, 528 bp, Homo Sapiens
  misc_feature (15)..(15): n is a, c, g, or t
  misc_feature (35)..(35): n is a, c, g, or t
  misc_feature (62)..(62): n is a, c, g, or t
  misc_feature (83)..(83): n is a, c, g, or t
  misc_feature (442)..(459): n is a, c, g, or t
acctcagccccctgnataaggggctggcgcactgntgcgggaccgtggcgcgaatctggtgntcatcgagggcatgggccgtnttgtccacacaaactacccaaccagccctgcgctgcgagagcctcaaagctggccgtcatcaagaacgcgtggctgcccgagcggctgggcggccggctcttcagcgtcatcttcaagtacgaggtcccagccgagtgaaggcgctgcagctgccggacttcttctgctttgtcacttgtcaggaatgtgtttttaccaccacagggaaactgcgttcaaatcaacgtatttatatggtactcctgtgacgcggcacatacaccccagccgcacagatgcgtgtgacccagaggcgagacgcagctttgtcctgggagacgttcatattggaatctatttaactgctaaagaacctttnnnnnnnnnnnnnnnnnnaatagagagatctatacaggtatgtctgacgggacgcagcaccgtgggcacgcaccaaatagagttttt

SEQ ID NO: 262727 - DNA, 830 bp, Homo Sapiens
gggggcttccccgcctggcgcctgccctccagggctggggcctcgcctggcgggaccccgcagcagccccggccccatccccgcccagagccgggcgtcgtgtgggctccgtgggtgataacttgagagcgtcagacccaggactgttcagggaggagccccggtcagactcccacgtgtgaagaccgggccccaagtggcaagggctggcctggggcgggcagcttgggtcctggacgttcgataggaagcggaaggggaatcgcgggaagctggcccaggtcaggtccgcaaaggcttctgaagaagaggaagggcgagtaggggcacctggacgctgatggtggccaggatgctcagctggccaggagggcagcacctgctggggacggtggccctgccttcatgcccaggacaccagctgggtccagctagcagccactgggaatcagaggaatggggcagagctgggcattcaggaccttgaggacacgtgaccccacccgcccaccgccactatcaggccccgggaccgcactgacaggaaaccttccgtcgtgagggagcacttcccaggggccgcagggacgacactctccagggaggccccagcaaccacaccatcttcttgctgtgagaggtctcaccccgggctacctcctgtcactactcactgccctggggtccgtgggcaagttgcccagggtgggggtgcctagccaggtgcagtccccgccccgcctagtcctcggcgtcacgcaatgctcacctcgcctcttccccactaacatcccagactttaaaattcagtaaatcagatgtacaccgaa

SEQ ID NO: 262728 - DNA, 809 bp, Homo Sapiens
agggacgagggccagctctctggcatcagctgcttggacatcgaaaccccgtctccaagctcaagctgggagaacctggcccagtttcctgtatctcattggcccagccttccccttgctagctagttcttacttcataaggttttagagagacataaacgcagtaatgcatgaagagtgccgggcatggtgctgagccctgttcctgctctccctccagggctgctgagctagaattcccacctatgtctttccaagggactgttcacggcatgggacttggtctctgtcctgccccatcctcgtcacttgggaccacgagccctggttcagtcacccagggaagcctcccagcggctcatgaagcatcgagctccaagcccagatgccaagctccctggctgagctgaatgatgtcactcatggtggacgcgttctgctcacgggcccagagccctgtgaaatgcatcaaggtcctctccgctggccagcagcatccccaggcttctctcaggcgcccgtgttcacattttctccagcctgagacgcagcctcccgcctggaagggcctgtgccagcaccaggcagagggcaagacggagagggcagagcaagaactgcactgcatctcactgcagtctgaatctagacatcgccattccccgaggtgcgacctcagactaatgacatcctggctgagcctctgtttttctctctaggaaatgggggtgataattgtgcctacctcagatagacagtgccagaattaagtgagtcaagccaagtaaagcccagagaagattctcatc

SEQ ID NO: 262729 - DNA, 869 bp, Homo Sapiens
ctgcgattaaccgttctaagtagatgggaagccgtatcttgattcccacatattccgccagaaggctgtaatccaggaagctagaaaatgaaagcgttcaaccgttggttggcctttcgtagaggccctctgaagcaaagtaattatattacccccttggaacctcacagggctaatactcaggggtggtcacatcctggacccctcgcggagatcttccatgccctcaacctccctatagagcagtggggatgtagactgcttacaagaacagtcgtacagcgcctgtttactataccatttgtacgaaccctagagggactagtttgaaaggagtccagtgagtagtttttacttccttgtggatggagccactcgaatcaagacgtccaataacattgctagaaacccacgtcctagaaaaatgtcctgctcatcttgtcggccactgccttcctagccgtcctccaccttgcagaaagaatctagcctttgctctcttctctctcgtcatcgggggtcatttgctattcccctactgatattcaaccctatagaaggagcctggactctgatccctctgtacaggctggatggaaggggccctccacacttcctgggaggtcagagacaaactgtttcagagagtcagatggacttcccaagacttgttgagagatgtgacatggttcttggatttcctctgtagcagcctcctggacttcctgaggactcgacattgtccacagatgtactggccattacatgaaacaagaaaccaagcatctttgctgttgttaattattatatgtgccattgttacaggagattataggctagtctgtaataaattatcttatagcaaaaaa

SEQ ID NO: 262730 - DNA, 689 bp, Homo Sapiens
cggcgggaaattacacgcccacgtaataggtagtaaaggtggtgtgcatccactcacgggagtagacacctgggggttaaatacattgtcgatatccgttttaatatttccaggtcctctatagacgtattttcgcttgtgcaggtgaaacagcccccctgtggaacatttttccctggtcctagaactgttttacccccacccctttgaggggcttagtcctgggggtgattccgcggctggatatttggctcttggtgagcccttttgattcgtttcctttcggggggccatttctccctcggccttgaagactttttgccccctgtagacctttgtccgtggttatgtggaggggtctcgtgagtgcatggttggctcttcccatgagctctcgcttgacctcggtgtgcgcttgaggctctagagcatgtttcaccccggtccagaagctccatgcgtggtcactagggtgctgttgtctctcttggcgccccactagcctggccagctccagggacccccagttgcatggggccaagcaggtgggagtggacactcaggcttccccagtggacgtccctgagcagctcccgcatagcttggttctcccggagcttcctgctcaggcctcttgagaaatggatgctgtctcagaaggagttaaagctataacccgtaacctttaa

SEQ ID NO: 262731 - DNA, 840 bp, Homo Sapiens
gttttctttttcctgtttgttttgaatttttcaaacagctttactttcatagagaaaactttctacagaagttgactaagattttaaattgtaccatcattaaataaggtgggacaccatatgaatttcattgcactggaagaaatgcaaagcattttttaatataaagtatacagagcattctagtcaactacagctgtgttacagctatgtgttcttttggatttggtccaaagaaacctgagtctgtttccagagagaatgaaaaatgttatagacacctgatcagttactcctcactgtaggatgcacaaaaatgacattccttgtagatcccactgaatccagtttcccaacacttgatactttcctttttcccttcccccaccccagttcactttgggtttcaggttcaattctcgaatcacaggcatccagattttcttcataacaaacacatcccatggtcagatgaactacccagttttccaggatgacatcacctcttctgctcccaaatttcggccatatttaggtccaaatctttaaggccttttaaggcttgaagatttccagtgtaaaaagctacatctgctgtgaccaacccattttgaggtcctccatcatttatcacatttaagtgagataactgctttttcaagtggagtttataacttgcattaattcttaaaaataaaatctgtgtttgttcttctggaaggagatcaaatatagcttcgtgcatttttgtcatttgcttacaaatattcctgaaacaggcagaaggaacaggagccttcacttcatacttagataacagcttgtcaaataagctatcca

SEQ ID NO: 262732 - DNA, 997 bp, Homo Sapiens
  misc_feature (424)..(451): n is a, c, g, or t
  misc_feature (935)..(945): n is a, c, g, or t
ccacgaacgaacgacaacccgccgcgcccacccggcccccgcgcggctgggtggcgaattcgggacgaggagacagggctgagctgtttgtcgttggaaattgaggctcggccagaggcgggagcccctacagtgccacgatcaggctgaggctcaccacaccaggaagagagatgaacccgcgtctgcctgccgccccgccatgctccctctccccccactggcgtcacagtgcccccacccgcgttgctgcctgtggtgtgcgtgccctgggaggggaacacagcccctgagggcggggaccttgctgggggcccctcagcgtctttctgtgcctctgaattgccaatactgtccttgcatctctgagtctacgtgcacgcttgcccctggcgtgccacctgtgcggagcgcgtgagcctgnnnnnnnnnnnnnnnnnnnnnnnnnnnncgagagggtgtgagagtgagtggcgtgctgggcatgaaggatctgtggggtgctgcagttcctgcagagtggcccagtggcgaatggtgaaggtgtgggtttcagtccaggccctccccctggtagtcaggaggtgctggtgtccacctccagggccgccaagctacagggggcacatgggcccatctggtgggtcaggacctgcaggggacccggaggctcccacccccacctctcaggactctgcctccaccacccccgtgggcatgcactgaagggttgcctgcaaggtctccaggcgagggggaccccacaggggtgggcagcgccttctcccggcttccccacagtccccctgcagcgtcccccgtctgggtgttgaacctaaatgggggccggggaacaccttcccataacaaggctacccctggggcccatcccctggcccttctaagggccccccccttgtgggtcaaaggggtannnnnnnnnnntcacagaaccgggtgctccaaaggcaacccccccttcaaaatcctttctaag

SEQ ID NO: 262733 - DNA, 997 bp, Homo Sapiens
taccaccccgcctgcgtggcgaattcggcacgagggacgtcaccacagggaccagaatggaaacgaccttcggacccgccttttcagccgtcaccaccatcacaaaagctgacgggaccagcacctacaagcagcactgcaggacagcatgccccccatcagcactccccgccgctccgactccgccatctctgtccgctccctgcactcagagtccagcatgtctctgcgctccacattctcactgcccgaggaggaggaggagccggagccactggtgtttgcggagcagccctcggtgaagctgtgctgtcagctctgctgcagcgtcttcaaagaccccgtgatcaccacgtgtgggcacacgttctgtaggagatgcgccttgaagtcagagaagtgtcccgtggacaacgtcaaactgaccgtggtggtgaacaacatcgcggtggccgagcagatcggggagctcttcatccactgccggcatggctgccgggtagcgggcagcgggaagccccccatctttgaggtggacccccgagggtgccccttcaccatcaagctcagcgcccggaaggaccacgagggcagctgtgactacaggcctgtgcggtgtcccaacaaccccagctgccccccgctgctcaggatgaacctggaggcccacctcaaggaagtgcgagcacatcaaatgcccccactccaagtacgggtgcacgttcatcgggaaccaggacacttacgagacccacctggagacttgccgcttcgagggcctgaaggagtttctgcagcagacggatgaccgcttccacgagatgcacgtggctctggccagaaaggacaaggagatcgccttcctgcgctccatgctgggaaagctctcggagaagatccaccagctagagaagagcctggagctcaagtttgacgtcctggacgaaaacagagcagctcagcgagggactcctgggagttccggggggacgcatcc

SEQ ID NO: 262734 - DNA, 1093 bp, Homo Sapiens
  misc_feature (524)..(533): n is a, c, g, or t
  misc_feature (715)..(752): n is a, c, g, or t
ggcctgggtggcgaattcagcacgaaggggagcgtggtggccgcagtgcaaggcctgaacctgaggagccccaacaacttcctgtcctactaccgcctcacacgcttcctctccagagtgatcaagtgtgacccagactgcctccgggcctgccaggagcagatcgaagccctgctggagtcaagcctgcgccaggcccagcagaacatggaccccaaggccgccgaggagcaggaagagaaggaggagtaggtggacctggcttgcacacccaccgacgtgcgggacgtggacatctgagggcgccaggcaggcgggcgccaccgccacccgcagcgagggcggagccggccccaggtgctccactgacagtccctcctctccggagcattttgataccagaagggaaagcttcattctccttgttgttggttgttttttcctttgctctttcccccttccatctctgacttaagcaaaagaaaaagattacccaaaaactgtctttaaaagagagagagagnnnnnnnnnntagtatttgcataaccctgagcggtgggggaaggagggttgtgctacagatgatagaggattttataccccaataatcaactcgtttttatattaatgtacttgtttctctgttgtaagaataggcattaacacaaaggaggcgtctcgggaagaggattaggttccatcctttacgtgttnnnnnnnnnnnnnnnnnnnnnnnnnnnnnnnnnnnnnnttcagcaaaccatttctaaaggtagaaagaggggttttaggctaaaaaaacattattcttagtgcttttcctgataaagccaacccgtgtatggggggttcctaggcaattctctagtacttttgctttgctcatatgcatgtagtgcactttataaaagcctttgaaaggttaattatatctcccgtaaggtaaaatgtgggtaccttctttcacccttatttcagggctgaaagccccctcctttggttacaggatacccttaacgggggcccccgggggcattgttccttttggcccctggggaccaccacccccaacaaacccattccgtggaataa

SEQ ID NO: 262735 - DNA, 970 bp, Homo Sapiens
aaggtagcgaggcctgggtggcgaattcggacgagggcggggccggcgaactgcggcccggaacggctgaggaagggcccgtcccgccttccccggcgcgccatggagccccgggcggttgcagaagccgtggagacgggtgaggaggatgtgattatggaagctctgcggtcatacaaccaggagcactcccagagcttcacgtttgatgatgcccaacaggaggaccggaagagactggcggagctgctggtctccgtcctggaacagggcttgccaccctcccaccgtgtcatctggctgcagagtgtccgaatcctgtcccgggaccgcaactgcctggacccgttcaccagccgccagagcctgcaggcactagcctgctatgctgacatctctgtctctgaggggtccgtcccagagtccgcagacatggatgttgtactggagtccctcaagtgcctgtgcaacctcgtgctcagcagccctgtggcacagatgctggcagcagaggcccgcctagtggtgaagctcacagagcgtgtggggctgtaccgtgagaggagcttcccccacgatgtccagttctttgacttgcggctcctcttcctgctaacggcactccgcaccgatgtgcgccagcagctgtttcaggagctgaaaggagtgcgcctgctaactgacacactggagctgacgctgggggtgactcctgaagggaacccacccacgctccttccttcccaagagactgagcgggccatggagatcctcaaagtgctcttcaacatcaccctggactccattcaaggggggaggtgggacaaagaaaaaacctgcccctttaccgaacccctggggaaccccttctcccggacttggggtgaatgatcccctacatggtgggagaaccccccagaagggaggttccacgggccccccccagtggaacctttcctggggggaaaaa

SEQ ID NO: 262736 - DNA, 1114 bp, Homo Sapiens
aaggacgcgaggcctgggtggcgaattcggcacgagggaagtctggcacccaccgcctggccaggtgttcgggacgcgaccaggtgggcggtcgccccgccccgggagcgcggcttaatagctgagagcccgggggccaggccgcggctgcggcccaggcaacgccctgagggtggccacgctgccaggtgttccactcccccgggactatgggcaagggcccggggcggggagggcggcaggtgctgacactggagctgcgccggaggtcggggaactcggcctcctaagactgaggacactcgcctgctgggccggtcgagctgtgcggtgccctccgggacgcagggggcgctgcagccacgctgggtcaggctccgcagggccctcccaacccggggactaacggcgccggtgacgacttcgccgcgcgttggtcagccatggccaccgctctcgcgctacgtagcttgtaccgagcgcgaccctcgctgcgctgtccgcccgttgagcttccctgggccccgcggcgagggcatcggctctcgccggcggatgacgagctgtatcagcggacgcgcatctctctgctgcaacgcgaggccgctcaggcaatgtacatcgacagctacaacagccgcggcttcatgataaacggaaaccgcgtgctcggcccctgcgctctgctcccgcactcggtggtgcagtggaacgtgggatcccaccaggacatcaccgaagacagcttttccctcttctggttgctggagccccggatagagatcgtggtggtggggactggagaccggaccgagaggctgcagtcccaggtgcttcaagccatgaggcagcggggcattgctgtggaagtgcaggacacgcccaatgcctgtgccaccttcaacttcctgtgtcatgaaggccgagtaactggagctgctctcatccctccaccaggagggacttcacttacatctttgggccaagctgctcaatgaaccgccaggaactgacctgctgactgcactctgccaggcttcccaatgctttcactcttatctaccctttggcacttatcttgcttatcaacataataatttaaacccctcccccc

SEQ ID NO: 262737 - DNA, 838 bp, Homo Sapiens
  misc_feature (717)..(718): n is a, c, g, or t
  misc_feature (739)..(739): n is a, c, g, or t
  misc_feature (742)..(742): n is a, c, g, or t
gctgggtggcgaattcggcacgagggagatggccaccagcctcggctctcccacgtctacacccatcacctccagcctgagggcgcaactgagaggaactgagacccaagcagctcagtaaaggccccgcggcgagggcatcggctctcgccggcggatgacgagctgtatcagcggacgcgcatctctctgctgcaacgcgaggccgctcaggcaatgtacatcgacagctacaacagccgcggcttcatgataaacggaaaccgcgtgctcggcccctgcgctctgctcccgcactcggtggtgcagtggaacgtgggatcccaccaggacatcaccgaagacagcttttccctcttctggttgctggagccccggatagagatcgtggtggtggggactggagaccggaccgagaggctgcagtcccaggtgcttcaagccatgaggcagcggggcattgctgtggaagtgcaggacacgcccaatgcctgtgccaccttcaacttcctgtgtcatgaaggccgagtaactggagctgctctcatccctccaccaggagggacttcacttacatctttgggccaagctgctcaatgaaccgccaggaactgacctgctgactgcactctgccaggcttcccaatgctttcactcttatctaccctttggcacttatcttgcttatcaacataataatttatacacttctccccnnggaggagaaaccaagagtggnaanaccttgtcgggccgcctcggcccttcaaaagctttcttaaaaccttcggttgggcgcggcgggcccccggtaggtaaagggaaacatgggtcatac

SEQ ID NO: 262738 - DNA, 816 bp, Homo Sapiens
  misc_feature (215)..(283): n is a, c, g, or t
ggggcctgggtggcgaattcggcacgagggcccaagccagagcggcgcggcctggaagaggcagggcccgggggaggcggcggcagcggcggcggctggggcagcccgggcagcccgagccccgcagcctgggcctgtgctcggcgccatgagcggcggcgggccttcgggaggcggccctgggggctcgggcagggcgcggactagctcgttcnnnnnnnnnnnnnnnnnnnnnnnnnnnnnnnnnnnnnnnnnnnnnnnnnnnnnnnnnnnnnnnnnnnnnaccggcggcggaaaggcatctgtcggggccatgggtgggggcgtcggggcctcgagctccgggggtggacccggcggcagcggcggaggaggcagcggaggccccggcgcaggcactagcttcccgccgcccggggtgaagctgggccgtgacagcgggaaggtgaccacagtcgtagccactctaggccaaggcccagagcgctcccaagaagtggcttacacggacatcaaagtgattggcaatggctcatttggggtcgtgtaccaggcacggctggcagagaccagggaactagtcgccatcaagaaggttctccaggacaagaggttcaagaaccgagagctgcagatcatgcgtaagctggaccactgcaatattgcgaggctgagatactttttctactccagtggcgagaaaaaagacgagctttacctaaatctggtgctggaatatgtgcccgagacagtgtaccgggtggcccgccacttcaccaaggccaagttgaccatccctatcctctatgtcttcgt

SEQ ID NO: 262739 - DNA, 950 bp, Homo Sapiens
cataaagattcctcaagggactttcttcccgcctgggtggcgaattcggcacgagggagcgctcccaagaagtggcttacacggacatcaaagtgattggcaatggctcatttggggtcgtgtaccaggcacggctggcagagaccagggaactagtcgccatcaagaaggttctccaggacaagaggttcaagaaccgagagctgcagatcatgcgtaagctggaccactgcaatattgtgaggctgagatactttttctactccagtggcgagaagaaagacgagctttacctaaatctggtgctggaatatgtgcccgagacagtgtaccgggtggcccgccacttcaccaaggccaagttgaccatccctatcctctatgtcaaggtgtacatgtaccagctcttccgcagcttggcctacatccactcccagggcgtgtgtcaccgcgacatcaagccccagaacctgctggtggaccctgacactgctgtcctcaagctctgcgattttggcagtgcaaagcagttggtccgaggggagcccaatgtctcctacatctgttctcgctactaccgggccccagagctcatctttggagccactgattacacctcatccatcgatgtttggtcagctggctgtgtactggcagagctcctcttgggccagcccatcttccctggggacagtggggtggaccagctggtggagatcatcaaggtgctgggaacaccaacccgggaacaaatccgagagatgaaccccaactacacggagttcaagttccctcagattaaagctcacccctgggacaaaggtgttcaaatctcgaacgccgccagagggccatcgcgctctgctctagcctgctggagtacacccccatccctcaaggctctccccactagaggcctgtgcgcacaggctcctttgatggacctgcgt

SEQ ID NO: 262740 - DNA, 954 bp, Homo Sapiens
  misc_feature (799)..(808): n is a, c, g, or t
gtagcgaggcctgggtggcgaattcggcacgaggccctgacgacccagaggctaccaagcgcctgaagctcgccatgatccagcagtacctgaaggtggagagctgtgagagcagctcacacagcatggacgaggtgtccctgagcgccttcggggagtggaccgagatccccggcgctcaccacatcatcccctcgggcttcatgcgggttgtggagctgctggcggagggcatccctgcccacgtcatccagctagggaaacctgtccgctgcattcactgggaccaggcctcagcccgccccagaggccctgagattgagccccggggtgagggcgaccacaatcacgacactggggagggtggccagggtggagaggagccccgggggggcaggtgggatgaggatgagcagtggtcggtggtggtaggagtgcgaggactgtgagctgatcccggcggaccatgtgattgtgaccgtgtcgctaggtgtgctaaagaggcagtacaccagtttcattccggccagagcctgccacacagagaaggtggctgccaatccaacgactgagcattggcaccaccgacaagatctttctggaattcgaggaagcccttctgggggccctgaagtgcaacagacatacagtttagtgtgggaggacgaaacggatagcccaccctcacctacccaactgagctctggtaccgcaagatctgcgggtttgatgtccctctaccctctgaatgctacggccatgtgctgagcggctggatctgcggggaaggagcctaaannnnnnnnnnggtgaaaacgaattctctgttgtggaaacggcctgggaacaaggtccctggagtccaaggggacccccaggcttcccataccctaggcgaaagctccggtctcagcctttgtccccttaccccttattgtccacgggttacggttc

SEQ ID NO: 262741 - DNA, 1003 bp, Homo Sapiens
aagtagcgaggcctgggtggcgaattcggcacgaggggtgcttccgtggggcatgagaatttcccgggccatccaagcccaaggacctgggataaactgggagaactatggcagctacttgcatcgacttgtacctcacttagcccttgggggcgtcgtgagcttggattgtttaaggagggctcaggggtaggaatcgcgatggctttataacaatacttgaaaactaacgacacgcatacattttcttattttctggtggaggagcttagtaagtggtgctacaattgctgtgcaaagaaattccagaggggagaagaatgtaaaagtttggtggtgggtggcttggcattgcccctttttcccaccgattcggtggcttggtgaaggtgggaaatgtgaactccaattaagggacttggagaaaaggtgaagaattttgcaggtgggaaatttggatttgaatgtggacttgtaaatgacttgaccttgccattctgtgttcaaggtcacggtttgctgtggggttcctgggagaacttacttcaccccggagtcttttctttctcttgctccaagaagagccctgttggtgctttaccaccgcttggagtctcccgaggacacaaacaggcagagagggacgtggtaggggagagttctttccctgttttctgtgctttcctttttacagaacttcccggaaggccactcatggccatgccaggaagctttctcagaaacagtcataaacgaatctcttgaggtctctttcttggcctcccagctgagctttcttatcccacccctttctgggggtctataggaatgcatgaaaaaaacctgaaagttttttctgcttctcttccggccccccatggaaaccatgggcccttcggcccccgcgggttccttcaccctaaaaatttattttccttctccccgggcccagcccttttttttgggggccggaaacccgatttttaaaaggtgaccccttccc

SEQ ID NO: 262742 - DNA, 1179 bp, Homo Sapiens
cctaggtagcgaggcctgggtggcgaattcggcacgaggggtgcttccgtggggcatgagaatttcccgggccatccaagcccaaggacctgggataaactgggagaactatggcagctacttgcatcgacttgtacctcacttagcccttgggggcgtcgtgagcttggattgtttaaggagggctcaggggtaggaatcgcgatggctttataacaatacttgaaaactaacgacacgcatacattttcttattttctggtggaggagcttagtaagtggtgctacaattgctgtgcaaagaaattccagaggggagaagaatgtaaaagtttggtggtgggtggcttggcattgcccctttttcccaccgattcggtggctggtgaaggtgggagatgtgaactccaattaagggactggagagaggtgaagaattttgcaggtgggagatttggatttgaatgtggacttgtaaatgacttgaccttgccatctgtgttcaaggtcacggtttgctgtggggttcctgggagagcttactcaccccggagtcttttctttctcttgctccaagaagagccctgttggtgctttaccaccgcttggagtctcccgaggacacaaacaggcagagagggacgtgtagggagagttctttcctgttttctgtgctttcctttttacaggactcccggaaggccactcatggccatgccaggagctttctcagaaacagtcataaacgatctcttgagtctctttcttggccctcccagctgagctttcttattccacccctttctggtgtctataggaatgcatgagagaccctggacgtttttctgctctcttctggccctccatggagccatgggcctccgcctcggcggctcctcaccctcacaatttatttcctcctcccgtgccagcccttcttttgtgtctgaaaccggttttaaaatgtgactctcccagagaagaaccgctggctgtatgaaacttgacggcgcttttgtaaggtgccacccccaaactttaaggtagctaaaccaatttttaaaagattcaatggcttgttcatcctccagatgtagctattgatgtacacttcgcaacggagtgtctgaaattgtggtggtcctgatttataggatttcataattaaaatgtctgctg

SEQ ID NO: 262743 - DNA, 976 bp, Homo Sapiens
tagcgaggcctgggtggcgaattcggcacgaggggtgcttccgtggggcatgagaatttcccgggccatccaagcccaaggacctgggataaactgggagaactatggcagctacttgcatcgacttgtacctcacttagcccttgggggcgtcgtgagcttggattgtttaaggagggctcaggggtaggaatcgcgatggctttataacaatacttgaaaactaacgacacgcatacattttcttattttctggtggaggagcttagtaagtggtgctacaattgctgtgcaaagaaattccagaggggagaagaatgtaaaagtttggtggtgggtggcttggcattgcccctttttcccaccgattcggtggctggtgaaggtgggagatgtgaactccaattaagggactggagagaggtgaagaattttgcaggtgggagatttggatttgaatgtggacttgtaaatgacttgaccttgccatctgtgttcaaggtcacggttttgctgtggggttcctgggagagcttactcaccccggagtcttttctttctcttgctccaagaagagccctgttggtgctttaccaccgcttggagtctcccgaggacacaaacaggcagagagggacgtgtagggagagttctttcctgttttctgtgctttcctttttacaggactcccggaaggccactcatggccatgccaggagctttctcagaaacagtcataaacgatctcttgagtctctttcttgtcctcccagctgagctttcttattccaccctttctggtgtctataggaatgcatgagagacccgggaccgtttttctgctcccttctgggccttcatggagccatgtgccctcgggctcggggggctcctcaccctcacaatttatttcctccctccgtggcaagccctttctttgggggccgaaacccgggtttaaaaatgggactctccc

SEQ ID NO: 262744 - DNA, 1256 bp, Homo Sapiens
  misc_feature (953)..(953): n is a, c, g, or t
  misc_feature (1027)..(1027): n is a, c, g, or t
  misc_feature (1246)..(1246): n is a, c, g, or t
acggagcgaggcctgggtggcgaattcggcacgaggggttgatcttgatgccagtccccatcccaggctgtggttccagtggcatttatcacatgtggatgctgatcctggaagccctgcttcgtgtttttgggcatttgttccctggagccctgtttttgctcactgttgagacagaaaggctgcgcgtcccctcgccccagcctgtcctgagcttgcctcactgtgcatccttgtgggtgggcgtcaaaccccgcacctgagtctgctgcggctctggtgcctgcccggcgccattgtcagggtgggtgtcctgggccctctggataccccctgtctggccggggttgccgctccgttctgaccccaggccaccctggaggagggtttctgagagtgccggtggctcactctgtccttggatgacttgatttttgttaaaatggaaatggaaattctttctaaaagggaaaagagtataatgtaaaaacttttccagaagagaaattagattaacatattgttatttttaaagttagctgctatgataaataaatagatgaatggagatggtctccacctcccacaggctggcggtatacctccggcgaaaggctattggggccggctcttcccctggtggccccagcgtctgtgacccccgtcccgcctgtccgggcaaacgtgtggcctgtattttccctcctggaacgaattttcccaaccgggaaaactgttgtccacgtcttttgccgcccagaactctcatgctattatgaaaaggggtccacccggggcccacttaatcgttctagacacccttacgaagaccactcagagcacctccccaggagggggaattccttgtcgccctcattgtcccgttagactctatgtctcctacatcgtgacaagacacacccattgttccctccccttccagcgtcttatcnccactgcaacaatcatagcatgatgctatatcacttcgcctgcggccgaccgcgttcttacactatagccgttnctgacagttgtactccgacgcgaatttctcacatattcgttgcgctccttgccaccttacaattctacgaaagtccaccttcacacacgtgcccccatttgactcttctatctcctaaaagacacacaccacatccgtaacgacctgtacaagagcgatctgcgtactagctatctctttctcttcgtgtcacgacgtactctcgtctactctcactcngctatcttcc

SEQ ID NO: 262745 - DNA, 1371 bp, Homo Sapiens
  misc_feature (1343)..(1343): n is a, c, g, or t
cggcggctcatcgagaagtacattgcggagaatggtaccgaccccattaacaaccaggctttttcgaggagcagctcatcgacatcaaagttgctcacccaattccggccaagcctccctcagccaccagcatcccggccattctgaaagctttgcaggatgagtgggaatgcagtcatgctgcacaggttcactctgcgacagcagctgcagacaacacgccaagagctgtcacacgctctgtaccagcacgattccgcctgccgtgtcattgcccgtctcaccaaggaagtcactgctgcccgagaagctctggctaccctgaaaccacaggctggcctcattgtgccccaggctgtgccaagttcccaaccaagtgttgtgggtgcgggtgagccaatggatttgggtgagctggtgggaatgaccccagagattattcagaagcttcaagacaaagccactgtgctaaccacggagcgcaagaagagagggaagactgtgcctgaggagctggtgaagccagaagagctcagcaaataccggcaggtggcatcccacgtggggttgcacagtgccagcattcctgggatcctggccctggacctctgcccgtccgacaccaacaagatcctcactggtggggcggataaaaatgtcgttgtgtttgacaaaagttctgaacaaatcctggctaccctcaaaggccataccaagaaggtcaccagcgtggtgtttcacccttcccaggacctggtgttttctgcttcccccgatgccactatcaggatttggtcggtccccaatgcctcttgtgtacaggtggttcgggcccatgagagtgctgtgacaggcctcagccttcatgccactggcgactatctcctgagctcctccgatgatcagtactgggctttctctgacatccagacagggcgtgtgctcaccaaggtgacagatgagacctccggctgctctctcacctgtgcacagttccaccctgacggactcatctttggaacaggaaccatgggactctcagatcaagatcttgggacttgaaagaacgtactaatgtggccaactttcctggccactcgggccccatcactagcatcgccttctctgagaatggttactacctggctacagcggctgatgactcctctgtccagctctgggatctgccgcagcttaagaacttttagactttgcagctggataacaactttggaggaaagtcactgatctttggaccgagtggtaactacctggctccttgggggccccggatgtccaaatctacatctggcaaacaatggacggagattcttcctttcacngacataacggccctgaacccaggggtgg

SEQ ID NO: 262746 - DNA, 915 bp, Homo Sapiens
  misc_feature (884)..(884): n is a, c, g, or t
cctgggtggcgaattcggcacgagggagacttcccagaagatggcctgaagatatttactgaagatctcccggaagtggagtctctgccacgtgatcgagtcctcggcttcttaatagagaattttaagggtctggctattccttatctggaacacatcatccatgtttgggaggagacaggctctcggttccacaactgcctgatccagctatactgtgagaaggtgcaaggtctgatgaaggagtatctcctgtccttccctgcaggcaaaaccccagtcccagctggagaggaagagggtgagctgggagaataccggcaaaagctcctcatgttcttggagatttccagctactatgatccaggccggctcatctgtgattttccctttgatggcctcttagaagaacgagctctcctgttggggcgcatggggaaacatgaacaagctcttttcatttatgtccacatcttgaaggatacaaggatggctgaggagtactgccacaaacactatgaccgaaacaaagatggcaacaaagatgtgtatctgtccctgcttcggatgtacctgtcgccccccagcattcactgcctggggccaatcaagctggaactactggagccaaaagccaacctccaggccgctctgcaggtcctccagctacaccacagcaaactggacaccaccaaggcccctcaaccttctgccagcaaacactcagatcaatgacatacgcatcttcctggaaaaagtcttggaagaaaatgcacaaaagaaacggttcaatcaagtgctccagaaccttctccatgcagaattccctgagggtccaggaaagacgggtttttaccccaccagggtgaagtgcatcatcacanaaggaaaaggtgtgcatgggtgtgtaaagaa

SEQ ID NO: 262747 - DNA, 1121 bp, Homo Sapiens
  misc_feature (788)..(788): n is a, c, g, or t
ctgggtggcggggaacttgggtaagaggaagacacccccttcctgtcccctttctaggccccctcaagtgcaggtgacccttaattggtgagatcttcagcctcagccgccgacctttcccttttgtccagttttggagttcccgttttttccttgtttgctttccgagtgtaaggtctggccggtgagaaagatttcccccaaccttgattaatcagccccctcccccaacttacttcccttaggacgggtagggctgagggacctcctctcctggaaagtgcttactttgcctggggaaggggctagacactgtcccagggaaagtaatagaaggtggaagaaatcaataaaatcagaccaaacaagtcgcctttcgagggcctccaccgatttatggatgagagggggtggaggtggaaggcaggcccaagtccattctttggacacccaaactcagcccccttaaagagtggaaacaaaacaagctgcactttgcagaggtggtaaatgaaaggactcttggcctaacttcaagagtcccctggggtttgaaggggcaaagtttgagtctggatggaacctgggctgaggtaccttaagcttccccccgcaacaccccagcctcagggattgcgggagttgtcagagatctgatggatccgaaaggggcagggccaggggattaggtttggggtcagaggttctgttttccaggggaggggtgagataggcctggatcatgccctctgccatgccctccagctaggaggatcttgagtcagagnaggattggaagtgctttctcctccacccaggtgaggtcagggggagcttaggtcttagggagatggcaagtttgaggtatgaaggaaagctggggctttttggagctgccgaacaactgaaggacccagtgcgccttccatcccggactagtgaatagcgccccctcttcccccgaaaacgaggggcgagaggaacaattccccccctggggaaggacctgtcccccttttttgggaaaatgctttggaaaaaagttgttattgtttgcatagaggacactccctgagaaacaacttgttttggcaccataaaaagctcttgcccccatttcc

SEQ ID NO: 262748 - DNA, 969 bp, Homo Sapiens
  misc_feature (710)..(710): n is a, c, g, or t
  misc_feature (880)..(880): n is a, c, g, or t
gctgggtggcgaattcggcacgaggagccagatggactctgtgtccccagtccctgagttagctgaccgccaggcagggaggccatgttgctccacacttttttgaagaaggccttaccttgattccatatgtttcagaattagctgtgtcatctacaagagaaggccaaaggtacacattttacaaatgaaggaagaggcaaccccatggactgaaatgttctctgaagtagaattgaccgcaatcaggcctggcaggcctggagcagatcctgactgcagcagatgaaaaacagaacaagacaattacaagaccacgacatggcctctcaactaagtgtggttcgatttcaaagaatcctgcttctacagtggatgggcacaattctcctgagttgccaaatttcaagttactacatgttaatgcatttcgcacatatattgatcacataccttgactacggaggtgatgttacaatggatgaggctctgtaataaataatcacaaccacacatcagccggatgattagagaaattctcctggaaagtagttggtgctaaagaaccatgaagtgggcaaaagtgcatgtctgaacggtttcatcactcaccctgcaaattaggctcataactgccttccagcaagcatgtactagcatcaagaaacatctgacccccattctgtcattctgtaacctaacgtcatctntgactagacatcacattaagagtttcctggaaaactcggaactatattcctgggaggaatataaatatggttttttcaaggggagctactccattctcagctggaggaaaagggttagcctatgtgagtccgggagaacagaaagacaatgggtgtatataataaggtanaggttctggcctatggagggcaggttaaagaaaccactagaatccccaaagattaagagaaaggcccagaagatggaccccgaccctag

SEQ ID NO: 262749 - DNA, 957 bp, Homo Sapiens
  misc_feature (316)..(335): n is a, c, g, or t
  misc_feature (344)..(606): n is a, c, g, or t
  misc_feature (816)..(840): n is a, c, g, or t
gctgggtggcgaattcggcacgagggcaggaggcagagccccagcccctcccagccagagcccctccacaccagggactcctccttcacctgggaccaggagcctggggcacaccccagggtgggggagagggtaggaaggtctcccattgaatcctggcttcaggctctgccccgagaagtgtctgcggtgagggtgtgagccccgggctgatggcctctgaccccggcaacaggtgggaccctgactgactcgttcagctgcccccaagctgggctgcagagcatctgtttttctgctctccagtttcttttcnnnnnnnnnnnnnnnnnnnngagatggannnnnnnnnnnnnnnnnnnnnnnnnnnnnnnnnnnnnnnnnnnnnnnnnnnnnnnnnnnnnnnnnnnnnnnnnnnnnnnnnnnnnnnnnnnnnnnnnnnnnnnnnnnnnnnnnnnnnnnnnnnnnnnnnnnnnnnnnnnnnnnnnnnnnnnnnnnnnnnnnnnnnnnnnnnnnnnnnnnnnnnnnnnnnnnnnnnnnnnnnnnnnnnnnnnnnnnnnnnnnnnnnnnnnnnnnnnnnnnnnnnnnnnnnnnnnnnnnnnnnnnaccgcgtcctgcctgctcttcctgtttctttcccaagggtcacactccgtaagggagatgaacgtggaaacatccttgcgtgggctttctggcctcggagcaggttttacacggaaggggcccagggctgctcatgcattccgggctgcggggcagtcccctttcccgggggcccctctgtgctacccccagccctcccatctgggtggnnnnnnnnnnnnnnnnnnnnnnnnnacagggcaaaaccatccgccacaagcccccctcccaccgagcttgggggtaccgggccgcgcctcacccgcgggcccctcggccccgcgccccggaagacggggcgcccgcccctga

SEQ ID NO: 262750 - DNA, 950 bp, Homo Sapiens
  misc_feature (832)..(832): n is a, c, g, or t
  misc_feature (882)..(883): n is a, c, g, or t
  misc_feature (897)..(897): n is a, c, g, or t
gtagcgaggcctgggtggcgctcgaaacaaaagattttcctacctgcttatacttggtaaccgagggaatttctaagacttcttgctcatttctgagtattgtctttatatcctgacactatgaatgctacttggatgcctcttaagggtctcttctgcagggtccccatgaattgtggctgaagttgtgcacaaacaagtatctccagtgacaggagtgccttctgaggcagccattgcatcttcatctgctgacactctgctaggctgacttctgtagttttcaccactgatcttcagtccacctcacagagctctataaaacgcttaaatcctctttacatcatagactttcagctacttgaagatagccatcagccgctacgtgacttttttctccaggatctccctaatactatgaacgcggcagagataacggacaagctcggcctccattccctccgctacagaaactggcacattcaggctacttgtgccactactggacatgggctttacgaaggcctgaactggctcgccaaccagttccagaaccagaactgatcagaaggatctattctttgtgccttgtggccacatcagctagcctctgctgtgtgcacgtgtacgtgtgtgctgggagtggaggcagctttctcacagtgccttatccatgccataagaaaagcagtgttacattttaagaaaacccagtgttaagttttaaacaccaccttccatttcagtagctttgatgatcatttttgcaatttgatggagaaatccagaagggcttgctgggtgctcgaaggccagaagcgggcttcatggngagcgagttggaaccggggactgaagttccagctggttgcaatccctggnntctggcgtcctggnaggtccctgtttaggtcttttggccatccctttttcgtaaaaaaagggaaggc

SEQ ID NO: 262751 - DNA, 1107 bp, Homo Sapiens
  misc_feature (121)..(130): n is a, c, g, or t
  misc_feature (149)..(157): n is a, c, g, or t
ggagggcgccgggaaaccctttgtgtgcgcgggggtttgcgcttttagagcgggctcccacaaggtgttaaaaaagggcgcggggtgtcttgaatcgccggacagcgccagaggcgggaannnnnnnnnnaaggttttctccgttgggnnnnnnnnngggggctctcagaggaaggccttccccaggggttagcttctcttggggcgcgggggcagagggggcaccccagcaggaaggccttctgtggggaaggttccgccgggcaatggaaccattactctcccaaggttggggggccccccgcgggggaatgccttttcccctgttaagaagggggggtttatttggccccaaccccgcggcccgggtttcattcccatggaagggcccccactggggccccacggaacgtaagggagggccgtccgttaggccccatagggaaagggggacccctctccctccccgggagggtcccgcggagacacgaccggcagaggcctgcagatctcccgggaccaggcgaaggctgcgggtaataaagctccctgtacgtgtgggcagccgtgctggtcaaccagggcgattctgtccccaaaggccagggcacgggtgaacaccggggcgctcctgtccgagcgggccactggggctgtgtgcagaagaccacttcctctgtgtctcagcaggcgccacccggcaggaggccaaggcgcagcccaggcgccggaaggtgagcaccacatggggcggcattgcactgacaggcgctcccgggagcctcctggggccgagccagctcccgagccagagagaggaggtaaggggaagttcgcagttcacaagagcggcaggcacagctgcttcagcaggtggaagggcacgataaggtgcaggcaatgcaaatgctcatcctcctggggcaggcaccaggcctggcgctggaacccggaaggccggtgggacacctacgagacggccgcggccacggggcaggatcatgcctcgccacaactcttcctcgtcctccgccgcgcgcgcgcccgggtcgggccgggccccacccagggccttgggtgggtgactagtggcggtggcaaaaggaa

SEQ ID NO: 262752 - DNA, 1173 bp, Homo Sapiens
  misc_feature (45)..(45): n is a, c, g, or t
gctggtacaggtccggaattcccgggatatcgtcgaccacgcgtncggacagagtcacccatcaaactctccccggctacccctagtcggaagcggagtgtcgcagtttctgatgaggaagaagttgaggaggaagctgagaggaggaaggagaggtgcaagcggggcagatttgttgtgaaggaggaaaacgaaggactcgaatgagctctcagacagtgctggggaagaggactcggctgacctcaagagagctcagaaagataaagggctgcacgtggaggtgcgtgtgaacagggagtggtacacgggccgtgtcacagccgtggaggtgggcaagcatgtggtgcggtggaaggtgaagtttgactacgtgcccacagacacgacaccaagagaccgctgggtggagaaaggcagtgaggatgtgcggctgatgaaacccccttctccggaacatcagagccttgatacacaacaggagggcggggacggacggaggtgggccctgtggcccagcaggccatagctgtcgcagagccctccacttccgaatgcctccgcattgagcctgacaccactgccctgagcaccaatcacgagaccatcgactgcttgtccagatcctccggaattgtttacggtacttcctgcctccaagtttccccatctccaagaagcagctgagtgctatgaattcagatgagctaatatcttttcctctgaaggagtacttcaagcaatatgaagtagggctccaaaacctgtgcaattcctaccagagccgtgctgactccccggccaaggcctccgaggaaagcctgcgcacctccgagaggaagctccgcgagacggaggagaagctgcagaagctgaggaccaacatcgtggcactcctgcaaaaggtgcaggaggacatagacatcaacacagatgatgagctggacgcctacattgaggacctcatcaccaagggggactgaaggcaggagagagagcagctcccctgcccacctgcccctcaaccctgtagctgcagggggaggggacttcattcatgggttggtggtcgcaccttggtttgacttacacgggacatttgtgtttttggaggaaaagataccctgattctttgaatcttccttaagtttataaatatttatttttttaaag

SEQ ID NO: 262753 - DNA, 1032 bp, Homo Sapiens
gtagcgaggcctgggtggcgaattcggcacgaggcggaagacctgtttaaccaagtcccaggaattcactgcaaccccttgcagggggccatgtacgccttccctcggatcttcattcctgccaaagctgtggaggctgctcaggcccatcaaatggctccagacatgttctactgcatgaagctcctggaggagactggcatctgtgtcgtgcccggcagtggctttgggcagagggaaggcacttaccacttcaggatgactatcctccctccagtggagaagctgaaaacggtgctgcagaaggtgaaagacttccacatcaacttcctggagaagtacgcgtgaggacgcctgagccccagcgggagacctgtccttggctcttcctcccaatgcccgtcaggctgaactcgcctcccccgtgactctgcctcgggcctcgcagaggccgctggtcacttcgtcatcattttgcccctggagacgtctttctttgtgccttgatgttgagagcgcctctcttttgagcaaacaagcattctatatgcaaccagagtagaggggacctgctcagcaggtgtgaccagggttctctgaatctgttattgtttttgcttctggaaagttcatttggggtttacaacaactaggatgtgttggggtgagatgtttcagatctggagaaatgagcaggtgtcgggaaatgtgtgacttaaccgtggtgagggctggaaatccaaactcaccaccatgatctgtgaaataaagcccttagcggtgtgaagcatccggtccctttgaacaaaaggggcctggaaaggcccctgggggctgagaaaggggtccgcccgggtggccttggaaagcaggccgcccgggagcccagtaacacgtggaacctgggcaaggatgttgccctaaccttgggggaaaaaggctgggggcttgcggccaccgtcaaaagggccccctggggagggcggtggggttgaaaccccagccttgcaggaagaaactgggccctccccc

SEQ ID NO: 262754 - DNA, 1129 bp, Homo Sapiens
  misc_feature (184)..(184): n is a, c, g, or t
caggttccagaaattctcccccaacccttggggaaggggggaaccccggaaaggtttaaccaagggaagggccaaagccccctcccgccaatgaaaagccagggcaaatgaacctttccaacccccgggactgatttcctccccccggccagcccagcttgcccaggccactttttacccaccntaaaaaggttaggaaaaccgacccagaattcaagctcgcccccattcaagaaaaggacagggccttggctgctcggccaggtccccggggattgcccttgtggggaggatattttcagccctcatttccccgctgtcgccagcaggggggcgatgtgctcacaggctcggtcaggggagaacaggcaccggtcacccgcgggatgggtccacaccattccagcggctctctccacggaagtgggacactgccgggctgcactatgtgtcactgaaattcagggagacctctcagacggggttccagcctacgcatgttcaagggaacccctcatttcccaaagcccgccgggcgcacagaattctcaggcctggctgcgttgctgggaagcggaggcccagttcctcctgcagcctggctcacacccacgcctcacagtggggccctctgaccgtggccgcagcccccagcatctaccccaagctagtgcaacatcctgcccagtccacgtgctactgcgctcccggcgcctgcctccaggccaccgggcggaccctttctcagccccaggggccttccaggcccttctgttcaaaggaccggatgcttcacaccgctaagggctttatttcacagatcatggtggtgagtttggatttccagccctcaccacggttaagtcacacatttcccgacacctgctcatttctccagatctgaaacatctcacccaacacatcctagttgttgtaaaccccaaatgaactttccagaagcaaaaacaataacagattcagagaaccctggtcacacctgctgagcaggtcccctctactctggttgcatatagaatgcttgtttgctcaaaagagaggcgctctcaacatcaaggcacaaagaaagacgtctcctcgtgccgaattcgccacccaggcctcgctcctt

SEQ ID NO: 262755 - DNA, 1953 bp, Homo Sapiens
gctgggtggcgaattcggcacgaggcaactaggatgtgttgggtgagatgtttcagatctggagaaatgagcaggtgtcgggaaatgtgtgacttaaccgtggtgagggctggaaatccaaactcaccaccatgatctgtgaaataaagcccttagcggtgtgaagcatccggtcctttgaacagaagggcctggaaggcccctggggctgagaaagggtccgcccggtggcctggaggcaggcgccgggagcgcagtagcacgtggactgggcaggatgttgcactagcttggggtagatgctgggggctgcggccacggtcagagggccccactgtgaggcgtgggtgtgagccaggctgcaggaggaactgggcctccgcttcccagcaacgcagccaggcctgagaattctgtgcgcccggcgggctttgggaatgaggggttcccttgaacatgcgtaggctggaaccccgtctgagaggtctccctgaatttcagtgacacatagtgcagcccggcagtgtcccacttccgtggagagagccgctggaatggtgtggacccatcccgcgggtgaccggtgcctgttctcccctgaccgagcctgtgagcacatcgccccctgctggcgacagcggggaaatgagggctgaaaatatcctccccacaagggcaatccccgggacctgccgagcagccaaggccctgtcctttcttgaatggtggcgagctgaatctggtcggtttcctagcttttaggtggtaaaagtgcctggcagcttggctgccgtggaggagtcagtcgtggttggaggttcattgccgtgctttcatgcggagtgttttgccttcatgttagcttccggctcccctcccaggctgcagactctgacctgtggcatcaggcttctcccagtacaggagggtgccatcccccagcatgcggcttctctgccattagcagccctgggcgggccgaccacactcgaggctgcggtgctacgggcttagccctcgcctccctcactgggagcttccccatcctccctgccttccccagtgggaagttagggaagctcaggagcctgggaccccgcatgtcccaaaatgggattggagaagctggagagaaagcagaagaggccgaggagtgaggcagcagcctctatgctgtgatttccacaccgggtccgtgcagaggaaacagaaactcccaactgtccttacccaccgacatcacagcccctatgaagaaagtagccacaatctcaaataacaaaagggaatgttctaaaactttttcttccttaaaaaatggagaaaattgcacttgtgcttgctgtgtgggatataaacccaggattagtcccaggggtcgtgaggtttctgggtgaaaaggttaaatcgtagaaagctagtatattttttatatttttgtaacaattgcttttttcatgggggaggcggggttagtatttatagtcctaacaagtccagtaattttttataaatcttcagattataaacagcccctaaaaactttacaacgtttacacagttttttaaaaaagagactgtatacacttgatttgctttcaaaataaataaggtcagctagtctaggaggttaacgtccgggaggaatgctgatcatgatagggttgggttttctacagattctggtccggggccctttcctatccaggcaccacctgagaaagttgtcatttgaggtcgcacttggaagttacatctgtgaagtttctgtcattcgtccagatctgtgtgtgtagcatgtgctgaggaagcacgtgctggggctgtgcctcagacagtgcatcaccgggcacccagaggcttgcctggctattcctgttctggtgtgtgtggagtgttggggaggaacagatgcagatcaacctgtggctgttttcccgtctaggttctcac

SEQ ID NO: 262756 - DNA, 1304 bp, Homo Sapiens
  misc_feature (1007)..(1007): n is a, c, g, or t
  misc_feature (1076)..(1086): n is a, c, g, or t
  misc_feature (1117)..(1125): n is a, c, g, or t
ggcctgggtggcgaattcggcacgaggagggatctgatgaaccagctttgcacctacatacgtaaccaaattttcaggcttgttgcagttaactagaaacctcctgcacagttggaaacgtgttgatagtaacttgctttggagtggcctgtggggtggcaagaggaatcctaccagcggcccattagtagcacgatgtggaattatcttcgaaaacaaaaacctatgaatctgtcccccacctccccccgcctccttcccgctttttgagttacagggagtcgtagtgtggtcatttacaaggaggaattgtggtcatcagtaacaacagaaagccctcagtaaactcccgagggattgcaagctggctcaagctggcccctcagctctggactgcctctgcaaggtcagaagggttgtttgtggagtctgggctgggcagcactgcctagaatatcatgctgtctctgtcacccaagggtgtttcttgaggaggggtggctctctctgcctccagctggaggccctggtaccctgttctaggtcactcttcaagatggggcctaccttgcatcaatcccacgaagggagctgtatggtgggtggtggggaatctgggagagaaaccttagtaatgctgggaaggagcagcagagtctggggaccacccggtaaatggcacattcctgacacctggctgttttgatgttgcttatttcagaagcagaattaggtaagcaaaactccccggtgtgactgagacacacagaaggcacccatacccccacctccagcctgttgacagtaccattttgtagcagttttactactgtgtgatttttgtttggacatctgaagtagagcttgtattgtatttaaataagaatattcacaaattaaaaaccagcggtcctatttgaatcctgggggttacgctgagtggagcgcgctgatgcataagaaatgaggaaattagaacgaaaataggtatggtgccccgtaatggntagctttaaagaaaaaggtcccccaggaataattttttgtttgggcttgaattcaaaaattacctgggnnnnnnnnnnngggtggggcttttcaaccttgggtaaaatgnnnnnnnnnttggttacctttaaaccctaaccttccaccatttggcggaagaaagtttcctggaaagggccccgggaagttaaaaaccttgggggggccccctttggaaaaaacccccggttattgtcctaaaattggggcgaaaatgggcccccagggggggtttcccggggttagagccccgggtt

SEQ ID NO: 262757 - DNA, 665 bp, Homo Sapiens
  misc_feature (491)..(491): n is a, c, g, or t
ataacaggttctgttgctgctgagctttcgtcaggaagataagactttcccaacagtccgaagcctaggatatgagggctgaggaggactcaaaccgttgcagtcagagagacacctattttggtgaatattttttgaaatagttaagtggcctccagtacaaactcccagttcccagaaaagacttaaaactagtatctggagattccaagtcctttaaaaggattttagctgatctgcaggcatctggatgttagcctggggttttggctggattccacctcgctcagtgatgatagtctgtttccctggaacattcctgtggttttagtagtaatgagatgtgtgcaccactccagtgggaactggaagctcttagtagttacattggtaattaccaaaagaattatcaaacaagaaatcagcaagcctgcttacctccagagacacaccggttcacttacagtatctagcttcctcgactccttggntaaaatcgtggagtatgaaccgtggacagagaaataaatatggagccgttttattgagcagttttctccagggatgacggctgtcaatgtgtttcctgcccgtttttcaacccctaatctctgcccttcattttgtactcttgtggagagtccgtaacccaacacctaataaac

SEQ ID NO: 262758 - DNA, 933 bp, Homo Sapiens
gggtggcaattcggacgagggtgcaacacaaagccgggacctagcaccccgctctgccatgctggctccagcctcagacgcggcctcgtcatcctagggccatcctgtgccccctcagatgcaagccttcccttgctggtgcccgagttctgtccatcaaggtgcccagggcccgggtctgaggggctttctgccattgttggtctctggcggtgctgagctgggccggtgcctgtaggacgtgcactccaccgtccgcaaggcagggtcagagctgcccaaccttcgacctctggcgagcactcaggggtgggtgcctagaagcgtcctccccacagctgggggcccacacctctccctgcttgaccctcagatcatgctgtcacctgaagcaaggaacacagcatgggtgtcctttgatggacggaagagacaagagatccgccatggagacaggtgtgggctgcatgccgggctgggcgctgcctgccaacctcctccccgggccaggcagcgcctgccctcttgcggttggcctgtagacacagcttgtcccctagggcaccacagggcctgagtccctgggtcttgcagcatcacagtcggggcacccgtcctgggggcagcgggtcgcatacggtggcacatgcaggcctggccctagcagaggcctgagggtgtcccccctggcactgctgcccactcccaccacactcctgggacctcaccccctgagggccccgggggcaaagttttgtcagttccctgcaccgtcccctcagggacctggggatggctctgtcccagcacccatgggggcactgctcagcctggcccctggggggagggggttgccccggccccccaaggaaaagaatccccgccattccccagggagggaagagaaagaaaggttcctttgccccgggggag

SEQ ID NO: 262759 - DNA, 1956 bp, Homo Sapiens
  misc_feature (1136)..(1136): n is a, c, g, or t
gatccctccgcctgcgtggcgaattcggcacgagggtgtctggtaaggtcatgggggaagggagatgagagaggagataggcagatgtgggtatggggcccagtgtgagaaggaagacagagaagttcttgaaagctgggggatgtgtgggcaagaggtggattgagcaggatctcagggttatgtcgaggaagggaagaaagaaacagaagtcaggcagaggcgtgtctgtgcaaactggaggactccttccaacttcctggaacaaagcgacatcgccagcagcaggctggcagggagtggttgaggtctgggggccaggccacatggctggagaggaatttcagggagcatagcatcgggaggatgctacatatccagggactccctcctggccttcctgtgtcacttcacaatgtgacagtccccaggcatgcccacaggccaggcccagtcacagctgggcttccacaggtcagaatatgggacaggacatagggagaggaccctgtgagttggtgacatatatgtggcagagatggtagtgttcagctgcttcagcagtgtccccaaccatcccaatagggtgggggcctgtggggccagaggactccatgacagtagccatggagtcccacctgtgccaggtcagagcccacccggcaggtttcagagtggtcagcccagtttaagggtgggagtctggagccagacagccaagccccttccacatctacagggtcactgtcatcctcaccacagcccaggggtgattctcacctctgcctgcttattgtggggtggggccgattcctccctttagtcattcattcatataccacatatttattgggcatcggtgatgtgtcaggcacagtccttggcacacagaatacagcagtgaattaaacaggcaaaaattcctcccctcctggagctcagtgtcaggaaagggggtgataaatgacaatcaaatcgacatggaggttgagcacctctgtactcagccctctgtctgtccttctgaggacgcaacaagcctggttccctagagctcactttgaccctcaatatgttcataatttccctgctgcttctcccatcgttagacatctgccacgtaagcctgctgagangaagcctcagcccactcatacctagaagacgctgctggggaaggtcagcacacccaagaactttgggagtgtgtgtctgttttggtttgtgagaaagtaagctgcccctcattctggccagttctttccagtagccatggggctggctacaagaagcaaaactgcccatgcaaagagaacacaggtcacttttcaaaacacttgcatcattaccctaaaaataggctgttatgcgttttgacaattgcgctatcctacactctgagggagttggcaacgcatgcggtatagtggagtgggaagagttgagactgaaagttaagagaagggttttcaagtcccagctcatctcaccccagtgaccttgacagtgtgctcactctcagagccatgggattacctggaacaaaagtgcagattagtgcccacggtccctttccagggtataacatgctatcgttctttaattttattatatatacatacttttcttctgttttttgctttaagaactaaccccgatcaagagtattttctttagctagcttaaaaagaaaacatatattttatgtaaaaacacatacatggccaaatgcaatactgaagagacaatcatcctgtatcttttatggtttttcctgcttctgagtgtcgttctacaatgcccgttgacttattccattgcgtctctgctttagggtatggtttggtcgctttggttgtcatgagaaagagacattctccttgcagctacctccatgtgagtgaattcctggataaagcaagatttcctttcaataaacgctgtcgacccaatggg

SEQ ID NO: 262760 - DNA, 1779 bp, Homo Sapiens
cactggccggtcactgtccctcaagctaattcagcagctccgtcaacagagcgcccagagccaggtcagcaccactgctgagaataagaccacgacgacagccagattggcatcagcgcggacactgcatgaggtttccctccaggagtcaatccgatacgcccctggggatgcagtggagaagtggctgaatgacttgctgtgcctggattgcctcaacatcactcggatagtctcaggctgccccttgcctgaagcttgtgaactgtactatgttaatagagataccctcttttgctaccacaaggcctctgaagttttcctccaacggcttatggccctctacgtggcttctcactacaagaactctcccaatgatctccagatgctctccgatgcacctgctcaccatctcttctgccttctgcctcctgtgccccccacccagaatgcccttccagaagtgcttgctgttatccaggtgtgccttgaaggggagatttctcgccagtccatcttgaacagtctgtctcgaggcaagaaggcttcaggggacctgattccatggacagtgtcagaacagttccaagatccagactttggtggtctgtctggtggaagggtcgttcgcattgctgttcacccagattatcaagggatgggctatggcagccgtgctctgcagctgctgcagatgtactatgaaggcaggtttccttgtctggaggaaaaggtccttgagacaccacaggaaattcacaccgtaagcagcgaggctgtcagcttgttggaagaggtcatcactccccggaaggacctgcctcctttactcctcaaattgaatgagaggcctgccgaacgcctggattacctgggtgtttcctatggcttgacccccaggctcctcaagttctggaaacgagctggatttgttcctgtttatctgagacagaccccgaatgacctgaccggagagcactcgtgcatcatgctgaagacgctcactgatgaggatgaggctgaccagggaggctggcttgcagccttctggaaagatttccgacggcggttcctagccttgctctcctaccagttcagtaccttctctccttccctggctctgaacatcattcagaacaggaacatggggaagccagcccagcctgccctgagccgggaggagctggaagcactcttcctcccctatgacctgaagcggctggagatgtattcacggaatatggtggactatcaccctcatcatggacatgatcccggccatctctcgcatctatttcctgaaccagctgggggacctggccctgtctgcggctcagtcggctcttctcttggggattggcctgcagcataagtctgtggaccagctggaaaaggagattgagctgccctcgggccagttagatgggacttttcaaccggatcatccgcaaagttgtgaagctatttaatgaagttcaaggaaaaggccattgaggagcagatggtggcagcgaaggatgtggtcatggagcccacgatgaagaccctcagtgacgacctagatgaagcagcaaaggaaatttcgggagaaacacaagaagggaagttagggaagctgaaagagcatgggacctctctggatacattaatcccctggggaccgatggaaagtggaaattgaagttttgaaacaaaagctggggcccgaacgcctcgaatcattagccctgaaaaggggcacaaaaaaagggaagttagagggccaaacaaggaacccac

SEQ ID NO: 262761 - DNA, 990 bp, Homo Sapiens
  misc_feature (123)..(135): n is a, c, g, or t
ggggcgtgtgtgaagtgggtgcggtcccaaacgcgaataatgggccaccaggggggaggccccccctttttcccggggccctttgtgccccctccggaaagggcaaagccgggcccctggggnnnnnnnnnnnnnttttggggccccttgcggttccaggatgctcaaggaggaccgttgatggccggccaccgggggcccccgtcgatcttcattcgatgaccaaggcagtggggtttccccgccaggcaccccagcaccggactccatctgggtggccgcctcgatgcgtgtgcggaagacctccgggctacggtcgtcactggcgttcatctccaccacagagtaccccgcgtgacgcgcaatcacgtgtgccagggtggtcttccccagccccgggggcccacagagcagtgccaccttctgcttcggtcgctggctcgggtccagcccagcctccagcatctcctccagcacctgttcgtggctcttccacttgcctggggctgtggcctccttgctgacccgggccggctcaacactgggcctgggcttccgggaaggcctctcgtggccaaacaccaccaggtcccacaacttcagccacttgagcaggcagcggttggtgaagtcatcactgagcagctccgtgtagtggcggggtgcaaactcatccacccagaggcagtgactggaggcgtcttgaccgtcagtcggctcctcctcaggggcccccaagggctgggctgcctcctcctcccccgacctgagactgtgcagggtgtctgaaagcttctgggcctcctgaagcagccgctcccgccgctcgccgtcgacctgcttcttcagggaggctaaggacacacccagcaggtccagctggccaccgcctcgccatgggacgtggaggagagagccctgcacccccggggccatggggtcagcacgcagcaccagataagcccggtcgccacccaggcctcgctcttt

SEQ ID NO: 262762 - DNA, 947 bp, Homo Sapiens
  misc_feature (854)..(854): n is a, c, g, or t
  misc_feature (912)..(912): n is a, c, g, or t
cgaatacgtcctaagtacgagcctgggtggcgaattcggcacgaggcagattcagctccgagagcactcgctcctatcggcggggggcgcggagccctgaagatggtccctcagccaggcagcctctgcccagaaggaacgtgccggttggcatcactgaaggagatggctcaaggactgggagtctcccagcaagttctgtgcaacttttgcaagactagctccttgctggcccccacatgccccatgctaggccccaatgttcagagctgggacttgagctcacaaaactggggagctgagacatttgttctcttggatctcactctctctgtcccttgtgcctctgtagctggccttcttcctgccacaggccatgcctctaccaaggacacatggcctttccctgttagggctgatggcggttctttcctatctcattacccgctaggggcctgggagccctgtggctggatctgagtgctcctgagctggcttcagctgcagaactctcagtccctcatcagatcgagactctatttcccccgtcagtctgggggcttcacaagggcaggagagccctccatcactgacttccagatcagggaccctgccaagtagggactgtcttctcagccagccatttattagtctaatattccttcactaaattccaactctatgtctggacctgtgttaggcacttcagataccacacgagtaagacaagggccctgcaggggtggtcctttggtggaaagctggtcttaagggttgggcttgggaataggcagggtcagattccaggcatggctctggactcagctggtttatacctatatgaccattacagntgtctacagatcacatcccattctggctggtcaacatgcatgcctgtactgggctggntaaaataaaaatattcctgaatggcacctcccttt

SEQ ID NO: 262763 - DNA, 1003 bp, Homo Sapiens
  misc_feature (620)..(756): n is a, c, g, or t
gagcgaggcctgggtggcgaattcggcacgaggcacccagtcaatgcccatgaccatggccctctgctcatgctgctctttggttccccctgaggtcttttgtggacagagagtgtgaaaatgccctctagccacacaaggaaacaggactcagggacaaaggacctgtgccctgaccaaggcaatgcgtccctcaccatatatgcagtggtgcatcctttcctgttgactttttgatcagcaattaagactttagtcttttttgttggtgtgcaaagttattttcttaatggccctccagcccagccatcacaaaaatgctttccagctctcagggagaacatttctgatgcacgctgaatccagaattcaaatgaagcaaaataaaggcaccaggggctcttatgagactgagtgactcaaaatagagggaatgtggggacttggggcataagattgatcatgaatcaccaaatagaaaaaccctgggatggctttcaagaagaatcctccttgaggttttaactttcacctacaagcaagttttctcactgctcagtacagcaaggtaaggacagcagcctcacagcatcagtctgaggatagaatgggttaatgcnnnnnnnnnnnnnnnnnnnnnnnnnnnnnnnnnnnnnnnnnnnnnnnnnnnnnnnnnnnnnnnnnnnnnnnnnnnnnnnnnnnnnnnnnnnnnnnnnnnnnnnnnnnnnnnnnnnnnnnnnnnnnnnnnnnnnnnnnggtcacctgtacggtgggggggcgtgcaccttgggagtcccacccttactccgaaaggctgaaagcaaagaaaaaatgtgcttggaacccccgggacaaaatgaaagagttctccctgctgcgcacccaccttactcccccccgtcacccatttaccgctggtgcggcgtcacgcgtctccgacctcgccgccttgcttacacgcactttcctcgccccgtcctccctgcgggtctcctcctcgcct

SEQ ID NO: 262764 - DNA, 731 bp, Homo Sapiens
  misc_feature (697)..(697): n is a, c, g, or t
  misc_feature (716)..(716): n is a, c, g, or t
gattgaggacccccagcctggaatgagaagggtccccggttccatgtcagacccagaaaggtggatccccccactgttggctgcaggaggtttttggtacccccttttgttccagaaccgtcctgcctctcgcttggggacaggggggctttggatggcactggtgtgcacctggacccagccccggcctggcaggatccagggatgggtgcctgggatcctggggggagggaggcaggggacgcccttctggagctgggctcggagggtcctgccccatccagccctcggctctctgtgttctctgtccctagcctcaaaccctcttctggcagcgctagtgagatgccttagtctgtgggggtgggtgggggactggggccccgttttcctttgtgagtcttggttggccccagccctggcaggggcctgtctggagcaggggtaggtagggctgtgggttccagaactctataactgggcccctctccagtgtacaggggcttggagagacctgcagcccacccctccactctcccaggagtcgctgatcactgggacctggattccagacgtatgcaggggaggcggatccgagaggcgtgtgctttccgtgggtggagcaactcccccgacctgactggcactcatccttgtatgtaattaattaaacaagcccctttttaaacccctcttngccacgggcagagaagcanaccaaaaacatgtcg

SEQ ID NO: 262765 - DNA, 993 bp, Homo Sapiens
  misc_feature (650)..(704): n is a, c, g, or t
aaggagcgaggcctgggtggcgaattcggcacgagggcctgcaggacctctgctgccgggccatcgtctcctgcacccccgtgcacctcatcgacaagcttccactgcccgtcaccatcaagagccacctcaagtccttctcgatggccaacggcatgaacgcggtcatgatgcacggccgttcctactccctggccagcggggccgggggcggcggcagcaagggcaacagcctcaagaggtccaagtccatccgtccaccccagagccccccccagaactgctcgtggagtaactgcaagatctcctagcggggatgggcggggccgcctgtgcagatgccaggagggctcgagctggacactcctggctggacgccaggccagtgccgcctacgtggagactgtccacacagctgcctcagaagcgccgggctttcctcacacctgagccgggtgcgaggaggagcatgcacggaccaagcgcggcaggcgggaggagggggcgcggctgggctgctggtgcttccgggaatcttggtcggaaacaagccgggcctccccagctgcctgggcttgaccggcggggagcctggtaggcctttcttatttatataagagaacacttcacttttttggaccatttttaannnnnnnnnnnnnnnnnnnnnnnnnnnnnnnnnnnnnnnnnnnnnnnnnnnnnnnaactttcatggcgcaacggaaggcggccggggaaccacgctttggggaacccctgccgcaagggggaactccgcgggcccccccaagggcgcgaggacgtctccggcggcaacttgctggcccgcctgccaactggaggcaggaccgtgagaccgaaagcgacacggggcgagacctaaaacaggcgcgccaggatgcggagccccgtgggaaaaacgcgcccggaagtacagcggcggtaacgacggatacctccaagacggacacacaagagcgtgcaacgaaccgc

SEQ ID NO: 262766 - DNA, 1108 bp, Homo Sapiens
  misc_feature (598)..(598): n is a, c, g, or t
cctgggtggcgaattcggcacgaggctcttatggacatggagtagctctcaggctcttatggtacagctctaagaaggaacacttcttgcattgtctagtgaagtttctgggtttatggaagggaaactgacaaactggagccggcacagatggacactgggtaaagagaatgcagcctgtccctggctgcagtgccaggtgtggcctttcctgtgacagcaagtcacgtgctgtggctccagcttcataggaaggctcttgtctgtcaggcagtggagttacttacagacaagagccttgctcaggccagccctgcccctgcctacaggcacaggtgctttgccatctgtcccgttttcctgcttagggaaccaagatggtcagaaagttgcttgactctaacctaaatatttctgccgcttttgcgagtcagactctttttcttttccttgttcatggaaatggatcaaggagtaggagttttagatagctagggaggtggtgagaagttccgtctccacctgtaatttacaagtcgtgtcttaggtttccagcctctttcctctgttctgggtatctcgtgctctccaccctttnagggattttgggtggggtggggtccgtggcaagacactcgatccagacacacgcatttccgaggcacttccatgtcacttaccaagcctccttgtgtgtggatatcacttcactggctccctcaggctgcagccctgacccccaaggtagtgatggcaactggtgcatgagggtttgaatgggaaggaaccaagcaagcccctggttgcgaaaaatacctcttctattccgacagcgggccagaggccgctgccattagacgcatccctctacttacccccgatcactttttcatgggccaggccggcctttgcaacaagccagtttcctgttccctggcgcacccccatttttcttaaaaggggggtactggagccacttgcctttttccccttagcctccacttccatgtggggcagccctttctcacggggaatggggaaccctaccaatggggcttggggggaagcattgcctttgtgctaataaactttactaacccctttttcg

SEQ ID NO: 262767 - DNA, 977 bp, Homo Sapiens
  misc_feature (791)..(791): n is a, c, g, or t
ggcctgggtggcgaattcggcacgagggcaggggccagatcacatagaggtttggaggccaagatcgagagttttaattttacgcggagtgggatggaaagctactggagcattttgagcaaaggagtgttgtgatctgagttacattttgagggcatccctctggctgctgttgagaaaagctgtggggtggaagggaggataattgctgaagcatggagaccagttacaagaccattgtgatggcccaggtgggagataacagttgcttggcctagggtgatagtggtggcctagtgtggtaagaagggatcaggttctagatattatggatagtgtgaagttcctgagaaggcggatagggatgggaggtgacagaggtggaggggttggacacccactcccttatagcaggagagagcagagagtaggcccgaagtgggtcaggttgtaggtttgctaacagcaagctgagggagtctccttgtgcccacttctaatttctgagtgaagtaggaggccactccattggttgtgagtaaagaggacggcagcagaacagcgattgattgggaggggagagttgggccattgagggtggagaaatgtgcagtagccatcgtggagagtgagaggtgacccaactactgggcagcatttcaagtttcattcgtggtgggtaattggaggctctgtaggcctgcccacctgccctggtgtcacaagtccgccttaggcggacatacgtggaacacgggacccttataccacccaacccttgtatcccgctnatagctcaaaacgaatggtccccaagtattctagattacttgattgcctggtccccccgtaagaagtaccggtctctcggcgcctctcccctttcgatcaccccccaaacacacaaacgctcccgccgctgttttcccccaccccgctgtaccgacctcaaccttctcgccctcgcttctcctttc

SEQ ID NO: 262768 - DNA, 809 bp, Homo Sapiens
  misc_feature (591)..(591): n is a, c, g, or t
attcgtgatcaatgaagttgcccagaagcacccagaatcgatcatggctcggccgaaccagggtgtgtctgcccggaagatggatcctggagcatcactgccaagtgtggagatgagccatcatcttgtggggaccttatgtatttctggcccggtcgcctgaaggtcccctctacagcggggccggggagtttcccgccggcgaagacttttgaggcccttggcaggacaatggtcagcgtagtgacctcctgttccacagtagaggcacaggttcagctttctgcgtctttcttgttcttcctgcgtcaggcgcatgcgggcacctcccaccggctcggttggatctacctggtggtggcttgcaatgtgaggcaacaccagcgcccggggtggcgagcgtggcttgcgagctgcagcagccctggccagccttctctcaatgtgaatgcactgcccaatcagagcagacagcgacttggcgacctcgaggtgggagagctcctcctgaatgtggtcgctgaggccctcgtggtactggtcaatcagcgcaggcttcgttccaatccagggtcctggggcaatcatctnggaaagcatttggagtagtccgatgacaagaccccatgccttggcgcaggcgtctgatcttgcgtttggcaacctctcgcctctgagggtcttcaaagacatgcttcatttccatcatgaaagctgggtagttgtgcatcaggtagtgggagcgctccagctttgctgaggcccaacgggcagcacggccggtcatcatgcttgtcacgaagcagacc

SEQ ID NO: 262769 - DNA, 704 bp, Homo Sapiens
  misc_feature (349)..(349): n is a, c, g, or t
gtttggcagtttacacaatcaatcctggaagcattttatttacactgtgggtcccactgctgagctaacttgcatttacaaagcacctctagaatactggtcataatggtatccagaaattcaattagagagagtgtgtgtttctggggccaacagaggcaaggttagggggcagaggtaatataagtgagctggcccaagccatgcaacttagcctcatagattgaagtcatcacatgaattaaccccaaactcggtacccagtgatgtcagagcatgagtccagatgtgctctgtgcgtgcatgggatggcttccaataaagtcaaatgacacagtcaccgtgtcangttaaggtcctctaggaaacagacaccagagagaatgagaagtgcacagtgacatatggggggatgcctatgaaagacaaaggggagagggaccaggatgaggtgggaaggctcagactcggttgacacaggtgtgccacctgtgaaagagtgaacggggaaagaaagcagcatactcagggagagcctcagaccagagggccactctgagcaagtggccaggctgatggagcctgacactaaagatggcccagtagagaagtcacggcctagggtccagcacatgggagtgtccaaaacagcgcagattcggcgtgagcctgagggagcaaagtccctcgaggtaccgaagcac

SEQ ID NO: 262770 - DNA, 1236 bp, Homo Sapiens
  misc_feature (75)..(75): n is a, c, g, or t
  misc_feature (81)..(81): n is a, c, g, or t
  misc_feature (197)..(197): n is a, c, g, or t
  misc_feature (472)..(472): n is a, c, g, or t
  misc_feature (568)..(613): n is a, c, g, or t
  misc_feature (643)..(701): n is a, c, g, or t
  misc_feature (784)..(919): n is a, c, g, or t
ctgtgattatatgttcggggggagtggaggggttgacggaggaacggaaggtagtgatacgtaaggcatgtgcgntcctangcgtcatgcatattatggcttgatggggttggtggggccgggttgtccgtgtgcggagagtgggcgcgtgtcggagggggaggggttagtctgtctggcttagcctagataggtgngtgcggagggtgagagaatggcgctggtggatgctgtggtagtgtggttgggtagggggcatggtatgcgaggaggggtagcaatgcggtggggcccgggtgtgggagaggagggtgggggggcgcgtcggggaggatgtgagatatggggtggtatgcggcggggatggagccgctgagtgtgggtatgggtgacggtcgcggcggttttgagcgcgtcggggagatagtgtatagtgagagtgcgtggcgctggtgtcgcttttgtcggtgcngggcgtatgggttgccgctcgttgtgcgagaggtgacccgtccttagtgggtgtgtgggtgttgttagagggtagccggtgcgcgcgtgctgcgcnnnnnnnnnnnnnnnnnnnnnnnnnnnnnnnnnnnnnnnnnnnnnntatccattatgatggattgggtgcgctgtnnnnnnnnnnnnnnnnnnnnnnnnnnnnnnnnnnnnnnnnnnnnnnnnnnnnnnnnnnngcgtggactgtgccgcagggtaggggcgttggtggcggggggctgcgcgggcgtgcggtgggtgcaccgtggtgcgagcagtnnnnnnnnnnnnnnnnnnnnnnnnnnnnnnnnnnnnnnnnnnnnnnnnnnnnnnnnnnnnnnnnnnnnnnnnnnnnnnnnnnnnnnnnnnnnnnnnnnnnnnnnnnnnnnnnnnnnnnnnnnnnnnnnnnnnnnnngtcaatgtctttgttaaatggggcgatgataacactgaccttcatcaatcctgatgatgattccctaggtgaaaacatcctgcctaccacatagtggacacttagtgtatggtagcagaggtgagcttactggggccataatacttgcaaagggcctcccctttgcaaggttttggagagcctaagcaggatgccccatggtcctatgttttgggaagatttgcacaagatgttctattttgtctgagtcctctccaatcgtactcacttgcggctggccctcgtgcggaatgcgccagcgggggcgtggcggggga

SEQ ID NO: 262771 - DNA, 1670 bp, Homo Sapiens
  misc_feature (1147)..(1268): n is a, c, g, or t
  misc_feature (1277)..(1291): n is a, c, g, or t
  misc_feature (1329)..(1369): n is a, c, g, or t
  misc_feature (1401)..(1410): n is a, c, g, or t
  misc_feature (1511)..(1519): n is a, c, g, or t
tcctgcgcggccttcttaacgctgctgctgccgccgccacccctgtatacccggcaccgcatgctcggtccagagtccgtcccgcccccaaaacgatcccgcagcaaactcatggcaccgccccgaatcgggacgcacaatggcaccttccactgcgacgaggcactggcatgcgcactgcttcgcctcctgccggagtaccgggatgcagagattgtgcggacccgggatcccgaaaaactcgctttcctgtgacatcgtggtggacgtggggggcgagtacgaccctcggagacaccgatatgaccatcaccagaggtctttcacagagaccatgagctccctgtcccctgggaagccgtggcagaccaagctgagcagtgcgggactcatctatctgcacttcgggcacaagctgctggcccagttgctgggcactagtgaagaggacagcatggtgggcaccctctatgacaagatgtatgagaactttgtggaggaggtggatgctgtggacaatgggatctcccagtgggcagaagggggagcctcgatatgcactgaccactaccctgagtgcacgagttgctcgacttaatcctacctggaaccaccccgaccaagacactgaggcagggttcaagcgtgcaatggatctggttcaagaggagtttctgcagagattagatttctaccaacacagctggctgccagcccgggccttggtggaagaggcccttgcccagcgattccaggtggacccaagtggagagattgtggaactggcgaaaggtgcatgtcccctggaaggagcatctctaccaccctggaatctgggctgtcccctccagtggccatcttctttgttatctacactgacccaggctggacagtggcgaatacagtgtgtgcccaaggagccccactcattccaaagccggctgcccctgccagagccatggcggggtcttcgggacgaggccctggaccaggtcagtgggatccctggctgcatcttcgtccatgcaagcggcttcattggggtcaccgcgcccgagagggtgccttgagcatggcccgtgccaccttggcccagcgctcatacctcccacaaatctcctagtctaataaaaccttccatctcatnnnnnnnnnnnnnnnnnnnnnnnnnnnnnnnnnnnnnnnnnnnnnnnnnnnnnnnnnnnnnnnnnnnnnnnnnnnnnnnnnnnnnnnnnnnnnnnnnnnnnnnnnnnnnnnnnnnnnnnnnnctttggggnnnnnnnnnnnnnnnaaaaatttttcaaaacctttctttgggcgcggggcccnnnnnnnnnnnnnnnnnnnnnnnnnnnnnnnnnnnnnnnnncccgggccagaacaagggttgggatccccccnnnnnnnnnnccccggggggaacccgggggtttgaaaaaaacccaaagggattctggagggctttccggaatctatcaacgggagcccaaggaacctcaaaataaattaannnnnnnnntggcatttattggaagactgggggaaatccttaaagctttcggcgaactggaaaaccccccaaaaggggtggtaaaactgaaaccccaggggaatcaacccctgggcccccttggggaaaaaaatttgccccccgggggaaaaacgggggc

SEQ ID NO: 262772 - DNA, 862 bp, Homo Sapiens
ccagaagatgcagagctgggggatgagatgactgatgtgtgatgttgccctgcccagaaagggccctgccctagaccctgccagaaaagggggctcttcccccagagaagtggcttggagggaacttcccactcccattgcctgctttccccattccagccctctctgctagagggtaggagagagcctggatctctggccccaacccccaccagacctcatgccctggacactgctgctgagttggctcagactctgcactggcactgagcctttcacaactggcctccccttgaggttcctccactctagggtttgaggggctggaatcagggccagggcctaacagtgtttcttcccctcggccccacggcccatactcaccccttcacctgaggcttctcccctctcaacttgctgttgatttcttttgaggggtaaaagaaagaccgagttcattgaagcagagatgggagggtggtgaggcgtcctcacctccccccaccacagctgtggctggtaaggcaactgcttgaccactggcccagcaagcagaggcgggcaggaggatctgggcatcctgagccccttccctgaggctgtctcctgggaatgctggaccaaggggattacttcccccacccacacccccatttggacatctggggaaagtggagattaacccctccccccaaactcgtgcctttgcctctcaggacccggcacagtgggctggcctttatgggagtatggaaaaaggcctctgcctttcctcaggaagggacacctaggggggccatcacccttttctcacaccggcttcccccatgagcactcagccagcattggctgaaaacccggg

SEQ ID NO: 262773 - DNA, 687 bp, Homo Sapiens
  misc_feature (188)..(188): n is a, c, g, or t
ggacaggttacattcccagcaattatgtggctccagttgactctatccaggcagaagagtggtactttggaaaacttggccgaaaagatgctgagcgacagctattgtcctttggaaacccaagaggtacctttcttatccgcgagagtgaaaccaccaaaggtgcctattcactttctatccgtgantgggatgatatgaaaggagaccatgtcaaacattataaaattcgcaaacttgacaatggtggatactacattaccacccgggcccagtttgaaacacttcagcagcttgtacaacattactcagagagagctgcaggtctctgctgccgcctagtagttccctgtcacaaagggatgccaaggcttaccgatctgtctgtcaaaaccaaagatgtctgggaaatccctcgagaatccctgaagttgatcaagagactgggaaatgggcagtttggggaagtatggatgggtacctggaatggaaacacaaaagtagccataaagactcttaaaccaggcacaatgtcccccgaatcattccttgaggaagcgcagatcactgaagaagctgaagcacgacaagctggtccagctctatgcagtggtgtctgaggagcccatctacatcgtcaccgagtatatgaacaaaggaacgttactggatttcttaaaaagatgg

SEQ ID NO: 262774 - DNA, 964 bp, Homo Sapiens
ggcctcggagccctcacatcccacaagatcatgagattttgtatgattggatcaaccctacttatctggacatggattaccaagttcaaattcaagaagagtttgaagaaagttctgaaattctcctgaaggagtttcttaagcctgagaaattcacgaaagtctgtgaggccttggagcatggacatgtggaatggagcagccgaggtccccctaacaaaaggttttatgagaaagctgaggagagtaagcttcctgagatattgaaggagtgcatgaagttatttcgctctgaggcactattcttgctgctctccaacttcacaggcctgaagcttcatttcttggccccttcggaagaagatgagatgaatgataaaaaagaggcagaaaccactgatatcactgaagaagggactagccatagtcctcctgagccagagaataatcagatggccatcagcaacaacagccaacagagcaatgagcagacagacccagagccagaggaaaatgaaacaaagaaagaatcaagtgttcccatgtgccaaggggaactgaggcattggaagaccggtcactacactttaattcatgaccatagcaaggctgaatttgccctagacttaattctgtactgtggctgtgaaggctgggagccagaattatggcggttttacttcttaacattgccaaaggtgaagatgaagagctgctaacagtgaatccagaaagcaattctttggcattggtctacagagacagagagactctgaaattgtcaagcatattaaccaccgaagcctgaaacaaaagaaaaccttccaaacagaacaggtttctgggacttttcattcatctattatgaatgaccagcactggggccaaaggtgaacaaaaattgtgaccttcgtaatacctgggaagtctgaaagaagttacgcatggagtcaaggataactac

SEQ ID NO: 262775 - DNA, 596 bp, Homo Sapiens
  misc_feature (26)..(26): n is a, c, g, or t
  misc_feature (29)..(29): n is a, c, g, or t
  misc_feature (54)..(54): n is a, c, g, or t
gttcatggtctccaggtggatgaatntcnctcagtgcatcagaagctcagtgcngatatggctgatcattctaatttgatccgaagtttgctggtcggagctgaggatgctcgtctgatgagggacatgaaaacaatgaagagtcgttatatggaactctatgaccttaatagagacttgctaaatcggatataaaattcgctgtaacaatcacacagagctgttgggaaacctcaaagcagtaaatcaagcaattcaaagagcaggtcgtctgcgggttggaaaaccaaagaaccaggtgatcactgcttgtcgggatgcaattcgaagcaataacatcaacacactgttcaaaatcatgcgagtggggacagcttcttcctaggggccaagaaatgaagcttcaggcctgtgaagttggagagcagcaagaatagtgcctcagagcgaaataacttcatgcactccttcaatatctcaggaagcttactctcctcagctttctcataaaacctgaaaaacagcaatgtcaagttgttcatcaaagccacagatgtaaaatgactcacagaataaaagctgatcgttagctttgt

SEQ ID NO: 262776 - DNA, 947 bp, Homo Sapiens
  misc_feature (773)..(784): n is a, c, g, or t
aggtagcgaggcctgggtggcgaattcggcacgaggcagtggctgggcagccacaccacagtgggcgtcggcggacggcttgaggggttgacccaggacctccgacagctgcaggagagcgagcagcagctggaccacctgatgaatatctgtactacgcagctgcgcctgctctccgaggacactgacagccagcgcctggcctacgtgacgtgtcaggaccttcgtagcattgcagaccctgcagagcagatggttatggtgatcaaagcccctcctgagacccagctccaagccgtggactcttcggagaactttcagatctcccttaagagcaaacaaggcccgatcgatgttttcctgtgccctgaggagaccgtaggtgggatcagccctgggaagaccccatcccaggaggtcacttctgaggaggagaacagggccactgactctgccaccatagtgtcaccaacaccatcatctcccccctcatccctcaccacagatcccagccagtctctactcagcctggagcaagaaccgctgttgtcccggatgggcagcctgcgggctcccgtggacgaggaccgcctgtccccgcttggtggcggccgactcgctcctggacgcatgtgccgggaggacttctccggcctcctccctgaggagttcatcagcctttccccaccccacgaggccctcgactaccacttcgggcctcaaggaaggccaagggcatcaaagacctccttcgactgggaccttgggggaannnnnnnnnnnntggatttcctgaaggggcttggaaggggccacagggtctccccaaagattcccccccctttggctccggctgagccctggacactccctgttcccttgggcggtcccttccaaagctcttttttggaacccatttcaattgattcaccccgtgctccacgtgg

SEQ ID NO: 262777 - DNA, 974 bp, Homo Sapiens
ggcctgggtggcgaattcggcacgagggcgcaactatggcttccagatccacaccaaggatgctgtctataccttgtcggccatgacctcaggcatccggcggaactggatcgaggctctgagaaagaccgtacgtccaacttcagccccagatgtcaccaagctctcggactctaacaaggagaacgcgctgcacagctacagcacccagaagggccccctgaaggcaggggagcagcgggcgggctctgaggtcatcagccggggtggccctcggaaggcggacgggcagcgtcaggccttggactacgtggagctctcgccgctgacccaggcttccccgcagcgggcccgcaccccagcccgcactcctgaccgcctggccaagcaggaggagctggagcgggacctggcccagcgctccgaggagcggcgcaagtggtttgaggccacagacagcaggaccccagaggtgcctgctggtgaggggccgcgccggggcctgggtgcccccctgactgaggaccagcaaaaccggcttagtgaggagatcgagaagaagtggcaggagctggagaagctgcccctgcgggagaataagcgggtgcccctcactgccctgctcaaccaaagccgcggagagcgccgagggcccccaagtgacggccacgaggcactgggagaaggaggttcaggctcttcgggcccagctggaggcgtggcgtctccaaggggaggctcctcagagtgcactgagatcccaggaggatggccacatccccccggggctacatctcacagggaggcatgtgagcgcagcctggcaaaagatggagtcctcgcaccaaccagggggatgggaggaactgcaaccggcaccaccaagcgggaagctgcagcgcctggcacaagggaaaaaaggagtggcctcctgggcctgagagaaaggcaaccacgggcctcagcccatggaa

SEQ ID NO: 262778 - DNA, 1159 bp, Homo Sapiens
tcccccgccacgcccgcgctacccacctacccaaaagggctgggtggcgaattcggcacgagggggagctgcaagccgccccgccattctctacgcacttctgagctccagcctcaaggctgtcccccgaccccgtagccgctgcctatgtaggcagcaccggcccgtccagctatgtgcacctcatcgcacctgccgggaggccttggatgttctggccaagacagtggccttcctcaggaacctgccatccttctggcagctgcctccccaggaccagcggcggctgctgcagggttgctggggccccctcttcctgcttgggttggcccaagatgctgtgacctttgaggtggctgaggccccggtgcccagcatactcaagaagattctgctggaggagcccagcagcagtggaggcagtggccaactgccagacagaccccagccctccctggctgcggtgcagtggcttcaatgctgtctggagtccttctggagcctggagcttagccccaaggaatatgcctgcctgaaagggaccatcctcttcaaccccgatgtgccaggcctccaagccgcctcccacattgggcacctgcagcaggaggctcactgggtgctgtgtgaagtcctggaaccctggtgcccagcagcccaaggccgcctgacccgtgtcctcctcacggcctccaccctcaagtccattccgaccagcctgcttggggacctcttctttcgccctatcattggagatgttgacatcgctggccttcttggggacatgcttttgctcaggtgacctgttccagcccaggcagagatcaggtgggcagaggctggcagtgctgattcagcctggccatccccagaggtgacccaatgctcctggagggggcaagcctgtatagacagcacttggctccttaggaacagctcttcactcagccacaccccacattggacttccttggtttggacacagtgttccagctgcctgggaggcttttggtggtccccacagcctctgggccaagactcctgtcccttcttgggatgagaatgaaagcttaggctgcttattggaccagaagtcctatcgactttatacagaactgaattaagttattgatttttgtaataaaaggtatgaaaccca

SEQ ID NO: 262779 - DNA, 410 bp, Homo Sapiens
  misc_feature (246)..(246): n is a, c, g, or t
  misc_feature (281)..(281): n is a, c, g, or t
  misc_feature (340)..(340): n is a, c, g, or t
  misc_feature (357)..(357): n is a, c, g, or t
  misc_feature (370)..(370): n is a, c, g, or t
gagcagatccctaaccatgagcaccagccaaccaggggcctgccattgccagggagctgcaagcgccccgccattctctacgcacttctgagctccagcctcaaggtgtcccccgaccccgtagccgctgcctatgtaggcagaaccggcccgtccagctatgtgcacctcatcgcacctgccgggagctttgggatgttctggccaagacagtggcctttcctcagggaacctgccatccttctnggcagcttgcttccccagggaccagcgggcggctncttgcagggtttgcttgggggccccctctttccttgttttgggtttggggcccaagatngttgttgaaactttttnagggttggctttnagggccccggttggcccaagcattattttaaagaaggatt

SEQ ID NO: 262780 - DNA, 1006 bp, Homo Sapiens
ggcctgggtggcgaattcggcacgagggatgggcaggatgcctgcggctccaacagctggaacatggtggacgtggacctcccgcccaacaaggacgtggagcccggcatcttactacatgggctgaagccctggactcagtacgccgtttacgtcaaggctgtgaccctcaccatggtggagaacgaccatatccgtggggccaagagtgagatcttgtacattcgcaccaatgcttcagttccttccattcccttggacgttctttcagcatcgaactcctcttctcagttaatcgtgaagtggaaccctccctctctgcccaacggcaacctgagttactacattgtgcgctggcagcggcagcctcaggacggctacctttaccggcacaattactgctccaaagacaaaatccccatcaggaagtatgccgacggcaccatcgacattgaggaggtcacagagaaccccaagactgaggtgtgtggtggggggagaaagggccttgctgcgcctgccccaaaactgaagccgagaagcaggccgagaaggaggaggctgaataccgcaaagtctttgagaatttcctgcacaactccatcttcgtgcccagacctgaaaggaagcggagagatgtcatgcaagtggccaacaccaccatgtccagccgaagcaggaacaccacggccgcagacacctacaacatcacccgaccccggaaagagctgggagacagagtacccttttctttgagagcagagtggataacaaggagagaactgtcatttcttaaccttcggcctttcacattggtccgcatccaaattcccagctgccaccaccgaggctgagaaacctgggcttgaacgccttccaacttcgttttttgcaaggactatgcccccccaaaaggagccgaatgaactttcctgtgggccagtgaaccttggggacccagggcccgtgaaaacctccttctttttttaagaggggccggaaacct

SEQ ID NO: 262781 - DNA, 1301 bp, Homo Sapiens
  misc_feature (1162)..(1162): n is a, c, g, or t
  misc_feature (1226)..(1226): n is a, c, g, or t
gggaagcctgggactgtgtctgtcgcccatggccgccgcgctgctcgcccgggcctcgggccctgcccgcagagctctctgtcctagggcctggcggcagttacacaccatctaccagtctgtggaactgcccgagacacaccagatgttgctccagacatgccgggactttgccgagaaggagttgtttcccattgcagcccaggtggataaggaacatctcttcccagcggctcaggtgaagaagatgggcgggcttgggcttctggccatggacgtgcccgaggagcttggcggtgctggcctcgattacctggcctacgccatcgccatggaggagatcagccgcggctgcgcctccaccggagtcatcatgagtgtcaacaactctctctacctggggcccatcttgaagtttggctccaaggagcagaagcaggcgtgggtcacgcctttcaccagtggtgacaaaattggctgctttgccctcagcgaaccagggaacggcagtgatgcaggagctgcgtccaccaccgcccgggccgagggcgactcatgggttctgaatggaaccaaagcctggatcaccaatgcctgggaggcttcggctgccgtggtctttgccagcacggacagagccctgcaaaacaagggcatcagtgccttcctggtccccatgccaacgcctgggctcacgttggggaagaaagaagacaagctgggcatccggggctcatccacggccaacctcatctttgaggactgtcgcatccccaaggacagcatcctgggggagccagggatgggcttcaagatagccatgcaaaccctggacatgggccgcatcggcatcgcctcccaggccctgggcattgcccagaccgccctcgattgtgctgtgaactacgctgagaatcgcatggccttcggggcgcccctcaccaagctccaggtcatccagttcaagttggcagacatggccctggccctggagagtgcccggctgctgacctggcgcgctgccatgctgaaggataacaagaagcctttcatcaaggaggcagccatggccaagctggccgcctccgaggccgcgaccgccatcagccaccaggccatccagatcctggggcggcatgggctaccttgacaaagatgcccngcagagcggcactaccgcgacgcccgcatcactggagatctaccagggcaccagcgaaatccanccggctggtgatccccggggcatctggctcaggaactaccgggagctgtaccccccgggggaactgcccaagaaa

SEQ ID NO: 262782 - DNA, 1209 bp, Homo Sapiens
  misc_feature (25)..(25): n is a, c, g, or t
  misc_feature (115)..(115): n is a, c, g, or t
attctaccatatcatacatcagatnccatgctgtggagccgcactgggctacaggacatacagtacatatagcatgttttaaaccgaaagtgaaaggaaaaatatgacacagaanatttttacatacacatctaacggtgttgtccatttaattcgatttatatgatttgctgtgccactttgactggcttgcagaacaccccaaattctcttttccccataaagatctacttccatacagagtagaaaaagatggtggtaaaaaaaacttcagattcttccaggttccaacgattgtgtcccaaatgcccactgtatgaacacctgtgtgctctcctaacaaccacactcctgagcgttcggggccttgtgcgcgccgcggtgacctcagctgtctcaaggcagcatctccgtactgaatacctgagcccattctttctgggtccagctcacctgattcgattttgttaagtatttttcttgcacactgtacaaaagcctcttctacattctcccctgtgagcgcacttgtttccaaaaacatcagctcattttcttgagcaaatctggaggcttctaagaaggtaacttcacgatctgcatccaggtccttcttgtttccacaaaggatgatcacaatgttctggctcgctagcattcgggcatctgttaaccaattagtaagcgcattgtaggtttctcggctggtgatatcatagacgaggagagccccggccgcgcctcggtaataacttctcgtcacggacctgaatcgttcttgtcctgctgtatcccatatttgtaactttacatatttaccaccaacatttattatctttgaaccaaattccactcctattgtatgatttgagtcatctttgaattttttttcaataaactgatgaagtaagcaagatttgccagttcctgcatttccaataaccaagaacttaaacaaaaaatcgtaggtttcggacatggccgtctgcgacatcttgggagcggcgccgcctctcgccgggtcaccggctgcactcgcccgcggtccgccggcgcgtctcggtggggaaggacctggggcgggggaccggaggagggaggggcccgaccggtccccacggcaaccgccggtctcccagcggctgcggcccagccggactccagctccgcgcaggcgcagggcctcgtgccgaattcgccacccaggcc

SEQ ID NO: 262783 - DNA, 1056 bp, Homo Sapiens
  misc_feature (103)..(103): n is a, c, g, or t
  misc_feature (119)..(119): n is a, c, g, or t
  misc_feature (160)..(169): n is a, c, g, or t
gttcaatagcagctataatttgggcagttcagctccaaaaaaacaagggttcctggagatggcctttcatggcagagagttgatggggtagattaatgggctntagtaaggagcaaccnccaaggttccccgaaaaactgaggccacaccctgcttcctnnnnnnnnnnccatttgtattccctgacccatgtaacaagcctggccagctgtggtggaatccatgtgttctatcagaaggctgcagccaacatcaaggccaggcagtcaccagggtcaggtgggatctgaagggaggcttctaagaccagacaccctgttagtactaaagatgatgatttgggggtgggatgcctggaggggctggcaccattcaaaaaagtattggaaaacattagccaagaaaaaggctccttgtccctcctaatccatatccagatacccccaaccagagatcttaaaaaggatagaccagccatatgccaacatgccaggattccaaaagcatgcctcaactaattagggtattccctacagcagactggggtagaggggctccatcctggcaataaccagagagccttacctcgcctaggccagggtatggaatctagatgaagactgtccacaaacagtggctctcaagcctgggctaaataaataatattttgcttcattacatggccaaaggagaggaggagatagaaaagatgatattactacctctgtgggctggaagaacttcacctgttggttgaaaggggattaaaggaagataacaggaaaacctggtctggagaagacataaatgaaagctcctggaggccacttttctctgattagaaatctatcctcacactctgcccctagtagactttagcctttggagttcttagggaaaactggctttaagcagcagccagatcaccaaaaacattttccatctggtacaggacccggagctgaagccaaagtagattttggaggaacagctggacaagcaggatgtgtatgtcttacactaagaaaccctcgtgccgaattcgccacccaggcc

SEQ ID NO: 262784 - DNA, 1140 bp, Homo Sapiens
  misc_feature (285)..(322): n is a, c, g, or t
  misc_feature (409)..(494): n is a, c, g, or t
gcgtggaagatgtgtagggtgtgggtagcaggtcgagttggggttgtggtagtgcagagccgatatatatgtattggaggggacggaggtgtccgtgacagcttagtgataagaggggagactcgattactaatagcgtgcgagggtgaggagggaagaacgtagatagtgtcagggacgtcaaggacttagggcgaggacggggttactcttgagcgggggatgcccgcctgaagagagcacaggcaagtatcggtggatggacagggttagggataatgaacnnnnnnnnnnnnnnnnnnnnnnnnnnnnnnnnnnnnnnaataggtttgagggcggggagtgtattcgtggggtaaaggtggagaaagtgggcaaggagggataagaggaaagggagtaaagcgannnnnnnnnnnnnnnnnnnnnnnnnnnnnnnnnnnnnnnnnnnnnnnnnnnnnnnnnnnnnnnnnnnnnnnnnnnnnnnnnnnnnnctcggtgcggcgtgcggggggtggcggcgtgcgtttaggatgcgggggatgggtcagttgcggtcgctcggacttggccgcgagcgggggggtaggggtatccgtccgctgttcccgggagcggcggcgcgccttcccctatcatagagacccccacggacatgcccatgaacttgcttttggtccatacatgagtgttgacgcacagtctcttctcctcgcactcacagtagaagcaggagatgggtgggtgatgggacacttgctcagccacaaaccttagtttgtagcttttggaagggtcatcggccattgggtgttcgtgacagctggcaggagagcgggaagcagtcctcttaggcttgaccctgtccttgggaacttcccaggagcagtgaaatgtctcgcctatgatggggttgtagggcttcttggctaaagcgcccttgcggccctcgtgaaaggctgtgagataatactcaacgaagcaaatgactctctcctctggtgtggccccagcggtgatggccagcagtaggtctgggtgcgccatgaaatctgcatacatctccagcaaagatcgcttctccaggataaaggtgggaagcaccaccctcgtgccgaattcgccacccaggcctcgctc

SEQ ID NO: 262785 - DNA, 950 bp, Homo Sapiens
  misc_feature (85)..(103): n is a, c, g, or t
  misc_feature (109)..(196): n is a, c, g, or t
ggcgaattcggcacgaggctcatgatctgcctgccgtggcctccaaagtgctgggattataggcatgagagcctcgtgcctggcnnnnnnnnnnnnnnnnnnnaaagannnnnnnnnnnnnnnnnnnnnnnnnnnnnnnnnnnnnnnnnnnnnnnnnnnnnnnnnnnnnnnnnnnnnnnnnnnnnnnnnnnnnnnngtgtgagctgccatgtccagctgtaagaaatattttaaaatatttaagcttcagggcctttgaatacaggccctgataacatagctattttcctgcatagttgtctaataacaagatggtatagcccagtgcttcttgcactttagcaagcatcagaatcagcaaatatttaggtttcagggcctttgaatacagtctgataacacagctattttcctgcatagttgtctaataacaagatggtatagtccagtgcttcctgcatgttggcaagcatcagaatcagctgcagggcttttcaaaacagattgctggaccctcctcccaacagattctgattcagtagttctagttgggacccaggaatttgcatttccaacagactcccagataatgatgttaccgttcccagaccacacttgcagaagcagttcaaaaacttcaggggaacagaaaggtccctccctcaccgcttcaaagttcccctgacccttgaaagaaaaatttagcacacatccaccttttcccctagggctaacactctcctggtccaaaccctgggatgtcttcaaaaagcacaatacaagggggaatatgaacaaacttggactcccgaaaggtaaatgcctgcacacaaagaacggagggcctctcgaaaaggaaaaaacccccctggcccaggggggcttccacccccgttaatccccccaacttttggtaagggcccaggctgcgcgcctctcctccgggggcc

SEQ ID NO: 262786 - DNA, 1045 bp, Homo Sapiens
tccaacttcccgcaggctggggcaaatgttccttttgtgcgaaccggccgggttttccaggaagggattccaggaccaggagttctttgcccaggttcttttaacacgctcggccccggaagggggtgggggtcaccctccggtttttaataccccctgctggggggccatgccagggtcttcagcaccagggggagtcggggccttgcgtgttcagccatgggccctggccaacctgggggccccctcctccatgccccgccggaggtcctgagcagttcccagcctccctccaggtccatgcgctgtaccacatcctcgctgccgctgcggagtagcatggaccgcagggtgtccactgcagagctgcagggttccaggttcctggtggctagggctggactggcacccctcctttcctgggcctgcaggttccggggcagctggacacccacggtgcagctgacgcgcagcagaagcaccacaaacagctgggggtagagctcgagcaccgcgggccccgctgcaggcgtggacatgacctcaaacagtgcacaggtagccgagagaggcagcagcgtggccacgcggtctggggtgcggcccagcaggaaggcccggctctccttgaaagggacgtccctactcatcttctccagcagcagccccaggacctgggcagctaggcgaggctccaccgccagcgcccgccacagcatgcaggtgtggctgtccaagggcaaggggctgcccaggaggctggacaccacggctgcgcagtgctgggtggccaggaggtacacgctgtgctgggcggccggcaggacgtgctctccctgggcctcctgaagcttggagcgcaggacgctcacgatctcgggcaccttctcctggagcacaccgccccgctcctgcagcaggcagttgatcatgacggtagctgctcgggagcagttcttttcggggtctcccagggcctcaaacatggttagcaagaggctgatgagctggtctggggcctcgtgccgaattcgccacccaggcc

SEQ ID NO: 262787 - DNA, 991 bp, Homo Sapiens
  misc_feature (844)..(844): n is a, c, g, or t
gtagcgaggcctgggtggcgaattcggcacgaggctccctcagggaacatcacaggaagcagctgcaggacctgagtggacagcaccagcaggagctggccagtcagctagctcagttcaaggtggaaatggcagaacgagaggaacggcaacagcaggtggctgaggactacgagctcagactggcccgggagcaagcgcgagtgtgcgaactgcagagtgggaaccagcagctggaggagcagcgggtggagctggtggaaagactgcaggccatgctgcaggcccactgggatgaggccaaccagctgctcagcaccactctcccgccgcccaaccctcaagctcctcctgctggaccctccagccccgggcctcaggagccggagaaggaggagaggagggtctggactatgcctcccatggccgtggccctgaagcctgtattgcagcagagccgggaagcaagggacgagctacctggagcgcctcctgttctttgcagttcctcctcagatcttagcctcctgttgggcccctcttttcagagccagcattctttccagcccctggagcccaaaccagacctcacttcatccacagctggggccttctctgcacttggggccttccatcccgatcatagggcagaaaggccattccctgaggaagatcctggacctgacggggagggcctcctaaagcaagggctgccgcctgctcagctggagggcctcaagaattttttgcaccagttgctggagacagtgccccagaacaatgagaaccccttctgtcgacctgttgccccctaagtctggtcctctgactgtcccatcttggngagggagccccctcaagtgccacgtattccaccgcctggtccacaaaaccaaagttccccttagccatggcatccaagtctttttccgggtccctgaggcctccctcctcccattcacaaggcagtgggtcccagcaatggttcccc

SEQ ID NO: 262788 - DNA, 1005 bp, Homo Sapiens
  misc_feature (941)..(941): n is a, c, g, or t
gctgggtggcgaattcggacgagggggaggagaagctcctgacggagcgggaggtggccgccctgcggagtcagctggaggagggccgggaggtgctctcccacctgcaggcgcagagagtggagctgcaggcacagacaacaactctggaacaagctattaaaagtgcccatgagtgttatgacgatgagattcagctttataacgagcagattgagacactgcgcaaggagattgaggagacagagcgggtcctggagaagtcttcttacgactgccggcagctggcggtcgcccagcaaaccctgaagaatgagctggaccggtatcatcgtatcatcgagattgaaggcaacaggctgacctctgccttcattgaaactcccattcccctgttcacccagagccatggagtctctctcagcactggatccggtgggaaagatcttaccagagctctgcaggatataacagcagcaaaaccaagacaaaaagccctccccaagaatgttccaaggagaaaagagattataacaaaagacaaaaccaacggagctctggaagatgcaccattaaaaggtttggaagacacaaagctggtacaggtggtacttaaagaggaaagtgaatctaagtttgaatcagaaagtaaagaagtaagtcccctgacacaagaaggggctccagaggatgtgccagatggagggcagataagcaaaggctttgggaaactatacaggaaagtcaaaggagaaagtgagaaaccccaaaggagcctgagacccccactgagctctacaccaaagagcggcacgtgctggtcacagggggatgccaattacgtggaaccctaaatcctatgtctcctccatcacagctaaaagggggggggggctggtttctgttgccggaagactctggggctttatgacgggccaagntggagccttcttctgagtcacccaagcccccctttaaaaaatggggcaggtgggttcttgccgg

SEQ ID NO: 262789 - DNA, 924 bp, Homo Sapiens
ctaaggagcgaggcctgggtggcgaattcggcacgagggggaggagaagctcctgacggagcgggaggtggccgccctgcggagtcagctggaggagggccgggaggtgctctcccacctgcaggcgcagagagtggagctgcaggcacagacaacaactctggaacaagctattaaaagtgcccatgagtgttatgacgatgagattcagctttataacgagcagattgagacactgcgcaaggagattgaggagacagagcgggtcctggagaagtcttcttacgactgccggcagctggcggtcgcccagcaaaccctgaagaatgagctggaccggtatcatcgtatcatcgagattgaaggcaacaggctgacctctgccttcattgaaactcccattcccctgttcacccagagccatggagtctctctcagcactggatccggtgggaaagatcttaccagagctctgcaggatataacagcagcaaaaccaagacaaaaagccctccccaagaatgttccaaggagaaaagagattataacaaaagacaaaaccaacggagctctggaagatgcaccattaaaaggtttggaagacacaaagctggtacaggtggtacttaaagaggaaagtgaatctaagtttgaatcagaaagtaaagaagtaagtcccctgacacaagaaggggctccagaggatgtgcccagatggagggcagataagcaaaggctttgggaaactatacaggaaggtcaagggagaaaagtgagaaacccccaaagagcctggagaacccccactggggctctacaccaaaagaagcggcaccgtgctgggtccacaggggggatggccaatttacgtgggaaccctaagaattctaatggtcctccctcccatcacagggttaaaggggc

SEQ ID NO: 262790 - DNA, 1080 bp, Homo Sapiens
  misc_feature (849)..(849): n is a, c, g, or t
  misc_feature (866)..(886): n is a, c, g, or t
agggagcgaggcctgggtggcgaattcggcacgagggcctcctttcgtgttcacctggctgaggctgtggatgtctgtgagagccatgcccagtgtcgggcctttgtggtcaccaaccagaccacctggacaggtcggcagctggtctttttcaagactggatggagccaagtggtccctgatcccaacaagaccacatatgtgaaggcctctggctgacctatctgagggctcggctgaccagctgactatcctcagcagctgggcttgcctgcggagggagtgacttgcactggcagcactgcatgtcacctgggaacccctgcagacaaagctaacatcccagacagacagatgtgaccaggacaaacgtgcaataatgccaaatgttaaaatgtgagtttaccagcctagctatgggactgctggctcctagtccaggaatcatgggggtatgactgcctctccaaccctgtgggctgtaagcaagctcaggctagtctccccaactgggggctgtgcccctccctgggacggttccgtgggcagccccatcactgtgttcaatagtgtgagaatgtagctaaagcccctgctgctgctgctgcacatgccacagcaggcggtgggggctgcgtggggacaatccatcgtggagtgttctctcagcttaggtctggacaggagacttggcgggggatgctccaaggatgtgggtgattctgtacctgggggaggctatctctgacctcccgacaggggacactcccaggccagccccaaggggtcaaggggcagaagtgcacacctcagcatgagccaagactggggttcaaggaaccaaggtgntggtttgagccagactnnnnnnnnnnnnnnnnnnnnnccggggccctttccgccctcatttgcctttcaatgaaaaaccctcaaagcagccaaaaccaggctttccccccttccctcggagtttggatatcccaaaatccttttggaacctccttgttggggtaaaaattggtttattttttggtaaacaataaatttaacttttgtttataaaaaggaagtttccccaca

SEQ ID NO: 262791 - DNA, 1047 bp, Homo Sapiens
cctgggggcgttaccaaaaggcgagcgccacgcctgggagaacccaagctttggaggacaaaggggagggggggtccttttttacccaggccaaggaatgtcctccgtcctcccaaatactaccaggagtaatgcctacctccattgactacaccaaacacagaggttcaataaatatctgtctttgcctttatccacagtgacctgacacaatagccatagaaaaagtactcacacccaagccccagctggggactgggaatgctagcatatggtatctcaagttggctctcagaactaaacagggataagggcctagaatggaagagggaaccagccagaccctcagtccttcctgtcctggactgggagccacagatgtccctgtgatctgtcactgccctgatctgggtcttcagccattaaagctcagtgtcatcttcagtcaccaacgggggtcttggtgtccttccaaacccctttggccaggacagctgactgttttcctcactccacggtgatgggaacatcttccacatcgcgggagactgcactctgaagctcacgcctgatttcgggcgatagctgtggatggggctgcagccggagcagttctaagagggcctctttctggtctgtggccaagtcggccttgtagcgctggaccaaagtcaggaggcactggtgccacagcacaggcagttcacgcttctctgtccggaaccccaggaagtggaagactagggcatccagcacccggtaaggcagtgcatacttcttatccagcagcagtcgcaggaagatgctgttggcaccgctgtattccatctcagcaattttcagcatggccgcactggagtgcaacacagggatggagcacttggtgatgatgctacccacaatgatggcttcccggagggtacaagtgccagactcgcacagtggaatcaggatccctttgaaccctcgtgccgaattcgccacccaggcctggtggttgtgggtggtgaggaggcgggtggcgggtgggcgaacaggggcgggata

SEQ ID NO: 262792 - DNA, 1058 bp, Homo Sapiens
  misc_feature (886)..(886): n is a, c, g, or t
gtagcgaggcctgggtggcgaattcggcacgaggcccaggtgggccagcgggatgcctgggaggccggtgggtttggctgaccacttcttcccattcctcagtgagagacttgggccctcccggtcatccgagtctgtcccgaaggtttaactgcgcgcggcgaggggaggccttgtaggtttccaaagggcggagcttcagtgggaaaacttgaaacttgtcgtctgcggatatttatttccacttcttgtatggcctgaagaatctaggaggagaaaaagccagataccaaacttacggccaggcagacgggtcgcgggtgttgacagggtcctgagggagtttgaagccttattctcgagccgcctcctcttctctacccacacttgcaccgaggtcaccccggcaccctccgcaccggttcggttttggtctctgcttgtcctctcagtccttggtactttcgtctccctcagccggaggtggcaaactcagacatctacgggcgcccgaggccctcgcagccctgagccccagctttcacttccctgggctgcccctctccgggagcaggcagacgccccgttctcggagcccagcgctcacttagagcgactgaggttggtcgaaggatctttccccacatcccataatcagggccctaggacactcgcaggtccctttaactctgcttctgtcattacacttagaacaagtagtgttttctgtttagagtcccatttcacaaattgggtagtggaggcacccgtggcctggcagcttgcacagtggctgtccacctcccgggggggtggtggaccctgagccgtggctcagtgacaaaccagggcacccaactatgcaaagcccctgcctggtggcgcnatcctaccctctggactggggcccatgggaagccactggggcgggccaccttggggtgttaatttcatggggagccccccattccccctcaccccttttgggggccaccggtgaatgggggccaggaaaaccggaatttttgcgccaccctgcattctccctaaaaaacctc

SEQ ID NO: 262793 - DNA, 1365 bp, Homo Sapiens
  misc_feature (606)..(615): n is a, c, g, or t
  misc_feature (1147)..(1147): n is a, c, g, or t
  misc_feature (1216)..(1216): n is a, c, g, or t
ggcctgggtggcgaattcggcacgagggggtgggaaagaaagggctgctgatgagggccggtgctgccagactttcggaggcgagctgccacccacccacggagtcggacccccgggcagtaactgggggagggcggcagtgtcccgctggttgccgttccccgccccccgctgggaggctccatggggaggagagggccctttttcacaccaagttctggggaggctgccttcccaacagccggcatgtgatgtgaatcagctgacatcatcttgacgggagccctgtgaggcggacacttaactccagtttcacaggtggggagactgagacacagtggtcaacgtgcagagcccagaatctgctccctggtagctgactttgcaggcaggggccttgcccacgcagcctcggcagaggcccccgcacttcccgaaccccagcaatggccccttccagacgccaccgtccagctaccgccgcgctcacacctgcaggggccccacaagaggcctccgcgtcgttcagcggaccttgaaaagaacctatctcagggcaggccccacgtaaagcccggtctaggggtggtccccccggtatgtcgnnnnnnnnnngcctgcatagagcggaaatgccggacgttgcgacgccgtcaatggcacgggggccgggccgccccttgggcgcgccacaggcaccctcggccgccgcactcacccgcgcccttccacacaccacgcgcgagcgccgcgagtattccggtaccgccgtacctgcgactctagtctcatcccatctcaggattgccgcgcggcttacgtcgaacaacacccgacggacggccgcgcggcggacaatagcgcgcgcccgcaacctcctccacactcaacgtgcggtgacacggccgcggcaagcgctataacgtccccgacccggcagagagtcgcaagttctgtgctgcgcaggttgacaagaaccgccgccgacgacgcgttgacgtgcggcgctcttaggcttgtgtttggctctcgtcacgccgataagctgctcgcctatgacgtcccgtgcgcttcacacggtgaagaggcgcgcagtggagtggctggccgcatgtattgggccgcgcccgaacgcgtcgcgcgcgcngcatcgcggcgctcgcatgtgacgtcacgcgcggcggaacactttgagacagagatatgtgatagcagngctttctcaggcgacgaccgccactctcgattgagataaccgacgcgcggacggagctcaagagcacagacataccacatctgcgcgctcccaccttaaccacacgcaagataagtgtgtagactgtgtcggcgcgcatactaaacgag

SEQ ID NO: 262794 - DNA, 1052 bp, Homo Sapiens
ggcctgggtggcgaattcggcacgagggcggcagcagcgccaggtccagccacctgtctcagcccgtcgtgaagagcgtgcttgtgtaccgcaacggggaccccttctacgcggggcgccgcgtcgtcatccatgagaagaaggtgtccagcttcgaagtcttcctgaaggaggtgaccggcggcgttcaggcaccctttggggccgtcaggaacatctacaccccgcggactggccaccgaatccggaagctagaccagatccagagcgggggcaattacgtggctggaggccaggaagccttcaagaaactcaattacttggacataggagaaatcaagaaaagaccaatggaagttgttaatacagaggtaaaaccagtaatccatagcaggatcaacgtgtcagctcgctttagaaaaccgcttcaggagccgtgcactatcttcttgattgcaaatggagacctcataaacccagcttctcgcctccttatccccagaaaaaccttgaatcagtgggatcatgtactacaaatggtcacagaaaaaatcactctgaggagcggggctgttcacaggctttatactttagaaggaaaacttgttgagagtggagcagagttggagaatgggcagttttatgtggctgttggcagagataagtttaagaaactgccttacggtgagttactttttgacaagtcaacgatgagaaggccttttggtcagaaagcttcttcactacctcctattgtaggatccagaaagtctaaagggagtggaaatgatcgccactctaagtcaacagttggatccagtgacaactcatctcctcagccccctgaagaggaaagggaaaaaagaagacgtgaatttcagaaaaactgaacgaaattgaaacaaaatgtaaaattaaagaattcccaaggaaaccatttccaatagtgatgaaagcattttcaaagcctggagcaaaaaagtcctgaaaacacggggggcaaccagagttccaaaaaaatgaaaatactcgggttgtaggttcagtcgaac

SEQ ID NO: 262795 - DNA, 862 bp, Homo Sapiens
caggaggcgatcccgcgccctgggtgcggtgaggccgctgggacagcggaggtgcctcccgacgcgaagcagcgagctgaggcggcggccagcggggaagatgagcggcagcagcgccaggtccagccacctgtctcagcccgtcgtgaagagcgtgcttgtgtaccgcaacggggaccccttctacgcggggcgccgcgtcgtcatccatgagaagaaggtgtccagcttcgaagtcttcctgaaggaggtgaccggcggcgttcaggcaccctttggggccgtcaggaacatctacaccccgcggactggccaccgaatccggaagctagaccagatccagagcgggggcaattacgtggctggaggccaggaagccttcaagaaactcaagtgagtcggtctcccccaccgcccacccatttaggtgccctatagtgtggggttgatatgaagaaatgcagatccctacccccccacacctcagtggttgaggggctgggacttctcggtgtgattcgatgcccctcaaactctccttgccattggcggggacagttccgcctgctcccccgtcacacacactttcacctggacgcacccctccgtacgtacccctcctcctccttccccacctcctctgtcctttcctgcgtactacactgctctctcccgccccattgtgtgttcgtcatgccacaacatctcgacctgaccggcactccccattcctccgcgaccaacctcccgtggacctcaccactttagcccttccccgcatccctcaatccacaccacctttcctcaacattttcgaccgcgttgacccgcccgtgtactttttgctctccctgcaccgtct

SEQ ID NO: 262796 - DNA, 1160 bp, Homo Sapiens
  misc_feature (1136)..(1136): n is a, c, g, or t
gagcgaggcctgggtggcgaattcggcacgaggctctgtcgtggcgcggcttcccgcggtcttctctgcaaatgggctccgtggcctagcgcccccgtccccgccacccgtgatcgtgcgccgaggcccgcgaggggtcgccgcccagatcccaccagccagcaagctaaagcatggcggccatcccctccagcggctcgctcgtggccacccacgactactaccggcgccgcctgggttccacttccagcaacagctcctgcagcagtaccgagtgccccggggaagccattccccaccccccaggtctccccaaggctgacccgggtcattggtgggccagcttctttttcgggaagtccaccctcccgttcatggccacggtgttggagtccgcagagcactcggaacctccccaggcctccagcagcatgaccgcctgtggcctggctcgggacgccccgaggaagcagcccggcggtcagtccagcacagccagcgctgggcccccgtcctgacctgagcggttaccaccagccccaggcctgcggaggcgctagtccacccagagcccctccccgccccttctcccccgcaggttctctcctcttcctgcccccgccgcgctccgcgttccctatccaactcagtgcccctcgttgccaaactcgacaggcctccctcacctgtagcccctggtccccccgctccatacgcccgtgccgctccgtcgcctcctacgccccccgccccgtcatatcaaatctacacacccgtggctgcgtctcagcgcgcccggacggcgcatgtcaccagcggcgctcgcaccccccactcgcgattccccgtaaagcggatgcactgtgcgacgtctgatttctcgcccgcgcgcacggtgtttgccgcgcgcacggtacgatccccgagaggagccgcgcttcggggtgccgcccatcgtccgtgtgttacggcgcttcgaccagacaccttaaccatcgtcgatcacgttatgcgccgcccgctccgctcaacggcactacgcacactacgcgcgtgttacaccgatacgctgcgcgcgccgggtgaacgaaggagtggaggaggaatccccgcacgcactccaagacgaaggtganacgcaccactacgtctcgaacaac

SEQ ID NO: 262797 - DNA, 1050 bp, Homo Sapiens
  misc_feature (980)..(980): n is a, c, g, or t
ggcctgggtggcgaactcggcacgaggtggacccaaagaaacggatttctatgaaaaatctattgaaccatccctggatcatgcaagattacaactatcctgttgagtggcaaagcaagaatccttttattcacctcgatgatgattgcgtaacagaactttctgtacatcacagaaacaacaggcaaacaatggaggatttaatttcactgtggcagtatgatcacctcacggctacctatcttctgcttctagccaagaaggctcggggaaaaccagttcgtttaaggctttcttctttctcctgtggacaagccagtgctaccccattcacagacatcaagtcaaataattggagtctggaagatgtgaccgcaagtgataaaaattatgtggcgggattaatagactatgattggtgtgaagatgatttatcaacaggtgctgctactccccgaacatcacagtttaccaagtactggacagaatcaaatggggtggaatctaaatcattaactccagccttatgcagaacacctgcaaataaattaaagaacaaagaaaatgtatatactcctaagtctgctgtaaagaatgaagagtactttatgtttcctgagccaaagactccagttaataagaaccagcataagagagaaatactcactacgccaaatcgttacactacaccctcaaaagctagaaaccagtgcctgaaagaaactccaattaaaataccagtaaattcaacagggaacagacaagttaatgacaggtgtcattagcccctgagaagcggtgcccgctcagtggaaattgggatctcaaccaagcacatatgggaggagactccaaaaagaaaggggagccaaagtgtttggggagccttgaaaagggggttggaataagggttatcactggggctcaccaggagcaaaaaggaagggttctgccaaaagaccgggccccaaaggactaanagcctcccctattatgtggacttacacctatgaattatggggattcccagaatccaccgggttggaatgg

SEQ ID NO: 262798 - DNA, 1039 bp, Homo Sapiens
gaggcctgggtggcgaattcggcacgagggcctgaggcccggggcggcgtccgccatggagatcccctcggtccagggccggcgcctgggacctggcgggcggccctgaccgccttcctccctgcgcgggctgggtcgcggacgtgcccttcgcggcactcggcctcctctgcgtctccgccttccctgggccgcactgctgcctgggcgcggcggcggcgacggcgccctgttgaatgggctgtgagggcccaggtttaaagcgctggcgaacgcggcctccgggggcgcacggcagctgcagcggtggcgaccaaacgggtgttggagttggcggcggccatggagggcctggctggctatgtatacaaggcggccagcgagggcaaggtgctgactctggccgccttgcttctcaaccggtctgaaagcgacatccgctatctgcttggctatgtcagccagcagggagggcagcgctccacgcccctcatcatcgcaagcccgcaatggacacgcaaaggcggtacgcttgctcttagaacattaccgggtgcagactcagcagactggcaccgtccgcttcgacgggtatgtcattgatggtgccactgctctttggtgtgcagctggagcaggacattttgaagttgttaaacttctagtcagccctggagcccacgttgaaccctaccacagtaactaattcaaccccccctgcgggcaccatgcttttgatggcagactggacattgggaaaaacttggctgaaaatatggccacctccgcatggccaacaaatatggacaaccctgcctaatgattgcggcatattaaggaacacccgaatgggggccaataccctttaaaacaaccggcctgattccaatgcccaagccccttggtggaaacccccacattggcacttttgcagctggaagctggggcccttaaaatattggggacaagacctgaataaaatgggcgctcacctcatagacacgcaaatgggccttggaaaaaacatgccacttcaaaa

SEQ ID NO: 262799 - DNA, 1081 bp, Homo Sapiens
  misc_feature (944)..(953): n is a, c, g, or t
aaggtagcgaggcctgggtggcgaattcggcacgagggggaggtggtggcagatatgctttgcatatggattgttatgtttttatttgggcaagtttaatcatggaaaactcaaaaagaaggggggaaatggtcagtttaagccaaaagaaactttctaaacaatgtataggtacacagcaaaattaaacaaatccaacaatttctgaagcttagtgtaattgagtggtggttgttattcaataaaattattcccaaaagtgtttctcctaagagtgcagttcccatgagtcacttcctgaacccattgaccaaaggtggacagagacaatcctgtagaccttgacattcagaaagatgtgagctgcttactgatcatatatgcatacgtttctttacagcagaggaaaccattgtccacaaaactgatgttcttttggggttttatgtacagacttgtccaatcatgtgtgtggttcctgcgagttgctgatgactccgcattgaagctctctgagttctttgattttaagttgggtttatggaattttttcaaatgttggaaggcgtgtggttcttcctgccctccctccccttttggaaatatgaaagcaaatgtttaaaagaattccttttgaaaagctgtgtcgtgttccctgtgaaactgaacaggtgtgtgttggcgcgctaagtgccacatgcttgtgtgtaaaagaagaagtgggcctgccgggtccgcgctgctgtgcctgtgatccctacctgctccccgctcccggtgccagcagcaatcactgcactccctttgtcctatacctcggcatcacttgtcatacccaccaacttcgggaataaaagttgggtgcttttattccgtaaaaaaacagcccacccaccgcccaacgaaaagacccaaatactacttccgaggggttctattgttcnnnnnnnnnnaaaaaagagggtaatgtaaaaggggcccctcggtccaaaagctgggtttccccggaccccagtttttctttggaacaaaaaggggagaaaattggccggcgtcctccctataggggagagcgctatta

SEQ ID NO: 262800 - DNA, 1056 bp, Homo Sapiens
  misc_feature (652)..(690): n is a, c, g, or t
ggcctgggtggcgaattcggcacgagggatcagctcaagcaaaactgatgatctcacctgccagcaagaggaaacttttcttctggctaaagaagaaagacagcttggtgaagtgactgagcagacagaagggacagcagcctgcatcccacagaaggcaaaaaatgttgccagtgagagggagctctacatcccatctgtggatcttctgactgcccaggacctgctgtcctttgagctgttggatataaacattgttcaagagttggagagagtgccccacaacacccctgtggatgtgactccctgcatgtctcctctgccacatgacagtcctttaatagagaagccaggcttggggcagatagaggaagagaatgaaggggcaggatttaaagcacttcctgattctatggtgtcagtaaagaggaaggctgagaacattgcttctgtggaggaagcagaagaagacctgagtgggacccagtttgtgtgtgagacagtaatccgatcccttaccttggatgctgccccagaccacaaccctccttgcagacagaagtccttgcagatgacatttgccttgcctgaaggaccacttggaaatgagaaggaggagattatccatatcgctgaggaagaagctgtcatnnnnnnnnnnnnnnnnnnnnnnnnnnnnnnnnnnnnnnntgatctcaaagatgaagttcaaagtcagtcctctgcttcctcagaggattacatcatcatcctgcctgagtgctttgataccagccgccccctggggggattctatgtacagctctgcgctctcacaggccggcctggagcgaggtgctgaaaggcaaccctggggttgaagctgggcaaggaaccaacctaaggctggggaaaaaactccccggaaggggaaaaaccacccccgggaccccggcttaagtggaattcctccccaaacctcacaaaactccggggaaaccgtggccccttaatcccccaaaggtaaagggaaaactttccaccgtcactgggcccaagaaaccctcccctgggggg

SEQ ID NO: 262801 - DNA, 1365 bp, Homo Sapiens
  misc_feature (1065)..(1065): n is a, c, g, or t
gacggctgggtggcgaattcggcacgagggatcagctcaagcaaaactgatgatctcacctgccagcaagaggaaacttttcttctggctaaagaagaaagacagcttggtgaagtgactgagcagacagaagggacagcagcctgcatcccacagaaggcaaaaaatgttgccagtgagagggagctctacatcccatctgtggatcttctgactgcccaggacctgctgtcctttgagctgttggatataaacattgttcaagagttggagagagtgccccacaacacccctggggatgtgactccctgcatgtctcctctgccacatgacagtcctttaatagagaagccaggcttggggcagatagaggaagagaatgaaggcgcaggatttaaagcacttcctgattctatgggtggcagcaaagaggaaaggctggaaaacattgcttctgtgggaggaagcagaagaagacctgaagtgggacccaagtttggtgtggtgacacaggaatcccgatccccttaccttgggatgctgcccccagaccagaacccctccttggcaaacagaagtcccttggcagaaggaccttttgcccttggccctgaaaggaaccccctttgggaaaaggaggaaagggagggagcgatttatcccccttattccgccctgaaagggaaaaaaacccttgctccatggggcacagcagggcagggcacggcattgtcacgccaggggcatttcaatgagaaggcagcgcaaagcgattcgacaccctttctcaccaacgagacgggagaagagttttcgacagaacgcgacccacaggccaccctccaccgtgtgcgttgtttcccccccgcacggagagggggggtgtccacacatctgccctctcccagctcccccctctggcccccggtgggaagatcggcgcttttttgtgaaatcaacacacacgggcgcccgggccccctcccccgcggggggcgcgggatactgtctccctctggggagacaccgagagtctcttttggcgcgcgcccctctctcccccanaacgcaccccggcgagtctctggcgcaaagtcagcaaaggagtaggtgcgtcgatatacgcgagcgacaatctccccctgcgcgagatcttatgagcgggcgttcgcagcgcctcagggaaacaccccccctctcttaagggggtggtgcggcgcaaaaagagaccctgcccctctgtgggggaggagggcggacgaaaactcacgccgccccgaggcggagagcgcgtgtgcggctctagaagggggggagcttccccgctccgcacaagaccctacccggaaaaattgtgtgagaaga

SEQ ID NO: 262802 - DNA, 1726 bp, Homo Sapiens
ggcctgggtggcgaattcggcacgaggggaagctgctgctgacagcccagcagatgttgcaggacagtaagaccaagattgacatcatccgcatgcaactccgccgggcgctgcaggccggccagctggagaaccaggcagccccggatgacacccaagggagtcctgacctgggggctgtggagctgcgcatcgaagagctgcggcaccacttccgagtggagcacgcggtggccgagggtgccaagaacgtactgcgcctgctcagcgctgccaaggccccggaccgcaaggcagtcagcgaggcccaggagaaattgacagaatccaaccagaagctggggctgctgcgggaggctctggagcggagacttggggagctgcccgccgaccaccccaaggggcggctgctgcgagaagagctcgctgcggcctcctccgctgccttcagcacccgcctggccgggccctttcccgccacgcactacagcaccctgtgcaagcccgcgccgctcacagggaccctggaggtacgagtggtgggctgcagagacctcccagagaccatcccgtggaaccctaccccctcaatggggggacctgggaccccagacagccgcccccccttcctgagccgcccagcccggggcctttacagccgaagcggaagcctcagtggccggagcagcctcaaagcagaagccgagaacaccagtgaagtcagcactgtgcttaagctggataacacagtggtgggggcagacgtcttggaagccatgtggccccaatgcctgggaccagagcttcactctgggagctggaaagggcacgggaactggagtttggctgtgttctggcgggaccagcgggggccctgtgtgccctcaaattcctgaagttggaggatttcttggacaatgagaggcatgaggtgcagctggacatggaaccccagggctgcctggtggctgaggtcacccttccgcaaccctgtcattgagaggattcctcggctccgacggcagaacgaaaattttctccaagcagcaagggaaggcgttccagcgtgctaggcagatgaacatcgatgtcgccacgtgggtgcggctgcttccggaggctcattccccaatgccacgggcacaggcacctttaagccctggggcttcctccaggatccgagtgcccgtgaccacgggtgacatatcggtgggaagaaactgaacctcggcactgactcggacagcttcacctcagaagagctcgcgggatactccttccagccaatcgaacctgagctcccccatccaggaatccactgctcccgagctgccttcggagacccaggagaccccaggccccgccctgtgcagccctctgaggaagtcacctctgaccctcgaagatttcaagttcctggcggcgctgggtcggggtcattttgggaaggtgctcctctccgaattccggcccaatgggggagctgttcgcccatcaagctctgaagaaaggggacattgcgggccccaaaccaggtggaaaccctgatgtgtcacaaacggatattggcggcagcgacccatggggtgacaccccccttcctggggaacctctttcgggtggtttcaccaaccccgcaaccccgggggctttgtggaagggacgaacatccgccggtgggggggacccttatggtgtcaccttccccacggacgtgtgttctcgg

SEQ ID NO: 262803 - DNA, 1668 bp, Homo Sapiens
taggtagcgaggcctgggtggcgaattcggcacgaggagagaggtatgtggtgtgcaagggcctgaaggtgggcatagatgatgttcgggattacctcttcgcagtgaatattaaactcaatcagctgcggaacacggattccgacgtcaacttggtggtccccctggaggtgatcaagggagaccatgaatttactgactacatgatacggtccaatgagagccactgtagtctgcagatcaaagctctggcgaaaatccatgcctttgttcaagacacgacactgagtgagcctcgacaggcagagatacggaaggagtgcctccgactctgggggatcccagaccaggctcgtgtggctccttcttcctccgaccctaaatcgaagttctttgagctaatccagggcactgagattgacatcttcagctacaagcccacactgctcacctctaaaaccctggagaagatccgccctgtgtttgactaccgctgcatggtatctggcagtgagcagaagttcctcatcggcctggggaaatcccagatctacacatgggatggccgccagtcagaccgctggatcaagctagacctgaagacagagctgccccgggacactctgctatctgtggaaattgtgcatgagctgaaaggggaggggaaagcccagaggaagatcagtgccatccacatcctccatgtccttgtgctgaatggcaccgacgttcgggaacagcactttaaccagcgaaatcagcttgccgatgaaatttgtgaaagccgtttccaagcctagtcggcccgacatgaatccccatcagggtgaaggaggtgtacagactggaagagatggagaagattttgtcaggttggagatgaagatcatcaagggctccagtggcaccccaaagctcagtctacacagggcgtgatgaccggcactttgtacccatgggcctctacatcgtcaggacagtgaatgagcccctggactatggggattcagcaaaaagcttcaagaagaaggtctcctacaacaagaaaaccaaggactctacttttgacgctccctgcagactccattgccccaatttcacatttgctactatggccggctcttctgggagtggggggatggcattcgtgtgcatgactcccagaagccccaggaccaggacaagctgtccaaggaggacgtcctctccttcatccagatgcacaggggcctaagagcctcagaagtgtgccaccctgcagcaatggcctgtcattcctgagatggggccactggggcccacagtggtggttcttccccctcttgaaaagggactgggagcattgcacctggcatgagggagtgggtggcttctctccaatccctgaagagtcaggcagggcctgagaagacatcatgttccttctgggacacctgctggggaatttcctgcagggatcagctgaaggagctgtctgaagcagtagaggcgggctaggcagtgggatggacgacttatcaatgcaacgggccagcgccccgaccgggacattgggtcagcgccgggagacgccgtgcattgagacgagggagtcaataggaggagaaaaagaggagacgagcgagtacccaagaaacaaagggaggacaggtgacctggccagtgaag

SEQ ID NO: 262804 - DNA, 1182 bp, Homo Sapiens
  misc_feature (1090)..(1090): n is a, c, g, or t
gggattgtcttccaggaaacagctccctcagtttggaatcagctctcccgctgcggccgcagtagccggagccggagccgcagccaccggtgccttcctttcccgccgccgcccagccgccgtccggcctccctcgggcccgagcgcagaccaggctccagccgcgcggcgccggcagcctcgcgctccctctcgggtctctctcgggcctcgggcaccgcgtcctgtggggcggccgcctgcctgcccgcccgcccgcagccccttcgctgcgcggcccctgggcggccgctgccatgggcaccgacagccgcgcggccaaggcgctcctggcgcgggcccgcaccctgcacctgcagacggggaacctgctgaactggggccgcctgcggaagaagtgcccgtccacgcacagcgaggagcttcatgattgtatccaaaaaaccttgaatgaatggagttcccaaatcaacccagatttggtcagggagtttccagatgtcttggaatgcactgtatctcatgcagtagaaaagataaatcctgatgaaagagaagaaatgaaagtttctgcaaaactgttcattggagaatcaaactcttcatcatcaactagaagtgcagttgacatggcctgttccgtcccttggaattgcacaactgcattctgcgatcaatgcctccccccccaattgaagacggagcccactcctttccgtggagcatttacaagcccttattggggacggaatgagaaaaacctccacccccagaagcaaaaaaaatcgcttgccctcaagtacccctccggatccaacatacaacccgtgttaggaaacaccctgtaaaacggggcgcacagggataaaaccccattatgccaccaaagctcatcctcaggccctcccagcttgacgtgaacaccccaacaagaataccacaatacgaatgtggtacaacccaatatcaaccttcaccctccaagagactctccacccaagatccacatgcaacagatttcaccgcaactccgcgagtctcacacaaaacgttatctcatagcaaaaccataccccgacagccttcacantttacacacgaaaggagtcgcgatgtcatacagcacctcctgcgcatcaccttccccaccggtaccgtccaatgccgcatccttcgccctcg

SEQ ID NO: 262805 - DNA, 1063 bp, Homo Sapiens
  misc_feature (955)..(963): n is a, c, g, or t
ggcctgggtggcgaattcggcacgagggtctgtggctgcatcagagcagcaggaggaatggctcggcccccgcagaggccatccgctgtgccgttgcccaccacgcaggccctggctctggctggaccgaagccaaaagctcaccagttcagcatcaagtccttctccagccctactcagtgcagccactgcacctccctgatggttgggctgatccggcagggctacgcctgcgaggtgtgttcctttgcttgccacgtgtcctgcaaagacggtgccccccaggtgtgcccaatacctcccgagcagtccaagaggcctctgggcgtggacgtgcagcgaggcatcggaacagcctacaaaggccatgtcaaggtcccaaagcccacgggggtgaagaagggatggcagcgcgcatatgcagtcgtctgtgactgcaagctcttcctgtatgatctgcctgaaggaaaatccacccagcctggtgtcattgcgagccaagtcttggatctcagagaatgaccagttttcccgtgagctcagtcctggcctcaaatgtcattcatgctacacgccgagatattccatgtatattcagggtgacggcctctctcttaggtgcaccttctaagaccagctcgctgctcattctgacagaaaatgagaatgaaaagaggaagtgggttgggattctagaaggactccagtccatccttcataaaaaccggctgaggaatcaggtcgtgcatgttcccttggaagcctacgacagctcgctgcctctcatcaaggccatcctgacagctgccatcgtggatgcaaacagggattgcagtcggcctaaaagaaaggctctatgtcatagaggtcacccgagatgtgatcgtccgtgccgctgactgtaaaaagggacaccaaatcgagccttgctccccagggaaaaagatccgtaatnnnnnnnnnggggccgggaaccacctggggcacctctattccgggggcctcccccttgaatggaaacgaaaaggccccttttgtaaatcaagcctttcgggaaacccaa

SEQ ID NO: 262806 - DNA, 1062 bp, Homo Sapiens
  misc_feature (800)..(801): n is a, c, g, or t
gcctgggtggcgaattcggcacgaggctcttctgctgccgcgagcagccgtgctgtgccggcctgcgagtttttaggaatcaactacccaggaaaaacgatttttactcatatgagccaccttctgagaatcctctcccagaaacaggagaatcagtgtgtctccagcttaagtctggtgctcatctctgcagggtttgtggctgtttaggccccaaaacgtgctccagatgccacaaagcatattactgcagcaaggagcatcagaccctagactggagattgggacataagcaggcttgtgcacaaccagatcatctggaccatataattccagaccacaacttcctttttccagaatttgaaattgtaatagaaacagaagatgagattatgcctgaggttgtggaaaaggaagattactcagagattatagggagcatgggtgaagcacttgaggaagaactggattccatggcaaaacatgaatccagggaagataaaatttttcagaagtttaaaactcagatagcccttgaaccagaacagattcttagatatggcagaggtattgcccccatctggatttctggtgaaaatattcctcaagaaaaggatattccagattgcccctgtggtgccaagagaatattggaattccaggtcatgcctcagctcctaaactacctgaaggctgacagactgggcaagagcattgactggggcatcctggctgtcttcacctgtgctgagagctgcagcttgggtactggctatacagaagaatttgtgtggaagcanngatgtacagatacaccgtaaaggcatcttaaagccttgaaaaatgttaataatcttttataccttgcaattccatttctgggattttatcctaaggaatacttataccaaaaaataaaagtgcaaagatgttgacgggattgcttacacgtgtctacttattagtgaaacaaaagtgtcccgtgacagggaatttaaataatttttggaacatccccagaggaaaggctaccccgtctttattatacacctatatggcaac

SEQ ID NO: 262807 - DNA, 1133 bp, Homo Sapiens
  misc_feature (846)..(846): n is a, c, g, or t
  misc_feature (1064)..(1064): n is a, c, g, or t
  misc_feature (1100)..(1100): n is a, c, g, or t
tacacacccaactacaccccccacacacgcccacgcccactcccctccctccgtcgcgaggcctgggtggcgaattcggcacgaggccgggatgctgagcgcccaccgtctccccgcagccccctcatgcccggctgcgagctgcccgtgggcacctgcccggacatgtgcccggccgccgagcgcgcccagcgcgaaagggagcaccgcctgcaccgcttggaggtggtgccgggttgccgccaggacccgccccgcgacggatccgcaccgcgcggtgaaggagtacagccgacccgccgccggcaagccccggccaccgcccagacagatgcgtccgccctccctcctgctgaccaccctgcgctacatggccggtgaggtggcggagagcgccgacatcgcccgcgccgaggtggccagcttcgtggcagaccgcttgcgagctgtgcgcctggacctggcgctgcagggagcgggcgacgccgaggcagcggtggtgctggaggcggcgctggccacgctgctggccgtagtggcgcggctcgggcccgacgcggtcgcgggtaccccgcggacccggcgctgctgcaggctccggcgtggcgcgcttcggcctggtgaagtgtcgcctccgcctgacctatcggtccccgctgccttcgcttccctccggctccccccgctgagagcatactaactatgctcatttgggaggcaccccggcggtgtggcggtgccgacgatctacacccctcccgcgcggtggtggactttcgagttcgtacccccactgtctgttagcatccctctctcactttctcgtcacctttaattcccgtgtcnacccgcgccgccaccccggcccccatgcgccactttagccccgagcatgtactgttattcgcccaccattcattccgcctctcggttctcctccacgccacgcttcttcaccacgttgatagcgtcctactcctgggctcctcggagagtatatgacacttgtcagagctgccaccaagcgacccacgccaggctccgcagccacccatggacacggncacgtgatcgccatccggcttctgcgactacactcnctgccacccccgcattttctacgcgttcatagg

SEQ ID NO: 262808 - DNA, 1244 bp, Homo Sapiens
agacacccaaccgaggagaggccaacccccccgccccgattgatgagaggcctgggtggcgaattcggcacgaggccagcttcgtggcagaccgcttgcgagctgtgcgcctggacctggcgctgcagggagcgggcgacgccgaggcagcggtggtgctggaggcggcgctggccacgctgctggccgtagtggcgcggctcgggcccgacgcggcgcggggacccgcggacccggtgctgctgcaggcccaggtgcaggagggcttcggctcgctgcggcgctgctacgcgcggggcgccgggccgcacccccgccaacccgccttccagggcctctttctgctctataacctgggctcggtggaagccctgcatgaggttctacagctgcctgctgccctgcgcgcctgcccgcccctccgcaaggccttggcggtagatgctgccttccgagagggcaatgctgcccgcctgttccgtctgctccagaccctgccctacctgccaagttgcgctgtgcagtgccatgtgggccatgcccgccgggaagccctggcccgcttcgctcgtgcctttagcacccccaagggccagaccttgcctctggggcttcatggtcaacctcttgggccctggatggactcagggaagcacgggacctgtgccaggcccacgggctgcccttggacggaaaggcacagaactgtccctcctgtcggggcacttaatgacaggcacgaccacggcgtacccggccggtcaagggcggtcggccgggggcctaagtccgcgagccgacccagcatccgtcccactccaaaagtcacacccaatcgtgtatactatcctgccccccaacctcagggatccggtcatctacccacgacaccaacatcccctcattaacccgcttataggcggacacgagcgtcacgtgcggcctcctggtacccgccgcctctcatgcctaacggaggccccatccgcggtgccactcttgagaacgcaacacgcggagtacaccggtgcccagctcgcacggccggttgggcgagcctgacgacgcagtgaacccgtgcgggatgccccgcacggcaccaacgattgcacgcgcagcgtattggcccggccttctcgatcgacgaccatgtctgcgcagacggcctctatagagcatttacacgctgctgataccactcgtgccactcttgggggcacttctcgttaaccagtctacccgtg

SEQ ID NO: 262809 - DNA, 983 bp, Homo Sapiens
aggtagcgaggcctgggtggcgaattcggcacgagggcacagttccacccagagtagtgaatctctcagccaaggagggaaagaaaaggaagaactcttgactatttagattctagttaaatatctggaatcctagcagtcactacattatctcagcagagagactttaattaaactgatttgtttccaatgtcgggttcacttaaaggatttgacttaccaccagagcatagaaaagcatgcaaggaagaccagatgggcttagcattgggaagacagagggcaaggaggtgatagatggatatagaagcatttctctgcaggataccagttcaggccccaccattcctgccaaggccattacatcccacaaacccaaatacaaagcagctgacttccctggatcttccccccactcctcacacctcacatgtcccaggagctgccttcattcaggcgggtagctgcactgggcatggggtggtggtgggagcttaccgccacctattcaagctctcagctactcctgaaacgggcagagatgatgaacagaagtgtatgtaaatacagcagctagtgggagagcaccagttgggcctaatcctgcctcatcattcttggcaggaatctgcaaatggaaacattgtgagtatcagcaatctgggaagtgacagggttaataactccttcccagaagctgtatcatgagattttgaggggaccgagccctgttacatggatgtgaacagtgaggatcagagggtttatcaaaacacattctttttttctaccaactctccagagcgggagtaataggagtgccatgaagcttttttagtcacgcagttttgtaaactcctgtatataaaatccttaaccacaccttggggggtgatggggaaaacaatttcagctggccagagttaaatggcaaaccaataatggggggcctggtacctggctaaaagcctccacgccggttt

SEQ ID NO: 262810 - DNA, 1124 bp, Homo Sapiens
ttcggcacgagggtcagatatgtgtgtatttttttaaaaacgatttgaaaaaatatgatgttcctttgtcgtgggaacaagccaggttgcagacgcagaaggagctacagctgagagagggacgtttggcaataaagccttttcatccttctgcaaacaattttcccataccattgcttcacatgcaccgtaactggaagaggagcacagagtgtgctcaagaggggaggattcccagcacagaggatctgatgcgaggagcttctgctgaggagctcttggcgcagtgtttgtcgagcagtctgctgctggagaaagaagagaacaagaggtttgaagatcagcttcagcaatggttgtctgaagactcaggagcatttacggatttaacttcccttcccctctatcttcctcagactctagtgtctctttctcacactattgaacctgtgatgaaaacatctgtaactactagcccacagagtgacatgatgagggagcaactgcagctgtcagaggcgacaggaacgtgtctaggcgaacgactaaagcacctggaaaggctgatccggagttcaagggaagaggaagttgcctctgagctccatctctctgcgctgctagacatggtggacatttgagcagcctgacctgtggggagggggtctctcccgaagagtttctgtttttactcaaaataatgttattctcagatgcttgatgcactgttggaaatgtgattaatttaatcatgcagataaaccatttaaatggcagtctcccagtttttcataatgaaaaggtggttcccctgtgtgaccccttcaatattcctctatattcatgaacctcctccgaatgtcccccaccaagcatatgcctctggaggcaagtttaaaagcttaccatttcacatgtataaaaagggcgatttcattcttctcacacaaaatttgtcagtcccttggaagtggcccagaaacatcaaggtgaatgcccgaaaaataaaggtaaagaaaaccagggggcctctctggcctggtttaagcccccaccccagtctttacacttccccgggaagaagtcccggggaaccttatatgggcacactaaaaatttccccc

SEQ ID NO: 262811 - DNA, 445 bp, Homo Sapiens
  misc_feature (16)..(16): n is a, c, g, or t
  misc_feature (226)..(226): n is a, c, g, or t
  misc_feature (411)..(411): n is a, c, g, or t
  misc_feature (433)..(433): n is a, c, g, or t
aatacatttaaatggnttatctgcatgattaaattaatcacatttccaacagtgcatcaagcatctgagaataacattattttgagtaaaaacagaaactcttcgggagagaccccctccccacaggtcaggctgctcaaatgtccaccatgtctagcagcgcagagagatggagctcagaggcaacttcctcttcccttgaactccggatcagcctttccagggngctttagtcgttcgcctagacacgttcctgtcgcctctgacagctgcagttgctccctcatcatgtcactctgtggggctaggtaggttacaggatgttttcatcacagggttcaataggtgtgaggaaagaggacactaggaggtatgagggaaggatagaagggggaaggggaaggttaaatnccgtaaattgctccccgaggtnttcaggacaacc

SEQ ID NO: 262812 - DNA, 1104 bp, Homo Sapiens
gtagcgaggcctgggtggcgaattcggcacgaggccccccggaatcacccctcttccatgcccctctgtccccactgcaaacccactgccctcttctccccaaggtgagtttgatgctgaagtgcaagaagtgtgttgagatgctgccgtttctattttgaagcgagctttcaacaggcgggtcccctgtggcaaagaaaatcggaaccctgttgccgattttccatttgtcaccccagcagaatgtccggcacttgctcccttgctgccccttctcaggtcagaggcgggtgttccagggcctgccgcggggctctctgggccggttccctgcagacccgcaggagagcacatgtgccttgcatgaagtgtgggttgcgccaacaattcccctggtccctttcaacctgtttagttcaactcaagcctccctgtgtcccagaccctcctgctgccaccaccacccaggtcctccctagtcctccagcgtcaacactatcccttgggagttgtagctgctgtcactgactcccggctatacatggcctgtcgaccacgttatagccctcaggcctgttgaacttgctctctaagagaggttgggaccaggctaggttccgggtgacgcccaggagaggtggtggccttcacacatgcacatggagttgaggaccagggagctgcagggaaagcaacagctataggtgccttgctcttctgtcggaggctgctgggggcaagagcagctgcacaaggccagggcaagtgctagggcccctcccccatcacatggtcacactgggacaggcgtgcagctcactgaactccaagcgagccagccctctcttggactagaaggcctactgtcagcccttcgcttacaaactgcaggctcaatccgaaggggacggcctgcgggggctctcctagtgcccagagacaggcccagaggtttacaagttttctaagcttttgataatgtgaagctccaggccgagaggatgctgttgagcacattgcagctatgtaatttttggtgtatgtatgtaatatttaaggttggaaaaaaaactcaaaagcaaagatattaactcttattagatt

SEQ ID NO: 262813 - DNA, 983 bp, Homo Sapiens
  misc_feature (657)..(664): n is a, c, g, or t
  misc_feature (666)..(687): n is a, c, g, or t
  misc_feature (689)..(698): n is a, c, g, or t
  misc_feature (700)..(703): n is a, c, g, or t
  misc_feature (705)..(711): n is a, c, g, or t
  misc_feature (722)..(759): n is a, c, g, or t
gctgggtggcgaattcggcacgaggcttctgcttgatagaaaagcaaatgttgaacacagagctaagactggtctcacaccactaatggaagctgcctctggtggatatgcggaggtgggccgagttcttttggataaaggtgctgatgttaatgcccctccagttccctcctcaagagatacagctttaaccatagcagcagataaagggcattacaaattctgtgagcttcttattggcaggggagctcatattgatgtacgtaacaagaaggggaacactccattgtggctagcagcaaatggtggacacctcgatgtggttcagttactggtgcaagcaggtgcagatgtggatgcagcagataaccgcaagataactcctcttatggcagcatttagaaagggtcatgtgaaggtggtgcgctacttagtcaaagaagtcaatcagtttccatcagattctgaatgtatgagatacatagcaaccatcactgataaggagatgctgaagaagtgtcatctttgtatggagtcaatagtacaagccaaagatagacaggctgctgaagcaaacaaaaacgccagcattttgttagaggagttagacttggaaaagttaagggaagaaagtcggaggctggctttggctgcgannnnnnnnannnnnnnnnnnnnnnnnnnnnnannnnnnnnnnannnnannnnnnnacctcgaggcnnnnnnnnnnnnnnnnnnnnnnnnnnnnnnnnnnnnnncatggtcatagctgtttcctgacccacctttcttgtaaaagtggtaaatctgccggcccccctaaagggagccgaattaatttccatagcccaggttaccctgcattaatgaatccgctgcagtaccccgggatttaccccccctatggagcgggcttttttttgggaatccaaggaactttcttgaaatccttttttttctgcagattaatctggttgcttgg

SEQ ID NO: 262814 - DNA, 1103 bp, Homo Sapiens
  misc_feature (202)..(202): n is a, c, g, or t
  misc_feature (817)..(830): n is a, c, g, or t
gggtcgcggtactcaacccggcaggcggcacgaggaatcagcgcagcgggacgtgctaagttaggaagcgtcaactagtatgatgttgagtaggttaagagcgagtggtacggaaggcaacgaggggaggcgtggtgaaaaagcgataggggagagggagttacaaaggagagataaaagctttgggcggtgggatcccacnttataagggagttcagctgagttttttcttgaaggactcgctcgggacctttcatgggtgcagggtaacactgggttttcggggcgctcgccttccgggggcaggccttgttttctggggcaacaggtggtggggaggaaagtgggtggggcagacctctgtccgggggcgccctcggatcctgctggtgctggctcccatcggctgtccccccacgggggtgtaattgatgtatctctggccggggccccgggtaccccctcctgagcaccccaggtccccacccgccatgcgttgctaacgtctctgtcttggtggaagaggcgggtcccgggtgggcggtgtccgggaagcccctccacgcccatggtgcctctccagcggggcagttgtgctgtggatgtggctggtcccgggggtgggattcggggctggcaggggcactgctgcaggccctgtggttattgcctggtggcctgaggcccatcccacgggccccacaccccactgtgaagacagaggagagaggtgcgtctggaaccggaggagtgggcacagatcagaggtcacgacgggccgggtgggcttgggtgtatgttaacaccaaataggagnnnnnnnnnnnnnntatctgaggccgatgtgcattttcaactcccccctcccccagaaggtcacagtgatcaaatgtgagggacaggacgcgcaggtctggctggggacaccccagggaaagagatggaaacggggaaacgcagcctcctctggtcctggtgggaacaagcagctcctcttgccagctccccatcctgttttcccatctgcaggacaagggggccacctccggctcttggttttggagggtaccctcgtgccgaattcgccacccaggcctcgctac

SEQ ID NO: 262815 - DNA, 1091 bp, Homo Sapiens
ttcgggaatccggggattctctagggtgaatttaaagttagggggtttttcgggaacccaggaataggttggaacccccccaagggtgttatagggaaaccaggggggaaattccatccttgaggttttaaccccctcctttccctttttcaagtcccctctttcaaccttgcagcagggccccagctgttccttccccctgatggccagccctggtactgggcccaggttcctgcagctttaagcagatgttctggaaggagacagctcaggtaagcaacccccatttggggtcaccgtctcggtctggttcagccctaaccaactgcttccaggcttaggggccccaggaagagagaagaattggagggctggtgggaaagcgtccaggctggaacacttggaaataagggctgagctgtgagcatctggtgggttggagaaatcatggggcaggactagggaagggcactgggtgcaaggctttgggcccctaaggtggaggataggggatcctgaagctaggaggtgggaaaggggtggaactgggagaaaccctgaaggaggccctaaagggagcagactgggaaactgggctggaggactcagggggcgaggttggaggaccctggggtgtggtctaggaattttggagaggaagtggaagactctgagagcagggcaaggaatcctgggggctgaattgactgggagactttgggggatgggtctggagaccgtcggggtggtcctggaggacctagaggtagggctgcaggaccctggcccctggcccctggcccctggtcctaggggggccggggaatcctggggccggaaggagggatcctggagcggggcttggaggccaccgggtgggactctgagggtcgacagcgttaagttccagccggctccacccgttcacagaggaccgcgcttttcgcgtgcgcatcgcgggcgacgcgccactgcagggcgtgctcggcggcgccctcaccatcccttgccacgtccactacctgcggccaccgccgagccgccgggctgtgctgggcctcgtgccgaattcgccacccaggcctcgctcc

SEQ ID NO: 262816 - DNA, 1086 bp, Homo Sapiens
  misc_feature (121)..(129): n is a, c, g, or t
  misc_feature (455)..(455): n is a, c, g, or t
  misc_feature (461)..(461): n is a, c, g, or t
  misc_feature (486)..(486): n is a, c, g, or t
ggggcggtggtgaagcccacgtgtcacaaaattgcccagactgggcggggtgccgacaccaggtggggttctctcgggacgagaggttttgaaaagatcgccccccattgtgtcttgcttnnnnnnnnnaagaataccccctttagagatcgtaggcggttcgggggaaccagagcccctttaagaagccccccttgggggaaggcgttccaagtttttccctttattttgcccctccccggaaggccttggtcccccagggggggttttttccagggggtttccggttcactcttgagtggggccaagcgttttcttcacgtcgtcccccgtcagttcaaagaactcatcaggcagctccgctggccaggcctgcagccgctcttccaggtcggggtggcacaccaccgggcttcccgtccacgggctcccggtccacgggccgctcccgctcntgctcntgctggggatcccgctccccgctcntgctcctgctcctgccggcgatcctggcccgacttggacttctttggcttggaggggcctccagggctggagagggacttcggcaacttagctgaagatgatgtcagaggcctcgtgggcccaggagggcccccctgtctctgtcccccacccgagaaaggaacaaagggggcagctgcgggtgcccttgtgctctgcttctcctgagtgtgctcgcagcagggccctgaggtgtccgcgtcctccggacggctcaagtcgccgcggctgagctccccagattccaagggaagtggagcgctggcggctgcctggccagccgacgctgacgagcccaggcttcctggggtcttgcccacggggtcgtagcacttcatgacaaacctgatggtggcgctgcccccggtcaggcccagcgactgcagcgtcgtgccccgcagggcagcttcacccgtcacctgtgaggaaggggtggagaagctgcctctagcgagggcacagtcaatggcccagcacaaaagccaaagggtgtaagggtccctgagggccacagcctcaggacagtgcctcgtgccgaattcgccacccaggcctcgctac

SEQ ID NO: 262817 - DNA, 1258 bp, Homo Sapiens
  misc_feature (386)..(440): n is a, c, g, or t
ggcctgggtggcgaattcggcacgagggtgctacgaccccgtgggcaagaccccaggaagcctgggctcgtcagcgtcggctggccaggcagccgccagcgctccacttcccttggaatctggggagctcagccgcggcgacttgagccgtccggaggacgcggacacctcagggccctgctgcgagcacactcaggagaagcagagcacaagggcacccgcagctgccccctttgttcctttctcgggtgggggacagagacaggggggccctcctgggcccacgaggcctctgacatcatcttcagctaagttgccgaagtccctctccagccctggaggcccctccaagccaaagaagtccaagtcgggccaggatccccagnnnnnnnnnnnnnnnnnnnnnnnnnnnnnnnnnnnnnnnnnnnnnnnnnnnnnnnggcccgtggaccgggagcccgtggaccgggagccggtggtgtgccaccccgacctggaggagcggctgcaggcctggccagcggagctgcctgatgagttctttgagctgacggtggacgacgtgagaagacgcttggcccagctcaagagtgagcggaagcgcctggaagaagcccccttggtgaccaaggccttcagggaggcgcagataaaggagaagctggagcgctacccaaaggtggctctgagggtcctgttccccgaccgctacgtcctacagggcttcttccgccccagcgagacagtgggggacttgcgagacttcgtgaggagccacctggggaaccccgagctctccattttacctgttcatccacccctcaaaaaacagtcctggacgaccacacgcagaccctctttcaggcgaaacctcttccccggccgctctggtgcacttgggagccgaagaaccaacaggtctctacctggaacctggcctgctagaacacaccatctccccatctacagccgacgtgctggtggccaggtacatgtccagggccgccgggtccccttccccattgccagcccctgaccctgcacctaagtctgagccagctgctgaggagggggcgctggtcccccctgagcccatcccagggacggcccagcccgtgaagaggagcctgggcaaggtgcccaagtggctgaagctgccggccagcaagaggtgagagctgccagcctgaggtgcccactccgccagccacaggaacacctcctctgccagcagggaataaagacttgtgcatccctc

SEQ ID NO: 262818 - DNA, 1122 bp, Homo Sapiens
gtagcgaggcctgggtggcgaattcggcacgaggcccgcttcccggagccgtgaggggcctgagaacatggttcgcatcgctttgcagctggacgatggctcgaggttgcaggactctttctgttcaggccagaccctctgggagcttctcagccattttccacagatcagggagtgcctgcagcaccccggcggggccaccccagtctgcgtgtacacgagggatgaggtgacgggtgaagctgccctgcggggcacgacgctgcagtcgctgggcctgaccgggggcagcgccaccatcaggtttgtcatgaagtgctacgaccccgtgggcaagaccccaggaagcctgggctcgtcagcgtcggctggccaggcagccgccagcgctccacttcccttggaatctggggagctcagccgcggcgacttgagccgtccggaggacgcggacacctcagggccctgctgcgagcacactcaggagaagcagagcacaagggcacccgcagctgccccctttgttcctttctcgggtgggggacagagacaggggggccctcctgggcccacgaggcctctgacatcatcttcagctaagttgccgaagtccctctccagccctggaggcccctccaagccaaagaagtccaagtcgggccaggatccccagcaggagcaggagcaggagcgggagcgggatccccagcaggagcaggagcgggagcggcccgtggaccgggagcccgtggaccgggagccggtggtgtgccacccccgacctggaggagcggctgcaggcctggccagcggagctgcctgatgagttctttgaactgacggggaacaacctgagaaaaacccttggcccagctcaaaagtgaagcggaagcgccctggaaaaagcccccttggtgaccaagggctttcgggaggggcaaataaaggagaagctggagcgctaccccaaaggggctctgagggtgctgttcccccgaccggtacatcctaaagggtttccttccgcccccacaagaaagtgggggactttggaaaacttccggaggaaccacctgggggaaccccgaagttgtaattttaccctgggtctccacccccccc

SEQ ID NO: 262819 - DNA, 1087 bp, Homo Sapiens
  misc_feature (26)..(26): n is a, c, g, or t
caggctcaccgaggcggaataaactntccctggttacacctgtggagaagaaagactttttgtgtctgtgggggggacatttatgaaagtcgcgacgttaaggagcaaaggtacggtcgacaccaattccacggccagccacacggggataggctgggcccggtgggcttttcccagggatctagggggggaaggccagctcttgaggaaaaaggggaactaggatgattgcctggtcggaaaggtttgattttcccgcctctttttaccctgtcacacggcccccaccccccagttttcccacacagacccatgccccgctgccccgtccacacccctgagactccgagggagacaggttgagagcctggggatggagatgtcaagttcacacactgggcgtggctcaggaaactggtacacaaagacaaaaagaaaagaccccaactctttttggaaaaaccaggacctgcctagggctgctccccaccccagatgagtggcaggaaaaggccttgcaggggacggggcaggggacagagtgtcaggagcacttccagacgcacacagccagggtgcccccgaagtacaggtagaggaggttcttcacttcgtgggtgatctcaaacccaaagcctctcgccgatcaccacgtgccaggaggagccgaacttcttgtccattgtctctttgatcatcttggcggcgctctcgttgttgttggagaatttctcacaggctgtgacacatagctccatggtctccacgcgcatctcttctggcatgtccgagtgcctgaccagagggaaggtctgcagtcgcttatagtcagcctcatctttcttcccttctgtttctcccatgatctttctcactgtgaccactggaggagagtggggctttcaggaggtgctgggactgtcagttaagacacacccaggagattcaggaagcaggccttgccaactcggtgggagcagaaaatgtctttccccggggggtgctgctcttgcgggggccggagccggggctgcagccagcgaacccccgccagggtgtcaaggcttcgtgctgaattcgccaccta

SEQ ID NO: 262820 - DNA, 1064 bp, Homo Sapiens
tgggtggcgaattcggcacgagggccgcagcaatggcgctgagttcctctgctggagttcatcctgctagctgggttcccgagctgccggtctgagcctgaggcatggagcctcctggagactgggggcctcctccctggagatccacccccaaaaccgacgtcttgaggctggtgctgtatctcaccttcctgggagccccctgctacgccccagctctgccgtcctgcaaggaggacgagtacccagtgggctccgagtgctgccccaagtgcagtccaggttatcgtgtgaaggaggcctgcggggagctgacgggcacagtgtgtgaaccctgccctccaggcacctacattgcccacctcaatggcctaagcaagtgtctgcagtgccaaatgtgtgacccagccatgggcctgcgcgcgagccggaactgctccaggacagagaacgccgtgtgtggctgcagcccaggccacttctgcatcgtccaggacggggaccactgcgccgcgtgccgcgcttacgccacctccagcccgggccagagggtgcagaagggaggcaccgagagtcaggacaccctgtgtcagaactgccccccggggaccttctctcccaatgggaccctggaggaatgtcagcaccagaccaagtgcagctggctggtgacgaaggccggagctgggaccagcagctcccactgggtatggtggtttctctcagggagcctcgtcatcgtcattgtttgctccacagttggcctaatcatatgtgtgaaaagagaaagcccaggggtgatgtagtccaagtgatcgtctccgtccagcggaaagacaggaaggcagaaagtgaaggcccagtcaattgaggccctgcaggccccctccggacttcaccacggttggcccgtggaaggaaaaaataccctcattccccggggaaggagcccaaaccaccttgacccccagaactctggcacccccgaaagcccaaaaaataccctggaaaccaaccgcctggcttgaaaaaaaggttgtctcccccctgggcgggaaaccaca

SEQ ID NO: 262821 - DNA, 1451 bp, Homo Sapiens
ggtaccggtccggaataccgggatatcgtcgacccacgcgtccgctgaaatcttgaagcaggaaatcaaagtcttctttgtgaaggtacaatgatcccatctatgttaaactagagaagttggacatcatgattcgtttggcatctcaagccaacattgctcaggttctggcagaactgaaagaatatgctacagaggtggatgttgactttgttcgaaaagctgtgcgggccattggacggtgtgccatcaaggtggagcaatctgcagagcgctgtgtaagcacattgcttgatctaatccagaccaaagtgaattatgtggtccaagaagcaattgttgtcatcagggacatcttccgcaaataccccaacaagtatgaaagtatcatcgccactctgtgtgagaacttagactcgctggatgagccagatgctcgagcagctatgatttggattgtgggagaatatgctgaaagaattgacaatgcagatgagttactagaaagcttcctggagggttttcacgatgaaagcacccaggtgcagctcactctgcttactgccatagtgaagctgtttctcaagaaaccatcagaaacacaggagctagtccagcaggtcttgagtttggcaacacaggattctgataatcctgaccttcgagaccggggctatatttattggcgccttctctcaactgaccctgttacagctaaagaagtagtcttgtctgagaagccactgatctctgaggagacggaccttattgagccaactctgcttggatgagctaatctgccacattggttctttggcctctgtgtatcataagcctcccaatgcttttgtggaaagaagtcatggaattcatcgtaaacacttgccaattcatcatgggagcactgatgcaggtgacagccctgttggcactaccactgcaacgaacctggaacagcctcaggttatccccctctcaaggtgatcttctaggggatcttttaaaccttgacctcggtcccccagtcaatgtgccacaggtgtcctccatgcagatgggagcagtggatctcctaggaggaggactagatagtctgccccagaaattgtttacagtgcagttttcttcagcttattctgagattgaaagatatcccagaaatcaagatgagaagaaattaaagcccttatttttgctttggatccgtatgtggttaaatatatattcactcagagaatcaaggttcctttttcgagaacatcacaaggaagacctaaatttgcctgtgtggaagaagatgagtttctaaggcggcagtggacttttaaaatgcttttattgttcttatgcaaattacctaaagagaagattaatcctcaaagccattttttgaatgcatccttgccttacagagtgcttctcaaaataaattatataccttgaatctccta

SEQ ID NO: 262822 - DNA, 971 bp, Homo Sapiens
  misc_feature (775)..(835): n is a, c, g, or t
ttttacagcaagaacgggtctgtttaatgacacagctgggtctggttacaaacatcagaaacttagaaaaggaggacgggcggttgcacagatgaggatgaggatgaagatgaggatgaggatgggccaggaggggacacagcaggagccacagcagcaaaacatccttgaagacgacacacgtgaccaaggggcacacacggggggccccccgggctaagcctgacgcagatgaatagacagggccgactgcccgccaggaggagggtggggtggggaaagccctcggccctcggagctgagggtgagacccaggcatgtggtcccgccgacttgctgcccagcagcccggatcccctggggctgccctggtggccaaggcaggtggagctagcggtcgaggtttctggactgaggcccctcccccagtgcggtcatcccacccagaacttcgctctgcccctgcccattctaggacagccggtgagtcagttcctctgagggagtagggggagcccactcctttctgcctggaagtggaattcaggaatgtggggagctggtctgagaaggggctgggctttgccgccaagccgggttgccccagccctgcccctcccaggccccaggtccctctgcgctgctgtgggatttcctctttgcccagaacactctgttctctgcacaaccggaacccctccctgccccactcacaggtgggccaaaccgaggcttctgggcgccgcggatacacattctagatatgtatgtgtgnnnnnnnnnnnnnnnnnnnnnnnnnnnnnnnnnnnnnnnnnnnnnnnnnnnnnnnnnnnnnggtagatgtgtgcgtgatactctagatggtgatgtggagacctgcatgctggccgggctgatagaaacggggctggtttattccctaagggactcctagacctgtcccgcttcctgccagtcgctcagctaggtct

SEQ ID NO: 262823 - DNA, 884 bp, Homo Sapiens
  misc_feature (752)..(752): n is a, c, g, or t
  misc_feature (754)..(754): n is a, c, g, or t
  misc_feature (761)..(761): n is a, c, g, or t
  misc_feature (774)..(774): n is a, c, g, or t
  misc_feature (776)..(776): n is a, c, g, or t
  misc_feature (818)..(835): n is a, c, g, or t
ggcgcagagcaaggcccccgacagcaccctacggtccccgtcttcccccatccacgaagaggatgaggagaagctctccgaggacgtggacgcccctcccccactgggtggcgcagagctggccctgcgggaaagcagctcccctgagagtttcataacagaagaggttgatgagtcgtcgtcaccacagcaagggacccgagcagcttccattgagaatgtcctgcaggacagcagccccgagcactgtggccgaggcccacctgctgacatctacctgccaggacggcccacctccatggagacggcccacggcctcgccaccaccagccccacctggcctccacttggtggccccagccccgatcccagcgccgccgagctgaccccactctgagagcctggccgagctggcagcatggagccctcggctccccagactttgccgaggggctgctccggaccccgttgtgagccggcctcctgtctgcatgccccctgtggccaccaggctccgagggggccgtggtgactcttgatcaaagagcacagtgaactgtcccttctgagtctcccttttctacaggtgatatatttgtaactgggacaagatgaaggacagcagctttccatccctagttcagagcccccgctccccagggtcctgtggggctgacggctggggctggggctgcccacgtgtggcctccgctggctctgcctgctcctgcaacagtgcggtccctgcccgnanaactcangaggcctgcagananaaactgatttggtggtcaagcaccatcttcaagatgttcaannnnnnnnnnnnnnnnnnttcccgggcccgggccaaggaaagaaaacagtccctgtccaccccaccc

SEQ ID NO: 262824 - DNA, 960 bp, Homo Sapiens
  misc_feature (43)..(59): n is a, c, g, or t
  misc_feature (305)..(597): n is a, c, g, or t
  misc_feature (629)..(629): n is a, c, g, or t
gtagcgaggcctgggtggcgaattcggcacgaggtgagagttnnnnnnnnnnnnnnnnntctgtatgcctgagtaccatcctggatgaatctagaaggtatggggtagagcttgacagggttcctgtgtacccactgggtatccgttagaggtaagggagaggagaggattgatagagtgttgcaaaagtatagattattcattgagataaaggatttggtttccctgcccatgagtattaaaaaaatttaagttttcccaagcttgcatctctgaccaaatttcacataaaacattggaaggannnnnnnnnnnnnnnnnnnnnnnnnnnnnnnnnnnnnnnnnnnnnnnnnnnnnnnnnnnnnnnnnnnnnnnnnnnnnnnnnnnnnnnnnnnnnnnnnnnnnnnnnnnnnnnnnnnnnnnnnnnnnnnnnnnnnnnnnnnnnnnnnnnnnnnnnnnnnnnnnnnnnnnnnnnnnnnnnnnnnnnnnnnnnnnnnnnnnnnnnnnnnnnnnnnnnnnnnnnnnnnnnnnnnnnnnnnnnnnnnnnnnnnnnnnnnnnnnnnnnnnnnnnnnnnnnnnnnnnnnnnnnnnnnnnnnttggaagaagagcttaaaaaagataagatttntaagagtcccaagttatttaagttgagtgtaatttgtcatttaagggaaggcaaatgagtttatcatcctttcctttaagagcaatctcctttttactgttggacaaaaacccataacctttgtcattttacaaggaaaaaacctctttaagaagtcctcagaaccagaaagcaatgtggacctctcagccgctgggtctgggtggggttagcctgaacaatgaccggggccaagcccgttccttttttggctgccattctttccctcattaataaaagggggggaaaacattgggcaaaattggccttttgaagaaattctttgggaatt

SEQ ID NO: 262825 - DNA, 1386 bp, Homo Sapiens
  misc_feature (1024)..(1316): n is a, c, g, or t
ggaggtttgacagagggcaagtgttggcggatcgtgtgtctgacacgttgtgtagccaaatgcaggttgcgcaaggaagtattcatggcagagaggttatggacactctgcagtagtcgtgtattgtacaggacgctgtgcaagttcggggccttctcgtggggttccgtgcggatcgctgaaggctgattcccctttcaagacgtagtttgagctttcaacgtgtgagtggagtgcagggagcacaggtcagcaaatgtggtatatggacaggttgtccgggacccaggagaccaatgggcctggtgcgagcgcttctgtaataccttgaggcttcaacagtttagtgttagaataagaacgtttaagatagtcataacccaagcatgtaaagagaaaatagctgtcatcgttcagctcattttttaggaagggcaaccagaggagaaccacaattgaaactcgtggaatttattaggttttaagataatgagtgcattttttaagtgttaggctacgtatgaagtttgctaaccttgatggcacacacacgaaatctctagatggagaagtagaagatgcttgttaccttcaggcaaaagtaagagttactgaacaggaaggcagagtagtggggaaagttactcatctgttccccaaagatttaaaataaagggggcaggtgcagaatgttgtcctcttctatccaagaatctcaaagcaattgcctatgttccaacactttatgatgaggaagatggcagcaaaaagaacggcttgcccagtcatggtcagcaaacccaccaggaccagcgctgagagttcacattgcttctggttctgaggacttcttaagaggttcttccttgtaaaatgacaaagttatggttttgtccaacagttaaaagagatgctctttaagaaggatgataaactcatttgccttccttaaatgacaattacactcaacttaaataacttgggactctttaaaatcttatcttttttaagctcttcttccaannnnnnnnnnnnnnnnnnnnnnnnnnnnnnnnnnnnnnnnnnnnnnnnnnnnnnnnnnnnnnnnnnnnnnnnnnnnnnnnnnnnnnnnnnnnnnnnnnnnnnnnnnnnnnnnnnnnnnnnnnnnnnnnnnnnnnnnnnnnnnnnnnnnnnnnnnnnnnnnnnnnnnnnnnnnnnnnnnnnnnnnnnnnnnnnnnnnnnnnnnnnnnnnnnnnnnnnnnnnnnnnnnnnnnnnnnnnnnnnnnnnnnnnnnnnnnnnnnnnnnnnnnnnnnnnnnnnnnnnnnnnnnnnnnnnntccttccaatgttttatgtgaaatttggtcagagatgcaagcttgggaaaacttaaatttttttaatact

SEQ ID NO: 262826 - DNA, 1099 bp, Homo Sapiens
  misc_feature (597)..(597): n is a, c, g, or t
  misc_feature (713)..(713): n is a, c, g, or t
  misc_feature (1082)..(1082): n is a, c, g, or t
ggcctgggtggcgaattcggcacgaggcgacgtcatccgggacgtccccctggtgcacctggatgagatcaccttatttaagagcagagtggccgaggaaccgccgaacctgtggtggtgagaggcggagccgccgcccatcggtctcagtcacctcgagaagctgcaggagcctgggacgccagggacccttggtttgtcacaagaggaagggggcctctctcccggccagccacgccccacctggctcctggggctcccggcgtctccacggctctctcatggggactgttgctctgtgaagtttgggtcgaggggatgcgttctgggtgacatgagggggctcgggggacggtcgatgtggggggctggctgaaccaggctgacccttggggcctggctggggggtttgtatactgagccgcaatccctgggggccctgtccacgggcctggagggcccgaaccccctgccacttccgaccgggaagcgtgtcccttggctgttgtgtttgtggtcacctgccaccggggccccgtggatgggcggccacatgctgtccccctgaagtccagtcggccgggctggtcaccgtgntatctgagtgtccccttgcatggtcaagtgtgaccatggggaaggcccctgccagtttaggggctgcagacttgggactctctatcccattaggacacacttgagcccactcatgntctctggggcttttctagccagatgatgcctgtggccccagagagtccccctgaggttgggaattgctggttggagcctctcctgggacttttcagcccaaccagcaagggcccgtttctaacgagagaggggctcctcccccgtcccaccccaccccatgggcccttcagctttccctggggaaagtccctggcccgtttcctgggggaaaatcgattccacaattccggcttttgttagaaataacgccgaaaaccttttaaaacccccgaaaaggggattcttttaagggctggggaataaccacatccccctggaacccccatttttccaaatgggacttgccttttttaagaaatttttaaaanaaatacttccagcgctg

SEQ ID NO: 262827 - DNA, 1073 bp, Homo Sapiens
  misc_feature (959)..(1018): n is a, c, g, or t
gcgacccgcccccgtctccaccaacccgactcttgcacaaaacaagatcccccccagggctgggtggcgaattcggcacgaggggctgccaaaccacggacgtccaaaaagtccaaaccaaaggacagcgataaagaaggaacttcaaattccacctctgaagatgggccaggggatggattcaccattctgtcttctaagagccttgttctgggacagaagctgtccttaacccagagtgacatcagccatattggctccatgagagtggagggcattgtccacccaaccacagccgaaattgacctcaaagaagatataggtaaagccttggaaaaggctgggggaaaagagttcttggaaacggtaaaggagcttcgcaaatcccaaggccctttggaagtcgccgaagccgccgtcagccaatccagtggactcgcagccaaatttgtcatccactgtcacatccctcagtggggctccgacaaatgtgaagaacagcttgaagagaccatcaaaaactgcctgtcagcggcggaggacaagaagctaaagtccgtcgcgttcccgcctttccccagcggcagaaactgctttcccaaacagactgcggcccaggtgaccctcaaagccatctcagcccactttgatgactcgagcgcgtcctcgctgaagaacgtgtacttcctgctcttcgacagcgagaagcatcggcatctacgtgcaggagatggccaagctcgacgccaagtagcccgccgcactttccaccagggatcggaagacgacccgaggcccaagaaggggggttttgcttttttaaaaggaaaaaggaaggggtgaatggcaggggatgggaagggtggcccggtcaaggcccctgcccggggcaaggggagcccttctggcccttcaccacttttccctccaaaaaaagccctcctctctggtaaaggaannnnnnnnnnnnnnnnnnnnnnnnnnnnnnnnnnnnnnnnnnnnnnnnnnnnnnnnnnnnatgttagaaacattttttttaaaaacaaacacgaaccctccgttttttaacaaat

SEQ ID NO: 262828 - DNA, 266 bp, Homo Sapiens
  misc_feature (75)..(75): n is a, c, g, or t
gttgagcccctcgtcattggcaactgcccagcaagatgtgtcctcggggctatccgggccttcttgttgtacctncggccattgccggcccaattctagaatttccgctgaaatcacaaggaggcattaacaggcaatcacagaatggggcctgagctaaagcttttctttagaaatggccttcaagtttgatcacattcattcatttgtgatttctatgtctcggcctggaaagaaatcccaggaagcgtaagagaactcaagtt

SEQ ID NO: 262829 - DNA, 767 bp, Homo Sapiens
  misc_feature (88)..(88): n is a, c, g, or t
ggagaaatagggtaaaccttggaaaagggctggggaaaagagttcttggaaacggtaaaggagcttcgcaaatcccaaggccctttgnaagtcgctggagccgctgtcagccaatccagtgaactcgcagccaaatttgtcatccactgtcacatgcctcagtggggctccgacaaatgtgaagaacagcttgaagagaccatcaaaaactgcctgtcagcggcggaggacaagaagctaaagtcacgtagcgttcacgcctttccccagcggcagaaactgctttcccaaacagactgcggcccaggtgaccctcaaagccatctcagcccactttgatgactcgagcgcgtcctcgctgaagaacgtgtacttcctgctcttcgacagcgagagcatcggcatctacgtgcaggagatggccaagctcgacgccaagtagccgccgcactttccagcagggatcggaggacgacccgagtcccaagagtggggttttgctttttaaaaggagagaggaggggtgatggcaggggagtggagggtggccgggcaggttctgccggcgcagggagccctctgcccttcacactctcctccaaaagagcctccatctgtaaggaagcaggtctccgcgaggggtttctttccatgtgttttcctcctgttgttttagaacttttttaaaaaaacagacctcgttttagatttatagcattgacttttacacacattcacacaagaaaaaaatcctttcaaaattctta

SEQ ID NO: 262830 - DNA, 918 bp, Homo Sapiens
  misc_feature (730)..(730): n is a, c, g, or t
ggcctgggtggcgaactcagcacgaggccgggaagcccactggcgaggcggcttctccggctcctgcgagcgccatcggcggggccagctcgcagccgcggaagaggctggtatccgtctgcgaccactgcaagggcaagatgcagctggtggctgacctgctgctgctgtcgagcgaggcgcggcccgtgctcttcgagggccccgcctcctctggtgccggcgccgagtccttcgagcagtgccgggacaccatcatcgcgcgcaccaaggggctctccatcctcacccacgacgtgcagagccagctcaacatgggccgcttcggggaggcgggggacagcctggtggagctgggcgacctggtggtgtcgctgaccgagtgctcggcccacgcggcctatctggccgctgtggccacgccgggcgcccagcccgcgcagccgggcctggtggaccgctaccgcgtgacgcgatgccgccacgaggtggagcagggttgcgccgtgctgcgcgccacgccgctggccgacatgacgccgcagctgctgctggaggtgtcgcagggcctgtcgcgcaacctcaagttcctgacggacgcgtgcgccctggccagtgacaagtcacgggaccgcttttcgcgggagcagttcaagctgggcgtcaagtgcatgagcaccaccgcgtcggcgctgctggcctgcgtgcgcgaagtgaaggtggcgcccantgagctggcgcgcagccgctgtgcgctcttcagcgggcccctggtgcaagaagtgagcgccctggtaagcttccccccccgaaccccagttcctgggtcccgcgggaaactgggaagcgccccaggggaaaggcggggccagaaccgccatcctggggcggggcgccatggaaacgggggggcccgcc

SEQ ID NO: 262831 - DNA, 944 bp, Homo Sapiens
  misc_feature (43)..(52): n is a, c, g, or t
ggtgcggtcctggggggcgagtcgccgccgctggggctgtccnnnnnnnnnnttttgggccaccagggtgtttcccggggccctcaggggatcggcgtagccggcgttcagggggcacggacacctccgggccagtggcaccagagtgtggagggggtgtcccggtgcccaggcaggaaacagccacatctctggaaacagggtattgaggcccttccccagctgtaaacattcaggacagccagccagaacttcccccaggaggggatggccacagcaccccctttcttgtgaagaatgttccgggctcgtaccaggtcaggatcgtcaggcccaacacccagaattctgagagacacatagttgagcgcagtcccaaacacggtggacttatcctcaatgtgcaggccccagccaccgtcagggagctgcactgaccgcaggtaccgcacaatctcttctctgtatccggctggcagagggatgcgtgccacgtggcaagtgatcaggaggcctggcaggaggaaaagtgggccaccataatcacccgtccagtgcccatcctcagcctgcagccccacgtaaaatgtcatcccgttcagagccccctcaaaggcggtgtgggctttgggcaagtccttaaagtaattcttggtgtccagccccagggcgtaggcttccaggccggtctgctcgcggccggcgcgctcgtcctgcaggtaggtccacgtctgccggcccctctcgcagttgagtcgccagcggccgaggtcggtggcgggctcggtcttgtaggggccccctcggcgccgcagacacctgaggaccaccggccatcagcgacccaggccccgccccaacgccggccgccggcccactgccccagtcgcgctctcctcagcacctagcctcgtgccgaattcgccacccaggcctcgctccta

SEQ ID NO: 262832 - DNA, 1383 bp, Homo Sapiens
cctctcccctctgaaccagtttttaaagatgagccttacccagaaaaataagccccaaagaactctcatctaaatgatcagacccttcctaaattacctttggcaacctaggtaattcttttttattacacacctccaacctgaccctttctacagtttcaactataaatgttcatgcccctcgtcaaataacgttgctaggatgaatttgccacaggtttgagtacagagagaacaagcaagaaaaatgtcagtgtttattttaaggagagtggccaggatgtcagtcctcataattggtcccttctctctctctatcctccaaggtaagttctttgttgacttgataagctttagtccttctgtacaacttctagaagatgcacttaatggtgcttctttgcacttccagaactcaccttctattctacctgtaaggctgtaggggagcatcccaatcaacataaggcctacccctttagccacgaaaatcagccagccatcatgtttctgcaccaccacctcccttcctgacggacactggtgctgatgacaaaaatgggacagtaccgcagctggtttctctttttcgagtgtgtagataagaaataaaaaacattttcattccctcacaagcttaatctagtaatataactgcctaaaaaaaatcaaaccataaataaacctatgtgctaaacaaatcacatgacttgatgacttctctaaaattaatgtcaaggaaaaaaggaaaagttgatcccaagtaaaatcccttgaccacagctgtctgaaattagccaggggaatgggagacaccaccaagaacctcagctctttcctgccctgtatttcaaggggagtgttgtggccttcacaaatgaaaattatgaatcacaaagataaacgtcctcacttctaacctggtgaatcctcaggaatgtcatgaggatgacaacacagggttaattcattttttctcagtctcccccctgactccacaaaagctttgccttcccaacacaaggggctgggaggtccagtctagacagagcatgctgttggggtaaacagtaaccatgtgatcccatgattcccagagctctgagcacaaagcttttcatcccagtggcaactggaatgtgggtaattctgtaaactcatggccacacctttaatgcttggggacagtgggtggagtcagccagagctcttttccaacttcatctagggtcttctctctggaaaagcttagtgacgttctccgaaggtttatttggttaaggagtattgctaaaacactttttaaaaatccactttgaacacatgtgtaagcgaaaagaaaatgacatatatacccctcgtgccgaaaacgccacccaggcc

SEQ ID NO: 262833 - DNA, 1019 bp, Homo Sapiens
  misc_feature (909)..(910): n is a, c, g, or t
ggcctgggtggcgaattcggcacgaggagaaacccgaacagtagaactaagtatcccagctgatccagcaaacctggattctgaagccaagataatccagcaggctggccaggtttggttcccagattctgcgtttaagacgtatcaggccatcaaggacttcaaccgggaagggctgcctctgatggtctttgccaactggagaggcttctctggtggaatgaaagatatgtacgaccaagtgctgaagtttggtgcttacattgtggatggcttgagggagtgctgccagcctgtgctggtttacattcctccccaggctgagctgcggggtggctcctgggtggtgattgactcctccatcaacccccggcacatggagatgtatgctgaccgagaaagcaggggatctgttctggagccagaagggacagtagaaatcaaattccgcagaaaggatctggtgaaaaccatgcgtcgggtggacccagtctacatccacttggctgagcgattggggaccccagagctaagcacagctgagcggaaggagttggagaacaagttgaaggagcgggaggaattcctaattcccatttaccatcaggtagccgtgcagtttgctgacttgcacgacacaccaggccggatgcaggagaagggtgttattagcgatatcctggattggaaaacatcccgtaccttcttctactggcggctgaggcgtcttctgctggaggacctggtcaagaagaaaatccacaatgccaaccctgagctgactgatggccagattcaagccatgttaaagcgctgggtttgtggaagtggaaggaacagtgaaaggcttatggttggggacaataaataaggatctggccggagtgggctaagagaaacagctgacannaagggaggaatgggtgtttcacctccggtaaattagagggaaaaacattcaaatgcaattcagccaggaaacctaccgttccctccaaccaaaaatccgcgcagccttg

SEQ ID NO: 262834 - DNA, 1208 bp, Homo Sapiens
ggcggctgttccacctggacggctcccatttcgcacaaaacaccaacaaggtggcgcgctgcgagcgcgtgcaacggcccatcggttacacacctatttggcggggggggagtttagggactctcgagcagatgcgaagtgcgcggttgtaatgcccggtaaaacagccttaattcccgggtacacctcgggcccaccaccaccggaggcggtgtctcttgtgaaatcccccatgtgcatggtgaagaactggggggcggggccccaaagggagggggccaccttttggcttgccaaaaaacgccgtgttaaataagttctaggccaccgccaagtagaaggttttttccttccacccttccccgcgggtggaaaggggaaacccccggtcccaggccacctgcattgcctctccggagccacccggaaagcaagcctggggttggtaggacctttccccaggggcttgccaaggatcattttcccatgatggagatgtcccacaaaccgctgcatttgtcggccgtctggctggaaccccggagtacaggaagtcctccgggcagtacactttatcacgccacgttgtagaacgccttcccacggagtcgtctcccacacgagtcgcaggtgaagcagtcagtgtgataaagactccccattgcctggcacgcctgctgggctccgtagatgccaagcccacacttgatgcaaatgccgaagtagtcccgcgccgtgcgcgcctcgagcgcccgctccagctcccgggtgagcgcctccagccgccgttcggccgcgcttgggccgccctcccggccagggggcagcgggagtgcaggcagcgggaagggggccggccccgcaggctccggggagcgagcgggcgcggggcaggcgccgggcgggaggaagtcagcgtaggcgccggccgagccccgggagccgaggctggaaacgctggagcgggcgctgcccaccgaaggcggcccgggaccgggacgcgggtccgagcgaccggagcgcgggctgccgtggcgctggtcgtagcccaggctgatgccgctggatcgggcgctgccgccaccgccgccgccgtcggaccccgccaggctggcccgtgggctgcccgcaggctgcgcgctgagccctcgtgccgaattcgccacccaggcctcgatccctaaaagctgttgggggtgtggggaaag

SEQ ID NO: 262835 - DNA, 1492 bp, Homo Sapiens
gagcgaggcctgggtggcgaattcggcacgagggaagaactgattgacatcatcctcctcatcttggagcgcaaccctcagctgcactactaccagggctaccatgacattgtggtcacatttctgctggtggtaggcgagaggctggcaacatccctggtagaaaaattatctacccaccacctcagggattttatggatccaacaatggacaacaccaagcatatattaaactatctgatgcccatcattgaccaggtgaatccagagctccatgacttcatgcagagtgctgaggtagggaccatctttgccctcagctggctcatcacctggtttgggcatgtcctgtctgacttcaggcacgtcgtgcggttatatgacttcttcctggcctgccacccactgatgccgatttactttgcagccgtgattgtgttgtatcgcgagcaggaagtcctggactgtgactgtgacatggcctcggtccaccacctgttgtcccagatccctcaggacttgccctatgagacactgatcagcagagcaggagacctttttgttcagtttcccccatccgaacttgctcgggaggccgctgcccaacagcaagctgagaggacggcagcctctactttcaaagactttgagctggcatcagcccagcagaggcctgatatggtgctgcggcagcggttttcggggacttctgcggcctgaagatcgaacaaaagatgtcctgaccaagccaaggaccaaccgctttgtgaaattggcagtgatggggctgacagtggcacttggagcggctgcactggctgtggtgaaaagtgccctggaatgggcccctaagtttcagctgcagctggttcccctgaaagccagagaagacccttcctcttacatcacattaaggtctcacccttccatggaaggattgggagggggtggaaattcctttattaaaaagggtttctgtccagagttttttattcctgccaccctgccctgcccgtttgtgtttgcctttacttcagaggccagtagcagagcctacctgacacagaggggacctgggggcctggcacagaatcttatgcctctcccagtgggcttttggatgggctctctgccacctccctggtgttggaggaagtgggtttctgaaacttgcagctgcttttgcaacctgctgggcctgggctgccctagttaccggggacctcctagtcacccccatagaaggtgacctggggacatggggatgcccttcttactgcctccggcttgccctgcatccgatgggaccccaaaaaaggaagggggctgcctgcctgaaaggagtcagggccttgtgggatgggaaaaccaaaaagggccccaagggacctccctcctggggggaagcatggaaatcgggccccctcccttacaataacaaggcttcccattcaagggtgggataacaaaaaatccctgaaacaaccccaac

SEQ ID NO: 262836 - DNA, 1055 bp, Homo Sapiens
  misc_feature (790)..(790): n is a, c, g, or t
ggcctgggtggcgaattcggcacgaggcctgtaccgtattaatcgaataatcttattgttcataaaatccagagcatgtgggtgagaagaatcgatgcagaagccatcgctcagagcgattttcagtacctcttccacgaagacctggaagctgttgatctgcttgttggcgggcaccacccagagcctcttgaggttctgcttggtgtactcctcctctggcaggccctccacattggccacccagtccagagtcaggtggttggggtcctgcaagtggctggtgatggaggagagattgccattggagcagtagaagagcttagagccaaggagcttgaggaagaggcaggaggtgctgaagatgttggcgttgaagacctccatgctggaagaggagaggctgtagatctggggtgcctcgcgcacagtgaagtggaccgtctgcacacgctggttcagtgtgatgttgagcatggcattcttctcggccttggagagctccacttccttctcctgcagggcctcaatcaggggctgcacctggtagaagtcggcctccctgcggagcagccccatctcctggaagtcctcaggcaggtcaaggtgggaggtccgcaggaagttgaggatatagcggaacactttgccgtcacggtcaatgaagcagttgccctggctgtccctcttggtgggcatcttcccgctgaacatggcgcctagcatggagtcagggaagctggtcagggtcgcccagtgaggttgtatagagcttccccccgacgtcaancggtgatgggggtccgacatggcacgaagactggggttgcctggaagtaatccctggaaaaagggggaaaaatggaaaaaatgactaataacccaacccttcatagaagaaattcccaggtccctttaactccccttattgggaacttccaagccttattgccccttgggggatatcaaaattgaacttcaattacccggattgaaattggggggaaataaattgctttaacaacttgggtggtcaaaggtacacttttatccct

SEQ ID NO: 262837 - DNA, 946 bp, Homo Sapiens
ggagcgaggcctgggtggcgaattcggcacgagggtgccttcacctgccccatctccagggcctggtccggtaccccctcgccccccagcagcagaaccacccccttgcctgcgccgaggcgccgcagctgcagacctgctctcctccagcccggagagccagcatggcggcactcagtctcctgggggtgggcagcccctgctgcagcccaccaaggtggatgcagctgagggtcgtcggccgcaggccctgcggctgattgagcgggacccctatgagcatcctgagaggctgcggcagttgcagcaggagctggaggcctttcggggtcagctgggggatgtgggagctctggacactgtctggcgagagctgcaagatgcgcaggaacatgatgcccgaggccgttccatcgccattgcccgctgctactcactgaagaaccggcaccaggatgtcatgccctatgacagtaaccgtgtggtgctgcgctcaggcaaggatgactacatcaatgccagctgcgtggaggggctctccccatactgccccccgctagtggcaacccaggccccactgcctggcacagctgctgacttctggctcatggtccatgagcagaaagtgtcagtcattgtcatgctggtttctgaggctgagatggagaagcaaaaagtggcacgctacttccccaccgagaggggccagcccatgggtgcacggtgcccctgagcctggcattgagcagcgtccgcagcaccgaaacccatgtggaacgcgtgctgagcctgcagttccaagaacaaaggcctcaagggctctccttgtgcacctgcacttccccaccttgggcctgaattaggcctgcccgaaagccccaaaaactttgtgggctttcatccagggaggggggaaccccatttacctgcatcaagggggggcctg

SEQ ID NO: 262838 - DNA, 973 bp, Homo Sapiens
  misc_feature (867)..(876): n is a, c, g, or t
ggcctgggtggcgaattcggcacgagggccagacaagcagagcctggtcaggcggcttttggcagtctacgcactccccagctggggccgggcagagctggcactgtcactgctgcaggagacacccaggaactatgagttgggggatgtggtagaagctgtgaggcacagccaggaccgggccttcctgcgccgcttgcttgcccaggagtgtgccgtgtgtggctgggccctgccccacaaccggatgcaggccctgacttcctgtgagtgcaccatctgtcctgactgcttccgccagcacttcaccatcgccttgaaggagaagcacatcacagacatggtgtgccctgcctgtggccgccccgacctcaccgatgacacacagttgctcagctacttctctacccttgacatccagcttcgcgagagcctagagccagatgcctatgcgttgttccataagaagctgaccgagggtgtgctgatgcgggaccccaagttcttgtggtgtgcccagtgctcctttggcttcatatatgagcgtgagcagctggaggcaacttgtccccagtgtcaccagaccttctgtgtgcgctgcaagcgccagtgggaggagcagcaccgaggtcggagctgtgaggacttccagaactggaaacgcatgaacgacccagaataccaggcccagggcctagcaatgtatcttcaggaaaacggcattgactgccccaaatgcaagttctcgtacgccctggcccgaggaggctgcatgcactttcactgtacccagtgccgccaccagtttctgcagcgggttgctacaatgcccttttacgccaagaaaaaatggcccaaacccaactnnnnnnnnnnaaaaatccccgggccgggcccccacccttcgaaaagggccttttttacctgggggaattgggaatggtctcccgggttttaaaaaatgtgttaaggg

SEQ ID NO: 262839 - DNA, 1145 bp, Homo Sapiens
  misc_feature (411)..(421): n is a, c, g, or t
aaagagcgaggcctgggtggcgctctgaggccctctgcgctgctaatgtggacttctcccacctactgggctttcttccactcaacctgcccccgtgtaacccacctggggccacaggaggcctggtcatgggctactcccaggctgaggcacagcccctgcttaccactttgcaagctcagcctcaagattccccaggagctgggggaccactgaactttgggcctctgcactccttgcctcctgtcttcacgtctggcctgagtagcaccaccctgcctcgtttccatcaagcattccagtagcccccacagaggccctcagctcagtttttggctctgttatggagccttagtacccaccccgtctgtgtcccccatgaaggcagctgagctttcagagctgggttcnnnnnnnnnnnttccagtgtctgtatacaggagcacttggtttgggggttcaggctctaggatcgattccagaaggagccttgagccccaaccccgtgaaaagatctcataccgtaggacttcaggtattatttacttttatttttttgacctgaatcgggagccacacttggccctcttcctctccaaagcgccagaacctccttctctttggagaatggggaggcctcttggagacacagagggtttcaccttggatgacctctagagaaattgcccaagaagcccaccttctggtcccaacctgcagaccccacagcagtcagttggtcaggccctgctgtagaaggtcacttggctccattgcctgcttccaaccaatgggcaggagagaaggcctttatttctcgcccacccattcctcctgtaccagcacctccgttttcagtcagtgttgtccagcaacggtaccgtttacacagtcacctcagacacaccatttcacctcccttgccaagctgttagccttagagtgattgcagtgaacactgtttacacaccgtgaatccattcccatcagtccattccagttggcaccagcctgaaccatttggtacctggtgttaactggagtcctgtttacaaggtggagtcggggcttgctgacttctcttcatttgaggtcacattttccccccgtggggaaataaactgactttggactgcttcagtctc

SEQ ID NO: 262840 - DNA, 898 bp, Homo Sapiens
  misc_feature (736)..(749): n is a, c, g, or t
ggcctgggtggcgaattcggcacgaggggcctccgccgcctcggccccgggccccgcgcccccggtctcggctcccgccgcgctgccctccagcaccgccgcggagaacaaggccagccccgcggggacagcggggggacctggggctggagcagctgctgggggcacgggacccttggcggcgcgggccggggagccagctgagcggcgtggggcggctccggtgtcggcgggtggcgcggcgcccccggagggggccatatctaacggggtttacgtactgccgagcgcggccaacggagacgtgaagcccgtggtgtccagcacgcctttggtggacttcttgatgcagctggaagattacacgcctacgatcccagatgcagtgactggttactacctgaaccgtgctggctttgaggcctcagacccacgcataattcggctcatctccttagctgcccagaaattcatctcagatattgccaatgatgccctacagcactgcaaaatgaagggcacggcctccggcagctcccggagcaagagcaaggaccgcaagtacactctaaccatggaggacttgacccctgccctcagcgagtatggcatcaatgtgaagaagccgcactacttcacctgagccacccaacctaaatgtacttatctgtccccatgtccccacaccagcctgttttcataataaactttattgtgacaggccaaataaaaacannnnnnnnnnnnnnttccactatttccttaccccaccctcctacctcaaacccccacacatccgagaattgtttcccccccaccccttggggcccaaaaagggagtttctctggggcccctaaaagagtgggggtgccccccaggcccttggagcccccctat

SEQ ID NO: 262841 - DNA, 1034 bp, Homo Sapiens
taggtagcgaggcctgggtggcgaattcggcacgaggcacaagtctcaacgaccattaagtttggtctgatttatgctattctcagtttaacttcttaggccagtacaggatctacatacttgttgagacatccttttctaatactgtcccagaagcctggttagagcagaggagcctgggagaatagtaataggttccctcttaattcttaattaaggttgggctgagtggaggacccattcctgtgagataatgagtacgagaggggacaggcttgctagagtagaatgagtaggccagctggaatagaataagcatgctctcacctgctcacccttcttgggtcagcagatagcagtcagctcctgtttttgctggacctgagtggggtttccctgtgatggccaccttgacagtggactctgccttcccagaggtcataaggtgcccagggcattagttggatatacagaggcatgcctgagaaggcagaggaggtgagggctttgtgccctgagaagctctgcacactcaggacgacaatggttcatcctgagaactccaggagggcagtggtctgctgggctgacatgcacttggtctctagcactcagcccagccagcttgcaactcctagggcctgtgccctggcccagctttaagaaggccagcctttggagaggcattcgagtggtgtctggaaaacaaagacacccttggggtgacctgggccctagtcccagcctgggctgctctctgctcatagggactttcagatggcactctttccacctgcagatctgcccactagccctgtgggaactggtcatcaactggcctggattggccctgagaacgtctttcctggcgcgatcaaccctggtacaaggcagcttgtggcctgggcccaaccaaaaccggggcaccagtactcagcatagacccctccctagttgcatgaaagtcgaacccaggccattgtgatggcccaatgggttcacttgggcactggggccttgctttttggggccaa

SEQ ID NO: 262842 - DNA, 1047 bp, Homo Sapiens
  misc_feature (872)..(892): n is a, c, g, or t
tagcgaggcctgggtggcgaattcggcacgagggggccccctgggccacgccgatcacggggagcccctcgactgcctcccagaacaaagtgggaaagggaagcttagcccgccgctgccgcctccgagcagcccgccaggactctggctactggagatgggcgcccggctatcgcggcgacggctgccggcggacccatccctggccctggacgcgctgcccccggagctgctggtgcaggtgctgagccacgtgccgccacgctccttggtcacgcgatgccgcccagtgtgccgcgcctggcgcgacatagtggacgggcccactgtgtggctgctgcagctggcccgcgaccgcagcgccgagggccgcgcactctacgcagtggctcaacgctgcctgcccagcaacgaagacaaggaggagttcccgctgtgcgccctggcgcgctactgtctgcgcgcgcccttcggccgcaatctcatcttcaactcctgcggagagcagggcttcagaggctgggaggtggagcatggcgggaacggctgggccatagaaaagaacctaacaccggtgcctggggctccttcgcagacctgcttcgtgacctctttcgagtgctccaagaggcagcttgtggacctggtgatggaaaggggtgtggcaggagctgctggacagcgcccagattgagatctgtgtggctgactggtggggcgctcgagagaactgcggctgcgtctaccagctccgggtccgccttccggatgtggaatgaaaaggaagggggcaagttcctccacctcccctggaaccggtccttcaagggactgaggaggggctgccccacgggtggggcccaaactaactnnnnnnnnnnnnnnnnnnnnntaaagggaaacactgccccgcgcttttggtcgggtcggggttccccttctggtccctccgggagatccttaaatcctccccagcccaaaaaaggattggggcccctctcttaccttcccgaagaccgaccaatgtaatatacccgaacacactag

SEQ ID NO: 262843 - DNA, 1094 bp, Homo Sapiens
ggcctgggtggcgaattcggcacgagggtcagagctgaacctagaggtgcagcagaagaccgaccggctggctgaggtggagctgcgactcaaggactgcctggctgagaaggcacaggaggaggagcggctcagtcggcgcctgcgtgacagccacgagaccattgccagcctgcgggcccagtccccacctgtcaagtatgtcatcaagacagtggaggtggagtcgtccaagaccaagcaggccctcagcgagtcccaggcccggaaccagcacctgcaggagcaggtggctatgcagaggcaggtgctgaaggagatggaacagcagctgcagagctcacaccagctgaccgcgcggctccgggcgcagattgccatgtacgagtcagagctggagcgggcccatgggcagatgctggaggagatgcagtccctggaagaggacaagaaccgggccattgaggaggcctttgccagagcccaggtggagatgaaggctgtgcacgagaatctagcaggcgtccggaccaacttgctgaccttgcagccggcactgcggaccctcaccaacgactacaatgggctcaagcggcaggtgcgcggcttcccactgctgctgcaggaggccctcaggagtgtcaaggccgagataggccaggccatcgaggaggtcaacagcaacaaccaggagctgctgcgcaagtaccgccgcgagctgcagctgcgtaaaaagtgcccacaatgagctcgtgcggctgaaagggaacatccaagtgatggctcgtgtcccggccagtcaccaaaaaaggaagggggaaggacctgagggccaccaaggctgtgaattttcgatgccggaagacgaatcccataatccaccttgcttgcacaaggggcaggccttgggtcctttcgagctgggaaaaggttctttctcccccacaaggcccttcccaacaagggacctgtgttcccagggaagggggccaaggccccctggggccaacctctcttgggaatttggaagggggggtctccaaagggtgcttgcgccattcttttgggcgctaaaagggggcccagaaaccggt

SEQ ID NO: 262844 - DNA, 1080 bp, Homo Sapiens
ggagcgaggcctgggtggcgaattcggcacgagggggaggtaggcagagcaggacgccgctgctgccgccgccaccgccgcctccgctccagtcgcctctggtccttcaaactcacacctcccgggaggagctgtcctggcgccgggtcccgcggggaaaatggtggagccagggcaagatttactgcttgctgctttgagtgagagtggaattagtccgaatgacctctttgatattgatggtggagatgcagggcttgcaactccaatgcctaccccgtcagttcagcagtcagtgccacttagtgcattagaactaggtttggagaccgaagcagcagttcctgttaaacaagaaccagagactgtacctactccagcactattaaatgtgaggcagcagcctccatctactacaacatttgtgctgaatcaaataaatcatcttccacccttgggatctacaattgtaatgactaaaacaccacctgtaacaaccaacaggcaaaccatcactttaactaagtttatccagactactgcaagcacacgcccgtcagtctcagcaccaacagtacgaaatgccatgacctctgcaccttcaaaagaccaagttcagcttaaagatctactgaaaaataatagtcttaatgaactgatgaaactaaagccacctgctaatattgctcagccagtagcaacagcagctactgatgtaagcaatggtacagtaaagaaagagccttctaataaagaaggagctagaatgtgggataaacgacatgaaagatgaggagttttttccccaaccatggaaggttcctgttgtaaaagagatgatgaaccagaggaagaagattgaagagaaattgggtcatgccaaaacctatgcagaatacctgccaaataaaattaaaatttggcctaccgccatcccgaatgctggtaggggaaaaccaacctcctttaatccaggggttacccccctccctgaagggtttgggggaacaaaaacattccactttttctggaaggaaaacccacttggggaaaaaggggcccttggggtaaatccccccc

SEQ ID NO: 262845 - DNA, 1030 bp, Homo Sapiens
  misc_feature (730)..(730): n is a, c, g, or t
gagcgaggcctgggtggcgaattcggcacgagggggaggtaggcagagcaggacgccgctgctgccgccgccaccgccgcctccgctccagtcgcctctggtccttcaaactcacacctcccgggaggagctgtcctggcgccgggtcccgcggggaaaatggtggagccagggcaagatttactgcttgctgctttgagtgagagtggaattagtccgaatgacctctttgatattgatggtggagatgcagggcttgcaactccaatgcctaccccgtcagttcagcagtcagtgccacttagtgcattagaactaggtttggagaccgaagcagcagttcctgttaaacaagaaccagagactgtacctactccagcactattaaatgtgaggcagcagcctccatctactacaacatttgtgctgaatcaaataaatcatcttccacccttgggatctacaattgtaatgactaaaacaccacctgtaacaaccaacaggcaaaccatcactttaactaagtttatccagactactgcaagcacacgcccgtcagtctcagcaccaacagtacgaaatgccatgacctctgcaccttcaaaagaccaagttcagcttaaagatctactgaaaaataatagtcttaatgaactgatgaaactaaagccacctgctaatattgctcagccagtagcaacagcagctactgatgtaagcaatggtacangtaaagaaagagtcttctaataaagaaggagctagaatgtggataaacgacatgaagatgaggagtttttccccaaccatgaaggtccctgttggtaaagaaaatgatgcaccccgaggaagaaagatgacaaacaaatggggtccggccaaaaccctatgccaaataactgccccataacaactaaaaattggccctccgcccatcccgaggctggtagtgggagaaccgcctctttatccggcggttacccctcccgaaagtgtgtggacccgacacctcattttttggcgggaaccc

SEQ ID NO: 262846 - DNA, 1054 bp, Homo Sapiens
  misc_feature (763)..(763): n is a, c, g, or t
  misc_feature (907)..(915): n is a, c, g, or t
tcgggaactagatggccatgtcttgaagtgtgtgaaagatcagaatggcaatcacgtggttcagaaatgcattgaatgtgtacagccccagtctttgcaatttatcatcgatgcgtttaagggacaggtatttgccttatccacacatccttatggctgccgagtgattcagagaatcctggagcactgtctccctgaccagacactccctattttagaggagcttcaccagcacacagagcagcttgtacaggatcaatatggaaattatgtaatccaacatgtactggagcacggtcgtcctgaggataaaagcaaaattgtagcagaaatccgaggcaatgtacttgtattgagtcagcacaaatttgcaagcaatgttgtggagaagtgtgttactcacgcctcacgtacggagcgcgctgtgctcatcgatgaggtgtgcaccatgaacgacggtccccacagtgccttatacaccatgatgaaggaccagtatgccaactacgtggtccagaagatgattgacgtggcggagccaggcgcagtcggaagatcgtcatgcataagatccggccccacatcgcaactcttcgtaagtacacctatggcaagcacattctggccaagctggagaagtactacatgaagaacggtgttgacttagggcccatctgtggcccccctaatggtattcatctgaggcagtgttcacccgctgttccctaattcccgatgacctcacgggcccactggcaaatcncaaccagcaaccagaaatgttctagtgtagagtctgagacgggcaagtggttgctccaggattactccctcctcaaaaaaagaatcaaatccacgagtggaaaagcctttgtaatttaattttattacacataacatgtactannnnnnnnnattgactaattgccctgctgttttactggtgtataggatacttgtacataggtaaccaatgtacatgggaggccacatattttgttcactgttgtatctatatttcacatgtggaaactttcagggtggttggtttaac

SEQ ID NO: 262847 - DNA, 1437 bp, Homo Sapiens
  misc_feature (46)..(46): n is a, c, g, or t
  misc_feature (991)..(1042): n is a, c, g, or t
  misc_feature (1060)..(1118): n is a, c, g, or t
  misc_feature (1282)..(1282): n is a, c, g, or t
  misc_feature (1322)..(1353): n is a, c, g, or t
cacaaccatacgacaaaaaaatagactaccatactccctcatcctntatatgtaacgaggcctgggtggcgaattcggcacgagggcccaacatggcccagcagcatggtgatcctgctactacagcaaataacgatgtcagtttatctcagatgatgcctgatgttagcattcaacaaaccaacatggtcccccctcatgtgcaggccatgcagggaaacagtgcctcgggaaaccacttctcaggccatgggatgtctttcaatgcacctttcagtggagctcccaatggaaatcagatgtcctgtggtcaaaatccaggcttcccagtcaataaggatgtcacgctaacgagcccattgttggtcaacttattgcagagtgacatatctgcaggccattttggggtaaacaataagcaaaataataccaacgcaaataaaccgaagaagaagaaaccccctcggaagaagaaaaatagtcagcaagatctaaacaccccagatactcgcccagctggtctggaagaggctgatcagccaccgttgcctggagaacaaggaattaacttggataactcaggccctaaactgccagaattttcaaaccggccaccaggttatccttctcaaccagtttgaacagaagcccacttcccgcagatgccctcctcaactcatgccagcatgtgggcaccccccacccactagccccctaataggcaagcaggcccacagcccctacaaactggccctctagccatccagccaagcccaaacatccttccgcaattccgaccccacatgatttttcagaccatctacaccatgccaacgcaagccaagccaacacaaaatgtgaattcctctgaaattgcctcaccatggcaatggaaaggccaatgggtaattacccaaaaaaaatccacactttttaaagaggatatttgttccccatggattaacgccccttccacaaacgaatttgggtnnnnnnnnnnnnnnnnnnnnnnnnnnnnnnnnnnnnnnnnnnnnnnnnnnnnaccacctcccttgggggnnnnnnnnnnnnnnnnnnnnnnnnnnnnnnnnnnnnnnnnnnnnnnnnnnnnnnnnnnntaattggcgcccccccaaatttgaggccccctacacaccggtaaaacaaaagtgtagggggtccataacaacacgcggggagggggccccccttggcggaattacatatcaggggaggggcccccacaacccatcccctatgtgcgcccaacaaggggggaagnacacctttgtgggcctcccttctctcggggctgtgggggnnnnnnnnnnnnnnnnnnnnnnnnnnnnnnnnggtaggtgctcattattataactcccccccgccatgataacacgtgggggggcccttcatgattgggcccccctccgggtagtg

SEQ ID NO: 262848 - DNA, 1083 bp, Homo Sapiens
  misc_feature (711)..(711): n is a, c, g, or t
  misc_feature (879)..(880): n is a, c, g, or t
  misc_feature (934)..(934): n is a, c, g, or t
  misc_feature (942)..(942): n is a, c, g, or t
  misc_feature (1013)..(1013): n is a, c, g, or t
taggtagcgaggcctgggtggcgaattcggcacgaggccatcactgaactgggagagaaggcccgaaagaatgaacttgccattgaagatatggatggcggtaccttcaccattagcaatggaggcgtttttggctcgctctttggaacacccattatcaacccccctcagtctgccatcctggggatgcatggcatctttgacaggccagtggctataggaggcaaggtagaggtgcggcccatgatgtacgtggcactgacctatgatcaccggctgattgatggcagagaggctgtgactttcctccgcaaaatcaaggcagcggtagaggatcccagagtcctcctcctggatctttaggaggaacccacacaccctacaagttgatcatgcaggaactgaaaaccagtcttctccctgtcccctcatgggtcccgggttagcctggtgacaggcagacacatgctgttggcctcaagcaaggaagcagagcactgtgtaaccagcagtcacaggtcttttcttggcgttcctgccaggctctccctctctgcacctgtctcatagcctcgaatatcttaattccttaggcttaagagagagagccttaatggatgctcattcatattcctgcctttcttccatcagctctctgcaaagatgattttgcttttccctagtgctggtatactatagagaaacccctgnggacaaatgtgattaagttcctatctttttgaaagtttgttctgcagagacttctaaggaagatgctgtgccccccaagctcagagcagcctctggcctggctgtgcacattctcccttgattcccactttgtgtggagggattgaacaccaggcaaaagaggtgctnngctttgcttcttccatgggcaactttcatttctccgtttgtcatttgactttcnagatgccntctttctacccctcttcaagaaagcaccagggcaagggggaatctggggttgtggttaaatgggggagggnaaaaaggcaaaaagggtccccctgaaaggccatggcattgggtaaatccctccctatagaaggggaaaaa

SEQ ID NO: 262849 - DNA, 1091 bp, Homo Sapiens
  misc_feature (930)..(930): n is a, c, g, or t
ggcctgggtggcgaattcggcacgaggccaaagcattccgaccttctacttccctagaggacgcccgcaggactccgtcaacgtggatgccgtcatcagcaagatcgagagcaccttcgcccggttcccccacgagagggccaccatggacgacatgggcctggtggccaaggcctgcggctgccccctctactggaaggggccgctcttctatggcgccggcggggagcgcacgggctccgtgtccgtccacaagttcgtcgccatgtggagaaaaatcctccagaactgccacgacgacgcggccaagttcgtccatctgctcatgagccccggctgcaactacctggtgcaggaggactttgtccccttcttgcaggacgtggtgaacacgcacccggggctgtcgttcctgaaggaggcgtccgagttccactcgcgctacatcaccacggtcatccagcggatcttctacgccgtgaaccggtcctggtccggcaggatcacctgcgccgagctgcggaggagctccttcctgcagaatgtggcgctgctggaggaggaggcggacatcaaccagctgaccgaattcttctcgtacgagcatttctacgtcatctactgcaagttctgggagctggacacggaccacgacctgctcatcgacgcggacgacctggcgcggcacaatgaccacgccctttctaccaagatgatagacaggatcttctcaggagcagtcacacgaggcagaaaagtgcagaaggaaaggaagatcacctatgccgactttgggctgggtttttgatctctgaagaagacaaaaaaacaccgacccagcatcggagtacctgggttcccctgcatggaacctgggaccgggaaccgcgcccctggtccatggtttaaaacttccagaactttcttacnaagagaccattggcccaaagggctggaaacaacatggggccattccaagggccccgggcccctttcaaagaaatgcgcctcctgccccaaaaggcctggacacctggttcccaccccccacaggaatctttacaggggaaaaaaatctctcgcctcgccca

SEQ ID NO: 262850 - DNA, 1016 bp, Homo Sapiens
ccctctcctccagcgcccccccccactccaccccataaccaggcctgggtggcgaattcggcacgaggctcaagacaaggggcatctttgaaaccaagttcttgtctcagattgagagtgactgcctggccctgctgcaagtccgagccatcctgcaacacttagggcttgagagcacctgtgacgacagcatcattgttaaggaggtgtgcactgtggtggcccggcgggcagcccagctctgtggcgcaggcatggccgctgtggtggacaggatacgagaaaaccgtgggctggacgctctcaaagtgacagtgggtgtggatgggaccctctacaagctacatcctcactttgccaaagtcatgcatgagacagtgaaggacctggctccgaaatgtgatgtgtctttcctgcagtcagaggatggcagcgggaagggggcggcgctcatcactgctgtggcctgccgcatccgtgaggctggacagcgatagaacccctgaaatcggaagggacttcctctttctctccttcttccctgttttaaattataagatgtcatccccttgtgtcagagacagaccccttggcttttgcttggcagagaggaccccactggactgggttttgtctctgcatctcattgtagagcttggtggctgagcttggccctattaagataaatagagttccaaataaggatttgttcacatgcatcataaccattcccattggttctcctaaaacatgaaaatgatctcccttagtaatcccccttgccaattccatgtccctgaataattctacaggatggggacactaatgaagatacgggtggcttcaccttggagcccgaacatgacattttctaagtgggggtgcatcccccagcactgatgttggtactgattctcctgtcagaagatctgggaagtctccactggaggatgtgagcctgattatcctataagcaaactggggaaaagggtggaagggttacaagggggaggaac

SEQ ID NO: 262851 - DNA, 1007 bp, Homo Sapiens
gcctgggtggcgaattcggcacgaggcccggaccttgcagaattggaagttctggattttcagcatcatcatcaagccgctgtttgagtcgttcaagggcatggtgtccaccagcagcctggaggagctgcaccggacggcgctctcctggctggaccagcactgctccctgcccatcctcaggccgatggtattgagcacgctgcggcagctgagcacctccacctccatcctcacagacccggcacagctgccagagcaggcgtccaaggctgtcaccaggattggcaagagattgggagagtcctagctgcttagctggcatgtggccgcatgagatgccaggagacccttccctgcccatggagagtaggctgcgccccccagcccttcctgacgctcagcctcggggcctctctccaactctgccggcccaccgtggcatcgggaggccatgctcaggtctgaagcaggtttggggcctgctgacagcaatagcccgcctttgggaaccccttgctgtgaactctctcactcagtgacctcagtcaccaacctcctctgccctcggggcagcccacacaaaagggaagtgctggccgtgctggtcctgccctgctggtggcctgccgggcctggcgccggtgagcggaatcgatgggatgagggtgacagggcctgctcctgtcctgaggcccagccttgtccctcctgccacgtcctgtccacatgcatgcctctgcctgatgccctgctccactctctgggcctgcccgtggggcaatttggaaacgcccttttctttctccccccaactctggaagaacccgccccttggtggatggactcggggctcctacttctcgttcatcgcctgcccatctttgcccagggcgacagtacctcttcgtagagagtgcccccccggcagaattggcgcaagaaaagcgagtggcgcgcgtacgccacacggcaccttaacttgcagcgatccggatgatcccttc

SEQ ID NO: 262852 - DNA, 1236 bp, Homo Sapiens
  misc_feature (536)..(557): n is a, c, g, or t
  misc_feature (589)..(652): n is a, c, g, or t
agagagggatcggggtaagaaacagcgcggtcgggcgcggtggaacgagggtgcggatgaggacgagggcataccgagagacgcgcgggcagcgcagcatgatgggaatagtaactaggacgacacacgtagcagtgggcgcgccgggcgcgtacggcgggaaggacaaacacgcgggacgaaatgtatggggagacgagtggtgatgcagatgacgggcggacggcctgaaggcgacttggctggagtgcacggaggctgtatcggttagtgggcacgagcccgcgcgcggtggcgtaccgaggcactaggagcgtggcaccgcgagagcggtcaggtgcaaggcgggcgacccgacagagtaacgggcaagacagcgagtgtaccacgcggctggagaggtattcgcgcacagcggttgatagcggacggccttcgaggtaattgggattgcggggcgaagggtgtacaagatattgagggcggcggtgaccggggtacgtagtgagggttcgtgttgcgggccataggacaannnnnnnnnnnnnnnnnnnnnnaaccaggatgaggccgtaaggtgggcgaggcnnnnnnnnnnnnnnnnnnnnnnnnnnnnnnnnnnnnnnnnnnnnnnnnnnnnnnnnnnnnnnnngcggatgacgaggcgagcggctggagtaggccggagccggccggaggggggtcgcgacccgggtagggtcaacgtaaggcgggcgcggcagctggttgggcagagccggccatgctatgggggcagcatcgggaccggcgagaactcgtagcggtacgaggggtcggcggggggtgtaaggggaagctcgtgcgcagccccgaaggacggctgcaggtgcgtcttctgcggcgtcagccccaagctgggatgcgggggcggcagtgcgcctggcgagtgcgccggcatgtcggcggtccacgggtggaagagcctggagggtgagcccagcgcggggtcgtagggcacctgcaggaagtccgggggcgccgccgcgcccggctggccgatgcggctacaggtggcggccagcaatgccaggggcgagtgcttgcccaggtccggggaggcgctgggggtgcggtcctgcataggcggcgagggagggcggagaagagacaaaaggttagctcctcgtgctgagtcgccacccgggccgtgaagaggggggaggtgcggaacggtagaccgcgccagccaaaaag

SEQ ID NO: 262853 - DNA, 936 bp, Homo Sapiens
  misc_feature (694)..(697): n is a, c, g, or t
  misc_feature (699)..(705): n is a, c, g, or t
  misc_feature (707)..(710): n is a, c, g, or t
  misc_feature (722)..(760): n is a, c, g, or t
ggcctgggtggcgaattcggcacgaggaggaggtggccaccctgagcaaggaactcctgcaattcacggcatccaagattccttacagcctccggcggctcacagggctagaagtccagaacatgtatgtgggaccccagaccatcccagccaccccccatcttcctggcctctttggcagctccaccctgtccccccaccccacaaaggggggctacgcagtcactgacttcctcacctacaactgcctcacgaatgacacagacctgtacagcgactgtctccgaaccttctggacctgcccccactgtggcctgcatgcgcccctcacacccctggagcgcatcgcccatgagaacacctgcccccaggccccacaggatgggcccccaggggctgaggaagctgccctcgaaaccctccagaagacatctgtcctgcagaggccctaccactgcgaggcctgcgggaaggacttcctctttacacccacagaggtgctgcgccaccggaagcagcacgtgtgagctgggccaggagccctgcccacctccgtgcagctgacctgccctccagcccaggactaggggcaggactcttgcctgaacccccagcctgggcttagccctgtggtcctgtcccagtgcagagggcctggagcacggattgtgaataaagcctcacatgctgaaannnnannnnnnnannnnaaactcgaggcnnnnnnnnnnnnnnnnnnnnnnnnnnnnnnnnnnnnnnncatggccatagctggtttcctgaaccaagctttcctgaacaaaatgggaaaaatctggccggtctcccctaaagggagtcggtattaaatttccaaaaggccaggggtaacccggcataaaaggaaaccggttgcaggaacccgggggaatttaaacccgcccatatgaaacgggg

SEQ ID NO: 262854 - DNA, 1356 bp, Homo Sapiens
gagcgaggcctgggtggcgctgcgttctgtggtggggataagcagacccttccagatcccgcctggctccttgagggaggacccactgggtgaagcacagccacagatctgagccaggatgggagtgaatcccaggcggaggccagagctggcagccagctctgcctttccactgccgggagtgctgggggcccagcctggccccctgaagagacagccaagtgtcgtccacatactcctcccagagtgagctctaaccaggctcatttgctctctccactactcatctctggaattagccgcttaaatacaggtttttgttgctgagatgtgagtgaaaccagctagtgtgtcaacagtgaagacctggggacagttctgcgtctcatttctggattcctaccccctcttctagtcttgcccaagtagtcctgccaggcacatgccccatttggcacaggcctgcattcttgtcgtgccgtcctgggcctcaggctgtctgggaggggagatgctcacatttgtacaggctacatagactggtgcaagcagtgctggattccaggagtcttggcatctcatagcttgtccccgtgaggagtgagcagagggtctgggatttctgctttcagcaaaagcagtctgactcagtgggcagaatggaggggcccctctagccaggctcttacgccatggttatgagcaggttgatgagggtccttcggccagcacaaccttcctccctactcacggcatggagtctgactgcatggaagttccagatcctgacagagagaactgggaaggatccaggttcgcttccgttggtagcttgagtcccatgcctccaccctgccatctgaggaaggggtgacaagtggtcaaggagctgtggccacagacttttccagggtggtccttggcaggttaggtgcgtctgtgccacacttgtcaggagccattgacgacggcacccctttggacaccttgggacctcagagtgggggcaggcagaagggagaaccagctcaagacattttggaggatctggccctggggttcttcagagaacacctctaggggctttgggacatggcctgtccccacatccagcaattgcctccgccatggtcactcggcagcccttttcccaggagaagacacctctgggagcctgctcagtgattgtcctgccatcctgtgtcctgggactgagggttactccagttgctctgtgttgcatactctcccctgcaagcctgtgtatgaagaattgtcccctgagcttccagacaggcatggatagatgttttgtaactgttacattgtgcaggggtaattattagagtggctttt

SEQ ID NO: 262855 - DNA, 440 bp, Homo Sapiens
  misc_feature (50)..(66): n is a, c, g, or t
caggttaggtgcgtctgtgccacccttgtcaggagccattgacgacgggnnnnnnnnnnnnnnnnngggacctcagagtgggggcaggcagaagggagaaccagctcaagacattttggaggatctggccctggggttcttcagagaacaccctctaggggctttggggacatggcctgtccccacatccagcacttgcctccgccatggtcactcggcagcccttttcccaggagaagacacctctgggagcctgctcagtgcttgtcctgccatcctgtgtcctgggactgagggttactccagttgctctgtgttgcatactctcccccgcaagcctgtgtatgaagaattgtcccctgcttccagcaggccatggctggctgttttgtgactgttacattgtgcaggggtaattattagcgtggcttttacaaaaa

SEQ ID NO: 262856 - DNA, 993 bp, Homo Sapiens
gtagcgaggcctgggtggcgaattcggcacgaggctcacttcctggggtcatgaccatcgggcctggtgagcctgcctccctgggtcctacgttcaccaacacaggtgcctccaccctggtcatcggcctggcctccacgcaggcacagagtgtgccggtcatcaacagcatgggcagcagcctgaccaccctgcagcccgtccagttctcccagccgctgcacccctcctaccagcagccgctcatgccacctgtgcagagccatgtgacccagagccccttcatggccaccatggctcagctgcagagcccccacgccctctacagccacaagcccgaggtggcccagtacacccacacgggcctgctcccgcagactatgctcatcaccgacaccaccaacctgagcgccctggccagcctcacgcccaccaagcaggtcttcacctcagacactgaggcctccagtgagtccgggcttcacacgccggcatctcaggccaccaccctccacgtccccagccaggaccctgccggcatccagcacctgcagccggcccaccggctcaggcgccagccccacagtgtcctccagcagcctgggtgctgttaccagagcttcagactccagcaatggccagagccacctgctgccatccaaccacagcgtcatcgagaccttcatctccacccagatggcctcttcctcccagtaaccacggcacctgggccctggggcctgtactgcctgcttggggggtgatgagggcagcagcccaccctgcctggaagacctgagcctgccgagcaaccgtggccccttcctggacagctgtggcctcgctcccccattctggctctgatgcatcagaaaaggggagggcttcttgaagcgcccccaaacccgtgggaaggctggctccgggggtgcacaaggaaggggggggcccgtggaaaacctagggaggccaaaccccttgttccactgtaaa

SEQ ID NO: 262857 - DNA, 1368 bp, Homo Sapiens
  misc_feature (330)..(330): n is a, c, g, or t
  misc_feature (397)..(397): n is a, c, g, or t
  misc_feature (1310)..(1310): n is a, c, g, or t
aaggaagcgaggcctgggtggcgaattcggcacgaggcttgcatttccccatgctccccaccccctggcaaaaggctggccatgctctgttcccagcagccgcgcaggtttccccactggctgcaatggccctaccaaaagccatgttgcatatccgttgtaagcacgtgccctgtgccctgtccccattccttatgccctaggaggccaagctggtgtctctaggagggcccacacaggcaccctggatcccccagagagtagattggtgtgctcaggccgcaggctgactcagaggtagggcagtgggctctgcaggccacctggctnggggttggtgggggtcctctctcctgccccagcttccactcagccaccacagttgccacaccatggnggtggagacgtgggtcaccacgggcttgggagcaagcgccttctgcagcacaggaagccgaagctggggtcaggtgaggtcgctacccctggaggtctggcataagggccccaccctcaggtctcctacactggccccattttactttggggtccaaggacaggatggtcaacagggcagggtggacagcgtgccagcgccgcgcagggccacctccctgggtggatgcatcacactaaggaagtgagtgccaaggggaatttagtggtgtgggttctttcaaagggaaggtcaggggtcaatggaaatctggctcggacactcaacatggggggtgggtgcactccttggaggaggaggaacacgtttcaaggggattgtgagggcttgcacaagccacgtggggcaccttggcttcccggcaggagggggacacccagccagaggcctggctcaaggtgacctcaccttcaccatggggcttcctggggggcgcgggccctgaacgcaaggttgttttggacatattggaatatgtgttaacttatgccccgcatcccaactcacacggaagcacgggtcttgtctcagtctcttcgctgcatttggaaagcagtctcctctcgggccagcgccgggctgaggtgtccagaggcggcggcagctggcagtgccctcagcccccaagtgtccagcctggcacttcccattcaggccacctgctttgggtcaacagttcctttgccagcagcatctcctaaattgtaaggactctgtccaccggggccctcccagggctgtgaggacggaaacaggcagggagtggagctaacagcttagtcaccaggacccccagacctgcaaacgtcccctcctggaaggggaagccaggaacagcagaactgcccacaanacaaggctgtgaacttttcgggaactggaactgtttaacttgaacccaggattgttta

SEQ ID NO: 262858 - DNA, 1019 bp, Homo Sapiens
ggcctgggtggcaattcggacgagggttgcggtctacaggaggccggagtcaccggcctgagaaggagtggcctattaagagtctcaaagtctacctgggagtgaagaagaaactcaggccacccacctgctggggcttcacagtggtgcatgagacagagaaacatgagaagcagcagtggtacctctgctgtgacacacagatggagctccgggagtggttcgctacctttctgtttgtgcagcatgacggcctggtgtggccctcagagccctcacgcgtgtcccgggcagtgcctgaggtccggctgggtagtgtgtcactgatcccccttcgaggtagtgaaaatgaaatgcgccggagtgtggctgccttcaccgcggaccctctgtctcttctgcgcaacgtctgagcacaggagcccatccttggctctaggattccgccgctggaagccttctgttcagacaccccttatgctccaaggcctgatgtgagccagcggggggtgcatgggaaactgcaccccacaacccacatcctccatcctgactgcagcatggggttccccggcaggggtgggaggcagcaggggtcagcctgggcaggaacctctcccaactctgtccaggtgttcagacctcttggcccaacctgctcaccccaccgggttcactgtccttgtggggctggagagatgggcataagtcaggaacttgggaggaccaccaccctctcagaggcgtgaggccctggggcccctgccggaggggagccccctgctcctcccaacaaactccaaaacagcagaaagggggggctgtaaaggaccactccactccccggggaggggagctcttggctgagtcttctaaagggctgaaaaactgcggctttggggaatttaagctttccttccatattggggtttgaatgggggggtcccaacatacccgttgccccccctccccaatctgggggacctcttgcattaattaacacccacatggcaccactc

SEQ ID NO: 262859 - DNA, 872 bp, Homo Sapiens
  misc_feature (651)..(719): n is a, c, g, or t
gggtgagccaccgcgcctggccagtgatccagttctattacacctgggtgtggactcatgccacgactgatttgcttctaccctttagcttttctagtgccttagtttccttgcctagaatatcctgcctgccatagctgattcgttttcttaaaacccgtactcgctcattcattcaggaaacctcttcctgaaaattccacaaaaatctaattattctttgtattctagcattacccgagccatagttttcaataggtgtttgcactttttaaaaaattgcattattttctaaaaattattttgtttttgtctgtttacttgatttaaagacaccatttttgtttaccatgtctagtacactgacacagtggatgctcaatacttggtttgttgaaagttaagtagaatgtaagttcttacaggccaaagaccaggtagatgtttattcatagcaaaaaaagtattgtgttaaaagtttgctggctaactgtaagtcgagtattttcctaactatacagacctagtcaaagccgagaacggccccccgtgtctcggccacccctctccgccccttctctcggcttctggccgcccctcccccggcttggcgctccccactttctgtccccattcaagccactcaccttnnnnnnnnnnnnnnnnnnnnnnnnnnnnnnnnnnnnnnnnnnnnnnnnnnnnnnnnnnnnnnnnnnnnntcacgttttcctacctccctccattgccacccgctctcatcccgcccgcctcgttccctcccaacacacgcacactttgccgcaccccctcatttctgccgcttacctactctccctgcgtacgacctccctacgcgcccgagtcgaatcccc

SEQ ID NO: 262860 - DNA, 1678 bp, Homo Sapiens
  misc_feature (53)..(53): n is a, c, g, or t
  misc_feature (475)..(475): n is a, c, g, or t
ggcgctcacacgacacccactaagacgcgtgccggcctgggccgttctctatncatagagggtggtatatcatattgtgtcgttcgggtgagtctagcgtgcgcgccgttcgtggtctgtaattgtgtcgccgggcgacgcctgatgccgctgttgggtctctgactacgataagtaggagccccgccgtttaaataggggcggcgtgttaggagcgtgtccacccgcctcgtggaagtagggaaggattaggtggtgagcgagaatagaacggtggagaccggcgtgcgcgcattctgcgtccctcttttttggccccccccgcccataagataacccgcggcggacaaagcgagggggtcgttcgggcaacgggccatagcccattcgcatttgccgatacgttttattcgccccccgggcagtggggccgttcgaggcattagatcgggcgccagctgctgtatggtttttnttcaacggggtcttcctgtaggtgacccctgagttaaagtatttattttcacgctgcaactgctgatcacttttacagagacatatcatgctgtagctctgcatggagctgaagacaaaagcaacatttttattaatgttataattattataattatctttaacaaagctattaaataacctgtacaaagcccaaaccggtcctagcgaaaacccgagcactgtttcaaatctcccaagttcctttctattcagttcagcagcatttcctatataaaaggccagacccagggtggtcccccgaaactgtaggtctccctgaccggtgggaacggtttagagtttggaacccgccctggcgtacggcagagctcccaattacaatccaaatgccccagccccaaccctacctccccgctcctgggaactgggtccctatgtccgaaggcagcggaagttggaagcctggctccattttgggaggcaggcaacggagagggtccgtctgctgagtctcccctccgccagctgcccacaggtccccggatctctcgcagaggtgctgggaagggggtccacctccgggagggctcacaggtcccgcgcgtcctcccgcttaaccccggcctcagcgactttgagcttcttattctggtgagtcttgacgtgcttcgcgaggtggtcgctgcgcatgaagcgcttgccgcactcgggacaggcaaagcgcttctcgcccgtgtgagtccgcaggtgccgctgcagctcgtccgagcgcgtgaagctcttcccgcagaagagccagttgcacacgaagggtcgctcgcccgtgtgccagcgcaggtgcgccttcaggtgcgacgtcttcccgtacaccttgccgcagcccggcacgtggcacacgtgctgcttcttcttccccggctccgcctcgggggcgccgcccgccgcctggcagttgggacagcggcagcggcggcacctcctggccgtggccgccaggggggccttggtctgcagcagcgcggcgatctggctctggtactgcgcaaagtccgacgggcccaacaccaggcctctttgtagggcggcggcggccgcagcagcagcggccgcagaggcggggaagcggggcgcgtggggggccccggcacaggcgccggagaggccgcttcccggaaccctcgtgccgaattcgccacccagc

SEQ ID NO: 262861 - DNA, 969 bp, Homo Sapiens
gctgggtggcgaattcggcacgaggcctagaggagctccttgatgtcttgcagtctctgccccctgcctggaggaactgtgtcagtgccacagaggaggaggtcaccccccagcaccggctctggccattgctggaaaaagactcatccttggaggctcgccagttcttctaccttcgggcgttcctggttgaaggcccttccacctgcctcgtatccctgttgctgactccgtccaccctgttcctgttagatgaggatgctgcagggtccccggcagagccctctcctccagcagcatctggcgaagcctctgagaaggtgcctccctcggggccgggccctgctgtgcgtgtcagggagcagcagccactcagcagcctgagctccgtgctgctctaccgctcagcccctgaggacttgcggctgctcttctacgatgaggtgtcccggctggagagcttttgggcactccgtgtggtgtgtcaggagcagctgacagccctgcttgcctggatccgggaaccatgggaggagctgttttccatcggactccggacagtgatccaagaggcgctggcccttgaccgatgagggtcccacgctgaccttggccctgacctcaggagccacgctgtagacattccctctcctggtctctgggtctggcttccaggctctggctgtggatgtcttcagcctctgggtgctggccagtgaggtcccaaatgacccaaggccttaagggagaaggcgagagaatgatctggccctcagggggacaggcccacctggtcaggaaggaaaatttttccctgcacctttttctcagggtatcaaataagttgttttccaactcctaagggacctcgctaccaccaaaatccgagggattttatggacggggggcgcgaaaaagaaggtaatggaaatggccctgtgcccattgcccggtttcctgtgataccct

SEQ ID NO: 262862 - DNA, 866 bp, Homo Sapiens
ggcctgggtggcgaattcggcacgaggcctagaggagctccttgatgtcttgcagtctctgccccctgcctggaggaactgtgtcagtgccacagaggaggaggtcaccccccagcaccggctctggccattgctggaaaaagactcatccttggaggctcgccagttcttctaccttcgggcgttcctggttgaaggcccttccacctgcctcgtatccctgttgctgactccgtccaccctgttcctgttagatgaggatgctgcagggtccccggcagagccctctcctccagcagcatctggcgaagcctctgagaaggtgcctccctcggggccgggccctgctgtgcgtgtcagggagcagcagccactcagcagcctgagctccgtgctgctctaccgctcagcccctgaggacttgcggctgctcttctacgatgaggtgtcccggctggagagcttttgggcactccgtgtggtgtgtcaggagcagctgacagccctgcttgcctggatccgggaaccatgggaggagctgttttccatcggactccggacagtgatccaagaggcgctggcccttgaccgatgagggtcccacgctgaccttggccctgacctcaggagccacgctgtagacattccctctcctggtctctgggtctggcttccaggctctggctgtggatgtcttcagcctctgggtgctggccagtgaggtcccaaatgacccagggcttaagggagaggcgagagaatgatctggcctcaggggacaggccacctggtcaggaggaatatttttccctgcactttttctcagggatcaataaaaggtggtttcccacctctttaaaagggcc

SEQ ID NO: 262863 - DNA, 959 bp, Homo Sapiens
ggcctgggtggcgaattcggcacgagggaggctcctgccctcccaaagacagctgctcagctcaagaaagaggcaaagaaacgggagaagctagagaaattccaacagaagcagaagatccaacagcagcagccacctccaggggagaagaaaccaaaaccagagaagagggagaaacgggatcctggggtcattacctatgacctcccaaccccacccggggaaaagaaagatgtcagtggccccatgcccgactcctacagccctcggtatgtggaggctgcctggtacccttggtgggagcagcagggcttcttcaagccagagtatgggcgtcctaatgtgtcagcagcaaatccccgaggtgtcttcatgatgtgcatcccaccccccaatgtgacaggctccctgcacctgggccatgcactcaccaacgccatccaggactccctgactcgatggcaccgcatgcgtggggagaccaccctgtggaaccctggctgtgaccatgcaggtattgccacccaggtggtggtggagaagaagctatggcgtgagcagggactgagccggcaccagctgggccgcgaggcctttctacaggaagtctggaagtggaaggaggagaaaggtgaccggatttaccaccagttgaagaagcttggcagctccttggactgggatcgagcctgtttcaccatggaccctaaactctcagcagctgggacagagggctttgtccggcttcacgaggaaggcatcatctatcgcagtacccgcccttgttaactgggtcccggcaccctcaactccgccatctctgaaattgaggggggaaaaaaaggagctgacagggtcgcaccctgggtcctcggggcctggcttacaagggagaaggggggagttccgggggccctccggggcccttttccctataaaggggccagggcttccaaaag

SEQ ID NO: 262864 - DNA, 1067 bp, Homo Sapiens
  misc_feature (85)..(94): n is a, c, g, or t
  misc_feature (728)..(749): n is a, c, g, or t
  misc_feature (883)..(895): n is a, c, g, or t
gaaaaatccgggccgataaaccggcggggtggatataataacagagggagataggtgggggaagggacatataacggggtaattnnnnnnnnnnaaaagacccaaccatcccccttttgcggcaacgcggtaaaagaatggttaaaaatgtggggacagccgttgttaaacattggggggggtgggtataaaaaccaatggggttcatttcccatcatgaaaaaggggggaaggttgtgcatcgaaattagtgggaagcgctcccagatttaggttagggccccaacggggcagacacggcggggtcattcatgcttggtccgaaaagcagaacgcggggcaggatcaactgagaaatccctggtgctcttttccatgaagatctggcactgggccatgaaaggagccagcatgtctgggttgccatcgaacttctatgggaggtcttctgggcactcttcctatattggagggggtggggcagcagctgctgcagcaacgcgaagctcgatgtcataaccctcatcctaaggggtgggttcccacttgctctcgaagggtggtgttctcctctgtgaagcttctgcacctggctctgcaggttgttgttctcctccgactgcttcatgaccttctctcttaagttgttgatctcttcagagagctcgtcccttcttcgttcggtcatgttggggacacacgcactcttatggccggtgtgcttggannnnnnnnnnnnnnnnnnnnnngggggagggggaggaggaggaggtgggcagtcgggacccagggtgacggttggggtgggaggagacctcccagctgtagcttcacttctgtggggatggaggcctggatcctggccccctcttccactccttcnnnnnnnnnnnnncaaaacccgcttatttcacgcgaggactcctctgcgaagacaggaaggatggggtcccacacctgagccaggcgcggtctccactgggtgctccgcagcccggagtggctccggacgacagcccgctcagcggacctttcgccaggctcggtggaccttctccgctgttctc

SEQ ID NO: 262865 - DNA, 1159 bp, Homo Sapiens
gctccctctccaccccctgcttatcgccccgccgacctgcgtggcgaattcggcacgagggttctcttggctgcaaataaggacagcagctggtgccccacctgcctggtgcattgctgtgtgaatccaggaggcagtggacatcgtaggcagccacggccccgggtccaggagaagtgctccctggaggcacgcaccactgcttcccactggggccggcggggcccacgcacgacgtcagcctcttaccttcccgcctcggctaggggtcctcgggatgccgttctgttccaacctcctgctctgggacgtggacatgcctcaaggatacagggagccggcggcctctcgacggcacgcacttgcctgttggctgctgcggctgtgggcgagcatgggggctgccagcgtctgttgtggaaagtagctgctagtgaaatggctggggccgctggggtccgtcttcacactgcgcaggtctcttctgggcgtctgagctggggtgggagctcctccgcagaaggttggtggggggtccagtctgtgatccttggtgctgtgtgccccactccagcctggggaccccacttcagaaggtaggggccgtgtcccgcggtgctgactgaggcctgcttccccctccccctcctgctgtgctggaattccacagggaccagggccaccgcaggggactgtctcagaagacttgatttttccgtccctttttctccacactccactgacaaacgtccccagcggtttccacttgtgggcttcaggtgttttcaagcacaacccaccacaacaagcaagtgcattttcagtcgttgtgcttttttgttttgtgctaacgtcttactaatttaaagatgctgtcggcaccatgtttatttatttccagtggtcatgctcagccttgctgctctgcgtggcgcaggtgccatgcctgctccctgtctgtgtcccagccacgcagggccatccactgtgacgtcggccgaccaggctggacaccctctgccgagtaatgacgtgtgtggctgggaccttctttattctgtgttaatggctaacctgttacactgggctgggttgggtagggtgttctggcttttttgtggggtttttatttttaaagaaacactcaatcatcctaaaa

SEQ ID NO: 262866 - DNA, 772 bp, Homo Sapiens
accagatgtccgtctctcttgcttgaggaatgaagacctttattcacccctgccccgttgcttcccgctgcacatggacagacttcacagcgtctgctcataggacctgcatccttcctggggacgaattccactcgtccaagggacagcccacggtctggaggccgaggaccaccagcaggcaggtggactgactgtgttgggcaagacctcttccctctgggcctgttctcttggctgcaaataaggacagcagctggtgccccacctgcctggtgcattgctgtgtgaatccagggaggcagtggacatcgtagggcagccacggccccgggtccagggagaagtgctccctggaggcacgcaccactgcttcccactggggcccggcggggcccacgcacgacgtcagcctcttaccttcccgcctcggctaggggtcctcgggatgccgttctgttccaacctcctgctctgggacgtggacatgcctcaaggatacagggagccggcggcctctcgacggcacgcacttgcctgttggctgctgcggctgtgggcgagcatgggggctgccagcgtctgttgtggaaagtagctgctagtgaaatggctggggccgctggggtccgtcttcacactgcgcaggtctcttctgggcgtctgagctggggtgggagctcctccgcagaagttggtgggggggtccagtctgtgatccttggtgctgtgtgccccactccagcctggggaccccacttcagaaggaagg

SEQ ID NO: 262867 - DNA, 1553 bp, Homo Sapiens
  misc_feature (1016)..(1134): n is a, c, g, or t
  misc_feature (1267)..(1283): n is a, c, g, or t
  misc_feature (1295)..(1352): n is a, c, g, or t
  misc_feature (1359)..(1421): n is a, c, g, or t
  misc_feature (1438)..(1507): n is a, c, g, or t
gcacgagcgggacggtcctcacgtggctgggcgcaaacacacccagctgcgagggctgggtggcgaattcggcacgagggtggccggtcctcctccagcaagagcacaggctccctagggggccgtgtggctggggggcttttgggcagtggtactcgggcctcccctgacagcagctcctgtggggagcgctcaccaccacccccgcctccacctccttcggatgaggccctgctgcactgtgtcctggaaggaaagctccgagaccgggaggcagagcttcagcagctgcgggacagtctggacgagaatgaggctaccatgtgccaggcatacgaggagcggcagcggcactggcagcgagagcgtgaggccctgcgagaggactgtgcggcccaggcacagcgggcacagcgggcccaacagctgctgcagctgcaggtgttccacctgcagcaggagaagcggcaattgcaggacgacttcgcacagctgctgcaggagcgcgaacagctggagcggcgctgcgccaccttggagcgggagcagcgggagctcgggccgaggcttgaggagaccaagtgggaggtgtgccagaaatcaggcgagatctccctgctgaagcagcagctgaaagagtctcaggcagagctggtgcagaagggcagcgagctggtggctctgcgggtggcgctgcgggaggcccgtgctacgctgcgggtcagtgagggccgtgcgcggggtctacaggaggccgcccgagctcgggagctggagctggaagcctgttcccaggagctgcagcgacaccgccaagaagctgagcagctgcgggaagaaagctgggcagttggatgctgaggcgggccggactccgggagccccctgtgccaccctgccaccgctgacccattcctccctggcagaaaagtgatgaggccaaagtgcaccgggcagcagccggggctgggggcatcttgcgggcccaggtggagcgattgccgggggagccgcannnnnnnnnnnnnnnnnnnnnnnnnnnnnnnnnnnnnnnnnnnnnnnnnnnnnnnnnnnnnnnnnnnnnnnnnnnnnnnnnnnnnnnnnnnnnnnnnnnnnnnnnnnnnnnnnnnnnnnactcccgtcctattcctctcaacctccccattgctcactctcgactccgccggcccctattcccttcccgcccccacctttttaccaccctctccacccacgtctccctccccgaccccgcggagttctgtgnnnnnnnnnnnnnnnnntctctcccgagnnnnnnnnnnnnnnnnnnnnnnnnnnnnnnnnnnnnnnnnnnnnnnnnnnnnnnnnnngttgctnnnnnnnnnnnnnnnnnnnnnnnnnnnnnnnnnnnnnnnnnnnnnnnnnnnnnnnnnnnnnnngtttcctatcgtttctnnnnnnnnnnnnnnnnnnnnnnnnnnnnnnnnnnnnnnnnnnnnnnnnnnnnnnnnnnnnnnnnnnnnnngtcggtctccgcagtctcttccgcgtcgccccacgtattccgcccg

SEQ ID NO: 262868 - DNA, 1667 bp, Homo Sapiens
  misc_feature (196)..(256): n is a, c, g, or t
ggcctgggtggcgaattcggcacgaggctgtcccccgtttcctttccgccttgtctctggattcagtggttcaacacctgtgtcctctctgtgttccactggccatcttccccaaccctgtccattcagagtctcaggtctcagtccctctccctccctctggctctcccttcaccaaccctgtccctcacccctnnnnnnnnnnnnnnnnnnnnnnnnnnnnnnnnnnnnnnnnnnnnnnnnnnnnnnnnnnnnnaggggagaagccatacgtttgcacggtgccaggctgcgggaaacgcttcaccgagtactcgagcttgtataagcaccacgtggtgcacacacactgcaagccctacacctgcagcacctgcggcaagacctaccggcagacctccaccttggccatgcacaagcgcagtgcccatggcgagctggaggccacggaggagagtgagcaggccctctatgagcagcagcaacttgaggccgcctctgcagccgaggagagtccgccacccaaacgaccccggatagcttacctttcggaggtgaaggaagagagagatgacatcccagcccaggtggcgatggtgactgaagaagatggggccccccaggtggctctgatcactcaggatggtgcccagcaggtcagcctgtccccggaagacctgcaggccctggggagtgccatcagtatggtcacccagcacggcagcaccaccctcaccatccccagtcctgatgccgacctggccacatctggcacacatacagtccccatgggtcagcggccgatggcacccaagacgcagcccggcacaataattacctctggggctgtggtggctgaggactcaagtgtagcatctcttcgtcatcaacaggtggcactgttggccacagccaacggaacgcacattgcagtgcagctggaggaacagcagaccttagaggaggccatcaatgtggccactgcggccatgcagcaaggggctgtgaccctggagacaacagtgtcggagagtggctgctgagtccaagagggctgggtcccacaccatgctggaggaagtgccatctgcatggccactcttgcccccaagggcccaggctgtggctgacacatagaaggtggccacataggtctctggggtgagaagacagcaagaaaactgcctaactgaagggaatgggggccctgctcaagaagggggccaggcagctggaatcaggggagtgcatcatcctcgggagctgacaacagccaggctacaccagggcacccgcctctcaaaatcagctgggcgcccactctcctcctaaagaacacccttctggccctcagtctgttccccttctcaggtagagattggggctgctatggggactggccctgtagggttgagccacagacagctcttcagcccagtagcagtggagcaggccctgtcctgccctcccagcaataaccacctccctggaggccagctgagatgcctggctacttggcaccagggacttcctgacaccacagtcaattaattcctcaggggcctgtggctgaagaaaaggtgcccagcccccaccactcctcagctgccccccaacctctctatggcagagaggcagggagtggccctgtacatagactgctgggg

SEQ ID NO: 262869 - DNA, 981 bp, Homo Sapiens
aaggtagcgaggcctgggtggcgaattcggcacgaggctccaaaggcctccaaagcagcgtttgtgaatttttttccggcaggaaaataattgctgccttttgcatccgcgttggctccgtccccaggatcttcccggttcagggacctggcgatttctgagtgttccggaatcccaataaccctgtttaaagaggaatggagattgccactgtccatttagattaatgaggtgtcctgaagtgatggtgacatcaatgaaaggagggttctgacacgttctcacctcgcgggatggcagctgttgatttgtcccatggacattatctttctggggacccagtttgccttcatgaagaaaagacaccagcaggaagaatagtggctgactgcctaacagattgttatcaggattcagtgacctttgacgatgtggctgtggacttcacccaggaggagtggactttactggactcaactcagagaagcctctacagtgacgtgatgctggagaactacaagaacctggccacagtaggaggtcagatcatcaaacccagtctaatctcttggttggaacaagaagagtcaaggacagttcagggaggagttctccaaggaaggaaaacacaatggaagggaactctgtgactgtgagcaatgtggagaagtcttcagtgaacactcatgccttaagacgcacgtgagaactcaaagtacagggaacactcatgactgtaatcagtatgggaaaagatttccttaccctggtgtgagaaaacctctactggtgagaaaactttctgaggtttaatcagagtggaaaaatcttcagcctgacaccaaatattgtataccagagaactagcccacaagaaaagtcattttgatgtaatccactgggggaaaatccttccttaatgaagcataccttttcaggcacatatgaaaaactccacatggaaaaaaactcttccgatgg

SEQ ID NO: 262870 - DNA, 1036 bp, Homo Sapiens
ggtacggcccggaattacgggatatcgtcgaccacgcgtcggaagcacctacatgctgacccaggacgaagtcctgtgggagaaagagctgcctcccggggtggaggagctgctgaacaaggggcaggaccctctggcagacaggggtgagaaggacacagctaagagcctccagcccttggcgccccggaacaagacccgtgtggtcagctaccgcgtgccccacaacgctgcggtgcaggtgtacgactaccgagagaagcgagcccgcgtggtcttcgggcctgagctggtgtcgctgggtcctgaggagcagttcacagtgttgtccctctcagctgggcggcccaagcgtccccatgcccgccgtgcgctctgcctgctgctggggcctgacttcttcacagacgtcatcaccatcgaaacggcggatcatgccaggctgcaactgcagctggcctacaactggcactttgaggtgaatgaccggaaggacccccaagagacggccaagctcttttcagtgccagactttgtaggtgatgcctgcaaagccatcgcatcccgggtgcggggggccgtggcctctgtcactttcgatgacttccataagaactcagcccgcatcattcgcactgctgtctttggctttgagacctcggaagcgaagggcccgatggcatggcctgccaaggcccgggacaggctgtcttcccccaaaacggctggtggccagcagtgtggacgtccagtccagggagcctgggatcaaggaccgggagcctgcaagacgtcaactggccatgagatacacaaatcccagagggggcagcattagctaacaaggagagaaagcccgcgctttagggacaacttgcgaaaccggaacgctcaggaattgagggaggctgcatgcgcggataaacggcgcacgcgagcaacgtggagccagagagagcacgcacacaccacgggacatgaaagccccgccggggacgaaaacacacggcgcaaccacacacagcgcggctgccgt

SEQ ID NO: 262871 - DNA, 957 bp, Homo Sapiens
aggctgtacggtccggaattctcgggatatcgtcgacccacgcgtcggtaaggagagggtgacaggggaagaatggctggtcaccacaggtaggggcgtacctcccagcggtgtttgaggaggttctggatttggtggacgccgtcatccttacggaaaagacagccctgcacctccgggctcggcggaacttccgggacttcaggggagtgtcccgccgcactggggaggagtggctggtaacagtgcaggacacagaggcccacgtgccagatgtccacgaggaggtgctgggggttgtgcccatcaccaccctgggcccccacaactactgcgtgattctcgaccctgtcggaccggatggcaagaatcagctggggcagaagcgcgtggtcaagggagagaagtctttcttcctccagccaccacagcacctggaacaaggcacccacgatgtgtatgtgctgtcggagcagcaggggctgctgctgagggccctgcagcccctggaggagggggaggatgaggagaaggtctcacaccaggctggggaccactggctcatccgcggacccctggagtatgtgccatctgcaaagtggaggtggtggaggagcgccaggcatccctctagacgagaacgagggcatctatgtgcaggatgtcagaccggaaaggtgcgcgctgtgattggagcactacatgctgacccaggacgaagtcctgtgggagaaagagctgcctcccggggtggagggactgtggacccaggggcaggccctcctggcagacaggggtgccaagggcacggttaagagctccaggctgggcgcggaaaggaccgggtgggcgctacgcgtgcccaaaaggtgggggccggtcacaccggagaagagagccgggggctaggccaaacggtggcgggcccagacatccaggggccccgtggggcacggc

SEQ ID NO: 262872 - DNA, 1318 bp, Homo Sapiens
  misc_feature (49)..(49): n is a, c, g, or t
  misc_feature (95)..(95): n is a, c, g, or t
  misc_feature (133)..(133): n is a, c, g, or t
  misc_feature (1278)..(1278): n is a, c, g, or t
ctggttcagtgtgaccccccctcggcggatattggcgcgcgtcatattntgcgcggatatgcgcccaaagtgtggttcacgaggtgcgagcgagnaatcgttttcgaggcgaggcattaaggtgtgtgtatgngcggcccccccaccaaggggggagcaataagggaggtactcgccgcctccccaccgaatctcgtgcgcgcacggtgaaacaggaccactccggcggccccccctcggtttggggggctttgattcacccgcaccctcggtgttgtacggcgagggcgccctcgattatgcgcagccttttcggttctgccgtcggtggctgttgagagagtatagagtcccccctgtcaccacaactgtgtgtccacggggtgggccatataagttctacacgcgcggggccccgcccccgggatgaggatgtgggtgtttctttcctacacgagggttttccgccgttaccgtctttcgccgcctccccgtggaccgccgcgccacagttcccttgttttttagggccagttactttgcccctgagaagggcgcggcgtctttttccgtggcgggggaagttttcttccaaaacccttcttgtttttgaggggcgcccggcccgcctccttttctcggggggcgggcatcccccggctggtttcggggcggtgccgtccatggggggtttccgccaaaaccatgcctccgggggggccagagcggcgaaagggggctgtttcgggctccccccggcccggcaaggcgagcctttgtctgagagctgggtgtcctccaagtccctgggggaggtgagagctcctgggacctcctgggtgagccatcttccaggtcggagctctgtggtcatagaaaatggggtgggtgggctgtgagggcagagggctccccaggcacagggtgggcagggcacagagcgggatcctccagggagccctgggcatgccctcagccacaccaggccccctccatgcccagaacaacctgctaggctgcctgatggccaggcccaggacccaccccggccctgcagccccacttcctgctgggaccctgaactgctcgtgtgccctcaccccactgccaggaggggtttggttaggttggggcccgtcacagaggagggttgggtcgggaaggccggggctgaggctccgtgctcccctggccctgcatcccacgcgccggctcccctccctgccgcaggccccagcctcgtgccgaattcgccacccaggcctcgctacgtagggnagtggctgggggtggaatagtaaaggaaaaggagggagac

SEQ ID NO: 262873 - DNA, 924 bp, Homo Sapiens
ggcctgggtggcggagctgcagtcctacatccagaagctcagtatagcagtggagcaggctaagcagaaaatcctccaagcggaagtcaacctcgaggtggatgtggtagacagcaagccagagacccctgacctggagcagctggagccgtctttggaagatgtggaaagcatgaatgattttgatcccttgttttcagaggaaacacctggagtggagaagccggtcaccactgttcagcccgtgtttaacttggcagcatatcatcagctatttgttgggacagaaagaattcgagctccagagattattttccagccatctctcataggagaagaacaggctgggattgcagagactcttcagtacattctggacaggtacccaaaggacattcaggaaatgctggttcagaacgttttcctcactggcggcaacacgatgtatcctggcatgaaagccagaatggagaaggaactgttggagatgagacccttccggtcttcttttcaggttcaacttgcctcgaaccctgtgctggatgcctggtacggtgctcgtgactgggccttgaaccacctagatgataatgaagtttggatcaccaggaaagagtatgaagaaaagggaggagagtacctcaaggagcactgtgcttccaacatctatgtccccatccgcctgccgaagcaggcctcccgctcctcagatgcccaggcatccagcaagggctccgctgctggtggaggtggtgctggtgagcaggcatagcagaggccctccagagagactgccctgcacgccatgccttgggccacgttgggcagtgtgacagggactgtgaattgtgctaaaatgtacctgccaagtctgctggtcacatttggcagcaaaatggatttcctcctgggggagaccaagtt

SEQ ID NO: 262874 - DNA, 961 bp, Homo Sapiens
  misc_feature (89)..(89): n is a, c, g, or t
  misc_feature (477)..(515): n is a, c, g, or t
tacggtccaaggtagcgaggcctgggtggcgaattcggcacgaggctctgggacaggtgaagatgtgtaacctatttgccgggggctantttgggagggaatagaggacggggagcgatgaggggacagtcgaggggcaaggccgatctcgcttcgcgcctcccgcctttctgagttgagcctagcgcgcgggtctgagggacatccggggagctgcttgggatggccgccttggggagactcgacccgcccgccaggacccggccgcgcgccgcagttcgggcgccttcgggcaggatcgcccagcggggccgcgttctcctgcttgcggacggctgcgggcctgagggctggacagcgccatgcctcagtaccgggaactgtcccacgtaggaaggtgggaatgccgcgaacggcgtgcggaatccgacctcaaggtggaacggggtggtgaagagtgcatgctccgaggcagtnnnnnnnnnnnnnnnnnnnnnnnnnnnnnnnnnnnnnnngcgggcgtttgctgtttcatgtttgtgactttcacctcccgtctctggggaatgggaggaacattagtacctgtctccgtgggcgggtcttctggacccagttcgacggataccatccccgcttagccccggccccgcgagccccggaccgaacctgcgacccgtcggggcccccgcccaggccgggcgaccaagcagggtccgccagtgggccgcgcggccaacatgcccaactcgccgaaccctaccggcccttagagcggccacgacgtgcgcgccttgcacgcacgccagccggccttttatatcggagcgcgccggaggggcccgggcagcacttgggccgcgcctgcccgggtccggcccccgcccacctcgcccgcccgacgactcctcttccgatctagacgccagcctacccaccggcgctaaaccaccgccgtcac

SEQ ID NO: 262875 - DNA, 1031 bp, Homo Sapiens
  misc_feature (859)..(859): n is a, c, g, or t
gtagcgaggcctgggtggcgaattcggcacgagggcagcagcgactgggggcggcggcggcgcgttggaggcggccatggcaaagcagtacgactcggtggagtgccctttttgtgatgaagtttccaaatacgagaagctcgccaagatcggccaaggcaccttcggggaggtgttcaaggccaggcaccgcaagaccggccagaaggtggctctgaagaaggtgctgatggaaaacgagaaggaggggttccccattacagccttgcgggagatcaagatccttcagcttctaaaacacgagaatgtggtcaacttgattgagatttgtcgaaccaaagcttccccctataaccgctgcaagggtagtatatacctggtgttcgacttctgcgagcatgaccttgctgggctgttgagcaatgttttggtcaagttcacgctgtctgagatcaagagggtgatgcagatgctgcttaacggcctctactacatccacagaaacaagatcctgcatagggacatgaaggctgctaatgtgcttatcactcgtgatggggtcctgaagctggcagactttgggctggcccgggccttcagcctggccaacaacaggccagcccaaccgctacaccaaccgtgtggtgacactccggcaccggcccccggacctgttgcttctggacccgcaatcctcgcccccccctttcccctgtggggcgccccggctcccttcttcctaccacgatccctgtaccgcccgccctccctgcagcatcggtccacgcgcgccttccccgcccatttcgccggctccctatcacgcgcccctgcgccatctcttctctgcccccaaagntgcggccgcataacgctccccgcacccacgttccgccgcccatcgccgacctcccgtctgctggcgcccagcgggcccgccccctgcggcccgcgtcccaccgcatcagtctcgggacggccattctcccgcccccccatccctcctctctcttccaccttctcccctctcc

SEQ ID NO: 262876 - DNA, 1047 bp, Homo Sapiens
ggcctgggtggcgaattcggcacgagggatctcgttcatagacagctactttgaaatcctcttcctgttccaggccctgctcacagtggtgtcccaggtgctgtgtttcctggccatcgagtggtacctgcccctgcttgtgtctgcgctggtgctgggctggctgaacctgctttactatacacgtggcttccagcacacaggcatctacagtgtcatgatccagaaggtcatcctgcgggacctgctgcgcttccttctgatctacttagtcttccttttcggcttcgctgtagccctggtgagcctgagccaggaggcttggcgccccgaagctcctacaggccccaatgccacagagtcagtgcagcccatggagggacaggaggacgagggcaacggggcccagtacaggggtatcctggaagcctccttggagctcttcaaattcaccatcggcatgggcgagctggccttccaggagcagctgcacttccgcggcatggtgctgctgctgctgctggcctacgtgctgctcacctacatcctgctgctcaacatgctcatcgccctcatgagcgagaccgtcaacagtgtcgccactgacagctggagcatctggaagctgcagaaagccatctctgtcctggagatggagaatggctattggtggtgcaggaagaagcagcgggcaggtgtgatgctgaccgttggcactaagccagatggcagccccgatgagcgctggtgcttcagggtggaggaggtgaactgggcttcatgggagcagacgctgcctacgctgtgtgaggacccgtcaggggcaggtgtccctcgaactctcgagaaccctgtcctggcttcccctcccaaggaggatgaggatggtgcctcctgaggaaaactatgggccccgtccagctcctccagtccaactgatggcccaaatgcaccaggaggccagaggacagagcagaggatctttccaaccacatctgctggctctggggtcccagtgaattctggtggcaaatatatattttcact

SEQ ID NO: 262877 - DNA, 439 bp, Homo Sapiens
  misc_feature (368)..(368): n is a, c, g, or t
  misc_feature (407)..(407): n is a, c, g, or t
  misc_feature (418)..(418): n is a, c, g, or t
  misc_feature (426)..(426): n is a, c, g, or t
gtgaaaatatatatttgccaccagaattcactgggaccccagagccagcagatgtggttggaaagatcctctgctctgtcctctggcctcctgctgcatctgggccatcagttggactggaggagctggacgggcacatagttttcctcagaggcaccatcctcatcctccttgggaggggaagccaggacagggttctcgagagttcctgtaaacagatggcaagcactgtagcttaacccttgagtgtgtccccaggaagcaggcaccagggaaacggggccacagtcatgaaaacacgtcatgccgtggggacagcctcagcgatcctggaaggccagcaatccttctccctgcttccctcactncacaaggcatttcccaatccccttgccatatccaggggntttccccttgncccctttncaccctcaagggg

SEQ ID NO: 262878 - DNA, 555 bp, Homo Sapiens
  misc_feature (194)..(194): n is a, c, g, or t
  misc_feature (196)..(196): n is a, c, g, or t
  misc_feature (214)..(214): n is a, c, g, or t
  misc_feature (220)..(220): n is a, c, g, or t
  misc_feature (266)..(266): n is a, c, g, or t
ttccaccttacattcacaaccccagccctggatttagattccctgcaaaacccatgagagtttcatttcctccatattttcatcagcatttcatcttgtcagatttactctctataggttctaagtattattccccctctgctgatttacttattataaacagtacataactgatcagataaacacttgtcccntntgccaccccctaatgccntgcccnccacttcatattcccagaaccactcccattaaaccaccccccttancttatggtgggtggtgggagggggctcatcgggtggggtcctttgccgtattattctgtgtcactgaggcctatcacagtgctctgcacatgtaggtgcaaatatctgttgtatgattacataaaagaatgatgtgaaaccctatttggtctgtaccacaatcatgaacgtccccaaccacttgaaggcactcatagtgtcttaatcatcttaggccttcgatctggcatagataactcctttcgacgcgtggtcacaatatcccgtaattccgggccgtaccagcctg

SEQ ID NO: 262879 - DNA, 1007 bp, Homo Sapiens
  misc_feature (683)..(683): n is a, c, g, or t
gagcgaggcctgggtggcgaattcggcacgaggcagcggaagactcaagaacagctggaagttctagagagcttgaagcaggaacttgccacaagccaacgggagcttcaggttctgcaaggcagcctggaaacttctgcccagtcagaagcaaactgggcagccgagttcgccgagctagagaaggagcgggacagcctggtgagtggcgcagctcatagggaggaggaattatctgctcttcggaaagaactgcaggacactcagctcaaactggccagcacagaggaatctatgtgccagcttgccaaagaccaacgaaaaatgcttctggtggggtccaggaaggctgcggagcaggtgatacaagacgccctgaaccagcttgaagaacctcctctcatcagctgcgctgggtctgcagatcacctcctctccacggtcacatccatttccagctgcatcgagcaactggagaaaagctggagccagtatctggcctgcccagaagacatcagtggacttctccattccataaccctgctggcccacttgaccagcgacgccattggctcatggtgccaccacctgcctcagagccccacctgagcctgccgactcactgaccgaggcctgtaagcaagtatgggcagggaaaccctcgcctacctggcctccctggnaaggaagaggaaagccttgagaatgccgacagcacagccatgaggaactgcctgagcaagatcaaggccatcggcgaggagctcctgcccaggggactggacatcacagcaggaaggagctggggggacctggtggacaaggaagatgggcggccacttcagctgctattgaaactgccacggcacagaatagaagagaagctcagcaaatccccaagcaggaaaaacgggagtcaaaattggaggtgaatggaaaggaatcctgggttggctggaccaccctcatggcaagctattcaaggtgctcctcggggggcccctaag

SEQ ID NO: 262880 - DNA, 917 bp, Homo Sapiens
  misc_feature (94)..(94): n is a, c, g, or t
cccaggaaaaggggtttgggaaaaggggtcctgaggaaagatcaaagaaagaaaaaggggtgggggacgggaatgaaataagtagattgaaagncccaaatcaggggagccccggggctgagctatggggtgagggaactgaaagaacctcaagatcccctaagtaggtggggtacccccggagaggactgcccacatttcattaaggaagaggggtgcctaatctagtcctgacatgtctcctctcttctccaaggagctcactgacccaaagatttgcaccgtgtgggtctgacctcatcatgtggagtgcagagggccctgatgacatgtgtgtgatgaggaccatgacccttgaacccccttacctaacgtaactaataaaatgaagctgagagctttggaatccatgaagtgagtctaggtgtttgcacagggactctggtgccccttcttttgtgcccacagcattgcagagacacaactaagaatggctttcaccaaccaccagccctcaccccagccccagagccacaagttctctctgtgggggtggggctggagcaggtacacagagtactggatctgaagatgcagatgaggggcacagtcttgggattatgtgttggggaacttccccaccccctcggtcccaagatgagaggacagtgtttccaccttaggttcttagagtccctctgggctctttggcacttggaaagtgatccccccatttcctgccccatgagaatgggcagggggaggacttggcactggctgtgggagaggttatggctccaccaggcctctgggcactggaaaaaggaggggtgtcaccaggacaacccctactgggcatcaggttctgaaaaggaagagtgaggaactagcctcgtgccgaattcgccacccaggcc

SEQ ID NO: 262881 - DNA, 1057 bp, Homo Sapiens
  misc_feature (802)..(850): n is a, c, g, or t
ggcctgggtggcgaattcggcacgagggacaggcagggccggaagatgagcaagtccctggggaatgtgctggacccaagagacatcatcagtggggtggagatgcaggtgctgcaggaaaagctgagaagcggaaatttggaccctgcagagctggccattgtggctgcagcacagaaaaaggactttcctcacgggatccctgagtgtgggacagatgccctgagattcacactctgctcccatggagttcaggcgggcgacttgcacctgtcagtctctgaggtccagagctgccgacatttctgcaacaagatctggaatgctcttcgctttatcctcaatgctttaggggagaaatttgtgccacagcctgctgaggagctgtctccctcctccccgatggatgcctggatcctgagccgccttgccctggctgcccaggagtgtgagcggggcttcctcacccgagagctctcgctcgtcactcatgccctgccaccacttctggcttcacaacctctgtgacgtctacctggaggctgtgaagcccgtgctgtggcactcaccccgaccctcaccggccccctcacctcccggacgcctgcgaccacctcgcccggccgcagcctggccccaccgatgacctccccggcggaagagctctggcagagcagctcccatcccccaccccgccatcctttacgagggttgtgccctgccccgctgtcatctccactctacctccccccccgggacggcgccgcggaacggacatagacggctcgcgtgcgaccgcgannnnnnnnnnnnnnnnnnnnnnnnnnnnnnnnnnnnnnnnnnnnnnnnngcgactggacccgggcgcgcaccgtggccatacccgcggacacgggaacggcgtggtgggcagcccccgccatgtaagttcgtagagcccgacggcacgacgggcgacccggccctatctgacagcgcacatgtcctagcgctacggagctccggacacccgccgtgcccgcggactctgcccccgccacgcgcagacgtacgaccc

SEQ ID NO: 262882 - DNA, 1049 bp, Homo Sapiens
taggtagcgaggcctgggtggcgaattcggcacgaggctcatgtccaagctggtggaggcggaaatggatggggctgcggctgccaagcaggtcatggccttgaaggataccatcgggaagctgaaaacggagaaacaaatgacctgcacggacatcaacaccctgacaaggcagaaggaacttctcctgcagaagctgagcacatttgaggagaccaaccgcaccctccgagacctcctgagggaacagcactgcaaagaggattctgaaagactaatggagcaacaaggagcactgctgaaacggctggcggaggccgactcagagaaagcgcgcctgctgttactgctgcaagacaaggacaaggaggtggaagagctccttcaggaaatacaatgtgagaaggctcaagcaaagacagcctctgagctttctaaatccatggagtccatgcgtgggcatttgcaggcacagcttcggtccaaagaggctgagaacagtcgcctgtgcatgcagattaagaatctggagcgcagcgggaatcagcataaggcagaagtggaggccatcatggagcagctgaaggagttgaagcagaagggagaccgagacaaagagagcttgaagaaggccatccgagcccagaaggagcgagccgagaagagcgaggagtatgctgagcagctacacgtgcaactcgctgacaaggatctttatgtcgctgaagctttatccactctggaatcctggaggagccgctacaaccaagttgtaaaagaaaagggagaccttgagctggaaattattgtcctgaatgaccgggtaacagatcttgtaaaccaacaacaaaccctggaagagaagatgcggggaagaccggggataccctgggggagagactacaccgtcagactgctgagtattccgcattcaagctggagaatgagaggctgaaggccagctttgctcccatgggagacaaactcacccagcacacctcgaggtccagcagctgaaggcctcagtgaagaactatggagggatgatt

SEQ ID NO: 262883 - DNA, 933 bp, Homo Sapiens
  misc_feature (776)..(832): n is a, c, g, or t
ggcctgggtggcgaattcggcacgaggctctaagtcactatatgaatatgacaatatgtgcacatttaaaattcagagctcggcattgtgatactgatgcagaagctagtagattggttaaaagtctggacttctgtggcatttttttcgtgacgtgataatctatcataagcagacctaagcacagttttatgaacacaattttgcccatgacattgcctacaggatttccagatgtgacttgcactcagaagatcagtggtcaacttcagaagctcttccacgcttagatcatgtcttcagaacttagatgtgaaaatctacacactgggagatgctgtgagccccaaggttttgatggagtttgcttggaatcctcttgacttcatgccacattgacgtgaactttgatgtataataagcagcagcaacttcatgtgaaaatatggtcaggtagttatatgtaaggttacgtggtccagtaatgtcttagattgataaattaggtatggaatccatcagtgttacgtgatgagaataggtgaacacaccttgtcagtgatgatgtaaacttctctccttggcaggacatgggcaaacatgctgattggtgcaaatgtggtgccgagctgtccatagctgcagtgaaagatgaagagcaagaccttctctaggttttctagctttcattaaatgtatttttttccccagagctaatttgaaagttgattggaccactgtggatggggtgtcattaagaatgtgggaaatagggnnnnnnnnnnnnnnnnnnnnnnnnnnnnnnnnnnnnnnnnnnnnnnnnnnnnnnnnnggtgggatccgctggattcccaggagggtgaaaaccaacctgggggaacacattcctggcctcctaccaaaaataccaaaattagccccgggccaggggtg

SEQ ID NO: 262884 - DNA, 1144 bp, Homo Sapiens
aaggtagcgaggcctgggtggcgaattcggcacgaggagatggcggcgcccaggccctgccacgcagacttccgcccggcgcggagaccgaaggctggcggctggtcgcgttgcaggcaacatgtcggaaggaaacgccgccggcgagcccagcacgccgggagggccccgacctctcctgactggggcccgggggctcatcgggcggcggccggcgcctcccctcacccccggccgccttccctccatccgttccagggacctcaccctcgggggagtcaagaagaaaaccttcaccccaaatatcatcagtcggaagatcaaggaagagcccaaggaagaagtaactgtcaagaaggagaagcgtgaaagggacagagaccgacaacgagaggggcatggacgagggcgaggccgtccagaagtgatccagtctcactccatctttgagcagggcccagccgaaatgatgaagaaaaaagggaactgggataagacagtggatgtgtcagacatgggaccttctcatatcatcaacatcaaaaaagagaagacagacacacgacgaagaaactaaacagatccttgcggatgctagccgaaggaccattttcccccgatgaacccccgagcgcaagaaaccacacatcagagacaagaccctggcgccagcccgccccccgggccttacttacgcggatcggtgtcttatacgccgccaggtagcggggccccgaaacccgaaaccgccgacaacaccgccaggatatcgggcgtcgcccgcgcggcccgtaaacgacgccccccgcgctgacatgcccaacattacctccgcccgcactcagacccaccgcgccgatctaccaagcgcccggtagagggcgaatacgcgggcgcttgcctcgcacacgaatccacacaccgtgtatggcctagccaacaggctctaccgcgcgggacaggcgacacacacgcaaccccggcctatgcgtgacgagtagagacgaagacgatcacggcagagcacaggtacctccgcactccacatagacccacccgcggaaccgataccacaagatcacagtcgtcttggagcacagaccccccgcgcactcgcgcgaagtacgcctacatccactacagg

SEQ ID NO: 262885 - DNA, 1013 bp, Homo Sapiens
  misc_feature (576)..(603): n is a, c, g, or t
  misc_feature (899)..(907): n is a, c, g, or t
  misc_feature (923)..(923): n is a, c, g, or t
gctgggtggcgaattcggcacgaggccgaagactgcgatgacttctgcactgacccaggggctggagcgaatcccagaccagctcggctacctggtactgagtgaaggtgcagtgctggcgtcatctggggacctggagaatgatgagcaggcagccagtgccatctctgagctggtcagcacagcctgcggtttccggctgcaccgcggcatgaatgtgcccttcaagcgcctgtctgtggtctttggagaacacacactgctggtgacggtgtcaggacagagggtgtttgtggtgaagaggcagaaccgaggtcgggagcccattgatgtctgagcctgccggagggcgagggtcggagaagcggattgggtcctgggcctctgtgatgaggcaggcacacctgtcggtcttggcttgctgctagaactagggccttctgctcgcccacctcccacccctacctggacgggcccaggcttggggactctgagctgtgttaaggagaacaagggcaaggagacctccctttgtgctccctcactccctaataaacatgagtctgatgttctccnnnnnnnnnnnnnnnnnnnnnnnnnnnnctcgaggcatctatgtcggggtgcgggagaaagagggaatgaaatggcacctgggcatagctgtttcctgacccagctttcttggacaaaggggtaaatctggccgggctccctaaagggaggcgtattaatttcgataacccgggtaacctggatttaagaatccgggtgcagtaccggggaatttaaccccccctatgaggggggcttttttttgggatcccaaggatctttttggaaatcctttttgtctggaaggaacctgctggtgggaaacagaaagaccccggctaccnnnnnnnnntttgtttgcggaatanaggaggaccaggttcttttttgagagagggaagtggcgtcgggcggagccgaagatacgaaataacgtgtctttgttagggagccgcggg

SEQ ID NO: 262886 - DNA, 1036 bp, Homo Sapiens
tccatcccgccccgccctcgcccttatacccacgccctgcggtgggcgaattcgcgcacgaagggctggcgttggaaaaagactatgttagcaagtgtcacgccatgcttttgccaactttccaattaaaggttgacattcctgcataagcatttctctgtgaaaatgtccttgcctcttacagaggagcagaggaaaaagattgaagagaatcgacaaaaggctctggcccgcagagctgagaagttattggcagaacagcatcagaggactagctcgggcacctccattgctggcaacccattccaggccaagcaaggcccatcccaaaatttcccaagggagtcttgtaagccagtgagccatggtgtcattttcaagcaacagaatctcagtagctcatctaatgctgaccaaagacctcatgattcccacagttttcaggcaaagggaatatggaaaaagccagaagaaatgcccacagcctgcccaggccacagtccacatagtcaaatggctctcactggaatctctcctcccttggcacaaagtcctccagaggtccctaaacaacagctcttgagttatgagttaggtcaaggtcatgctcaggcttcacctgagatcaggttcacaccctttgctaacccaactcataagcctctggccaaaccaaagagttcccaagagacaccagctcattcctctggacagcctcccagggatgctaagttagaggccaagacagcaaaagcccccccttcggggcagaacatttcttacatccattctagctcagagagtgtaacgcccaggacagaaggaagactccagcagaagtcagggtcctcagtccaaaaaggagtgaactctcagaaaggaaagtgcgtaaggaacggcgatcgtttcccaggtgttggatgggtacaatggcggaactcattggcaggggtttaagaccctgcgccagcaggatttatgatcctgaccccaagacgggggaacttccacatgaaggactattggggcccggatg

SEQ ID NO: 262887 - DNA, 633 bp, Homo Sapiens
  misc_feature (286)..(286): n is a, c, g, or t
  misc_feature (539)..(547): n is a, c, g, or t
ggcgaattcggcacgagggctgtatcctgagttgtagcctctgtaattgtgaatattaactgagatagtgaaaatggtgtccggttttctattgcattttttcaagtggaaaagttaactaaatggttgacacacaaaaattggtggagaaattgtgcatatgccaattttttgttaaaaccttttgttttgaactatactgctttgagatctcatttcagaagaacggcatgaacagtcttcagcccacagttgtgatggttgttaaatgctcacaattgtgcantccttagggtttttcccatcccctggggtttgcaagttgttcacttaaaacattcttaaaatggttggcttcttgtctgcaagccagctgatatggtagcaaccaaagattccagtgtttgagcatatgaaagactctgcctgcttaattgtgctagaaataacagcatctaaagtgaagacttaagaaaaacttagtgactactagattatccttaggactctgcattaactctataatgttcttggtattnnnnnnnnngcatatttgtcacagaaatttagttaacatcttacaactgaacatgtatgtatgttgcttaaataaatgtaatcactgtaaacatc

SEQ ID NO: 262888 - DNA, 881 bp, Homo Sapiens
  misc_feature (658)..(658): n is a, c, g, or t
ccctgacgccccacaaccgaggctgggtggcgaattcggcacgaggaagcacagcaaagtgaaggggaacagaattacaggaagtttagggcaaagatttgtcctgggagaaaatcaagcagccgaagatgaactaagaaaagagataagtaaaaccgatgtttgcagaaatggaaatcattggtcagtttaacctgggatttataataaccaaactgaatgaggatatcttcatagtggaccagcatgccacggacgagaaagtataacttcgagatgctgcagcagcaccaccgtggctccaggggccagaggctcatagcacctcagactctcaacttaactgctggtaatgaacctggtctgatagaaaatcctggaaataatttaaaaagaatggctttgattttgttatcgatgaaaatgctccacgtcactgaaagggcgtaaactgatttccttgccaactagtaaaaactggaccttcggaccccaggacgtcgatgaactgatcttcatgctgagcgacagccctggggtcatgtgccggccttcccgagtcaagcagatgtttgcctccagagcctgccggaagtcggtgatgattgggactgctctcaacacaagcgagatgaagaaactgatcacccacatgggnggagatggaccacccctggaactgtccccatggaaggccaaccatgagacacatcgccaacctgggtgtcatttctcagaactgaccgtagtcactgtatggaataattggttttatcgcagatttttatgttttgaaagacagagtcttcactaacctttttttgttttaaaatgaaacctgctactttaaaaaaatacacatcacaccccatttaaaagtg

SEQ ID NO: 262889 - DNA, 958 bp, Homo Sapiens
gcctgggtggcgaattcggcacgagggcggcccggaggcgccgggtgggccgtttgctgaccggatcgcggctacccgccagcgtgtccgcggcgccgccgccagcatgggctgtgccccgagcatccacatttccgagcgcctggtggccgaggacgcgcctagccccgcggcaccgccgctgtcgtccggcgggccgcgcctcccgcagggccagaagacggccgccttgccccggacccgcggcgccggcctcttggagtcggagcttcgcgacggcagcggcaagaaggtagcagtagctgatgtgcagtttggccccatgagatttcatcaagatcaacttcaggtacttttagtgtttaccaaagaagataaccaatgtaatggattctgcagggcatgtgaaaaagcagggtttaagtgtacagttaccaaggaggctcaggctgtccttgcctgtttcctggacaaacatcatgacattatcatcatagaccacagaaatcctcgacagctggatgcagaggcactgtgcaggtctatcagatcatcaaaactctcagaaaacacagttattgttggtgtagtacgcagggtggatagagaagagttgtccgtaatgcctttcatttctgctggatttacaaggagggtatgtaaaaaaccccaacatcatgggcctgctacaatgaactgctccagctggaggtttggagaagggcgatcacaactgaaactccgggcttgtaactccatattccctgcattagaaaaccagtggagaatggcattgaatttacaagccgaagacccgttttaatacggtatggcaaatcctgcctttggaaacaccaagggggtctttccgtccaggggaatttaaataggggaagggggtttaggggaaaaggccctttataaatggacaaaaaaaggggtgggctttgctccgcac

SEQ ID NO: 262890 - DNA, 1014 bp, Homo Sapiens
  misc_feature (87)..(106): n is a, c, g, or t
  misc_feature (922)..(943): n is a, c, g, or t
cacccaaccccctaccgttatatctttcttggtacatatacagtaactccaaaaaaaattcatttagaaaatgtgttcattaagagnnnnnnnnnnnnnnnnnnnnccctcttgtaagttctcacttgctgagttaaaaaaattgaatgtaaaatgatctataaggctcaaaacggttccccaagcacccatccggtgtcaggaagaactggatgaccgcagtttctagaatctggttgacattttcaataattcagtgctaacaacgaaagactgtcgtctttagaaagaaggaacgaatcaaaggcacttgcacgtgacttcgtgtgctggcgtccgtccgtggccgccttcgtcggacagcgtcagtcacacgcctggccccacgtggagcagagtccccttgaggccatttctgcgtggccccaactccctgctctcgtgggcagaggacttttcacgcggatctcagacgctaagcagtctggtgggggatggctttgaggcaaaggtttgaactaggcccgagatgtttcctcttttccttgcaacaacttcaacagacagctgagccacgccatgccacgggctgccacgggccaccacggggaaccatgtcactggactttagatgacaaaatgctgtcaggaagatgcttgctctgaccttgggggccagaacccgagagaaggactgatcctgtcgccttcttaaagagttggtggcagcaacttctgagaacttgacaccagaaacatcaacagcctccacaccacgtagtttctgattccatctttaaaaaatcttgtgttgttttgtcgagaaattgcaggcttttatgttttcaaagaactaaacacaatactgagaagtccaacttttagccagaatacataaattcctgaaaatgtatagatttgnnnnnnnnnnnnnnnnnnnnnnggaagacaacctttttaggaacggagcggacgcgtgggtcgacgatatcccgaaattccggaccggtaccc

SEQ ID NO: 262891 - DNA, 1148 bp, Homo Sapiens
  misc_feature (937)..(937): n is a, c, g, or t
ggcctgggtggcgaattcggcacgagggttccgcatcctcaggcgtcagcctgtccagtagcatgaacaccgcgaacagcctctgtctgggtgggacccccgcgagtgcatccagcagcagtagcagggccgcgcccttggtgacctcaggcaaagcacccccaaacttacctcagggggtgcctcccctgctgcacaaccagtacctcgtaggtcccggaggactgcttcctgcctacccgatctatggctatgacgagctccagatgctgcagtcacggctgccagtggactactatggaattccctttgctgcacccacagcgcttgccagccgagatgggagcctagctaataatccatatccaggtgatgtcacaaagtttggccgtggggactctgcatcccctgcacccgctaccacaccagctcagccacagcagagccaatcacagacccaccacacagcccagcagcccttcgtgaatcctgcactgccacctggctatagctacactggtcttccctactacacaggcatgcccagtgccttccagtatggccccaccatgtttgtccctccagcctcagccaagcaacatggggtgaacctcagcactcccacacctcccttccagcaggccagtggttatggccagcacggctacagtacaggttatgacgacctgacccaggggacagcagcaggagactactccaaaggtggctatgctggatcatcgcaggcaccaaacaagtctgcaggttctgggcctggcaaaggagtatcagtgtcttcaagcaccactggtctacctgatatgactgggtctgtctacaataagacacagacttttgacaagcagggatttcatgcagggacgcctccacctttcaaccctgccctcggtcttgggctcccactgggcccctggcnctcgggaagcggcccctggctatgcacccccaccattcctacacatcttgccagcccaccagcagccccactcacagctgctgcaccaccaccttccgcaggatgcacagagtggctcgggtcagcgcagccagcccagctccctgccacccaagtctccagcctccaaaactgcctacgggaactctccatactggacaaacttaacccc

SEQ ID NO: 262892 - DNA, 1174 bp, Homo Sapiens
  misc_feature (220)..(232): n is a, c, g, or t
  misc_feature (290)..(305): n is a, c, g, or t
  misc_feature (372)..(384): n is a, c, g, or t
  misc_feature (900)..(900): n is a, c, g, or t
  misc_feature (947)..(947): n is a, c, g, or t
  misc_feature (1022)..(1022): n is a, c, g, or t
  misc_feature (1042)..(1042): n is a, c, g, or t
  misc_feature (1062)..(1062): n is a, c, g, or t
  misc_feature (1073)..(1073): n is a, c, g, or t
  misc_feature (1111)..(1111): n is a, c, g, or t
  misc_feature (1117)..(1117): n is a, c, g, or t
  misc_feature (1120)..(1120): n is a, c, g, or t
cagcccagggacctctgcaggccaccctccctcccccctcaacccagggacctccgcaggccaccctccctcccccctcaacccagggacctccgcaggccaccctcccccctcagcccagggagctccgcaggccactctccctcccccctcaacctaggaagctccgcaggcgaccctcccccctcctcccaaggacgtccgcaggccaccgtccctnnnnnnnnnnnnnagggacataggcaggcgacattccttcccccctccctaaagggagatcgcctggcgannnnnnnnnnnnnnnntgctacaattgaaatacggcacaagacccctccctcccctgtaaagggaaaggggatggtatcaatnnnnnnnnnnnnnacccaccacaagacgatatatacgcccttttttctccttttttaccctaagacgaggcgcaccgcgcatacccccctcctttccccaccttttttagaccgaaccttacgcctggagcccatttatgccctcccccgtacaccccgtttaatagagcagccagaaccacaaacccactgcagcctacacattccccgatccgcgaaggcgcgacattcaaaaccacgcactagttttttcgccacccccatcccagcctttttaattcggcgcccgtgattattatgtttgcggcgcgccctccgattacttcgtcgctacgcattacaccctatacatcgcacgcctcaggacggcgaacgttggcactgtcgcaccactatgccggctcgctaaacatcacgaccagttgtgttgtcacctctcgactatatatccgcgcatgtacttaacgctctccgcccagtccatcattgtagcgaaccactatctctgtaactcctcacacaccgcatnatagatgaacaacatacctagttactaatatgccatgtatccgcccntaggaacctcgctcccgctgtcttgctacgcacgaacacactttctcaccgctcacccgcccaatcaatgcgacntattcgcagtacatactaanatgactatattcattcgacnaacgactatanagtcgcgctcccacagtatatttatctccgcaccgccnccactnttnaggtctaacacctcgctccctatgctgaccccccaccgatacttctcctatttc

SEQ ID NO: 262893 - DNA, 1164 bp, Homo Sapiens
  misc_feature (137)..(231): n is a, c, g, or t
  misc_feature (250)..(270): n is a, c, g, or t
  misc_feature (297)..(309): n is a, c, g, or t
  misc_feature (466)..(481): n is a, c, g, or t
  misc_feature (803)..(803): n is a, c, g, or t
agcccagggacctctgcaggccaccctccctcccccctcaacccagggacctccgcaggccaccctccctcccccctcaacccagggacctccgcaggccaccctcccccctcagcccagggaggtccgcaggaaannnnnnnnnnnnnnnnnnnnnnnnnnnnnnnnnnnnnnnnnnnnnnnnnnnnnnnnnnnnnnnnnnnnnnnnnnnnnnnnnnnnnnnnnnnnnnnagggacatgggcaggcgannnnnnnnnnnnnnnnnnnnnagggacaggggcagggggcgcgccctnnnnnnnnnnnnnagggaaggcgggggaggaaagtcccttcccccctcggacggagggaggggcggggggaggcggtaccctccccaccctcgcgaaggcgcgagggacagggggagaaattccggtcccccttctcgggtggggaggatggggaggggaaaggatgggnnnnnnnnnnnnnnnnagcggccaaggagaggaaaggagggtgagatgggcagcccaatcgcccgctccaccgtatggagacgagacgcgcgggagagaagcgggtcctgggcgtgccccccgccccgcgagggcgggagcgaggagcggacagcgaagagggcacggacgacgggagtgtctgcacctccacccccgcgcgcggcccgtagagagcgaggagttgagggacacaggtcgcacggacaagctgcagagagctggtcgcgcgaggacgcgggcgggcggagaggggcacgccgccatggcacacgagcggcaagagcggacgacggctntccaccctctcgactccgatcatccccccgcgcgggagtaccgtgtacgcgaccgacaacgcatggcctggatctttgccacacgccgacggcccaaagaccggaggcgcggccagcggtgcgatcagagcgacgggtgagccggcgcgacgcgctcgacacgcgtggagggcgaccagggaagaggatgggtgggacagcgcgccggatggccgccccggcaagagctagcggcgagcaacggtgtgcaggcgacagcacagagagggcgcgatgggaagtggcaacgtggaacccgcccggaagacgcacggaggagagcgtttgagtccaccgcggcggtgcagaacaacgccaaaga

SEQ ID NO: 262894 - DNA, 999 bp, Homo Sapiens
ggcctgggtggcgaattcggcacgaggcggcaggcgggaggcggcagggctggcattgcagtgcgggccgtgcgggctgcgcgggcgcggggaggcgcgggcggcaaactgcgggcacccggcaccccgcagccagtaccgggcggaggcgtcagagccgcgcaccgcggacgagcaggcccaggcatccagtaccctgctgactctgacatgcccccagcctcccccagctctgcagggagccctggtgccagagaccttctcccatttctccctatgggtgcctgacctgagggcagagacatctgagtgtgtataagcacagcaggacaccaggacctggcctgaagacatttcctctcctcccctctggatttctcagagactgttctgcgatgaccacagcaaggtaccggcccacctgggacctggccctcgacccgctggtgtcttgcaagctctgtcttggggagtacccagtggagcagatgacaaccatagcccagtgccaatgcatcttctgtactctgtgcctgaaacagtatgttgagctcttgatcaaagaaggattagaaaccgcaattagctgcccagatgctgcctgccctaaacagggccacctacaggagaacgagattgagtgcatggttgcagctgaaattatgcaaagatataaaaagctacaatttgaaagagaggtgctgtttgatcccctgtccggacttgggtgccccggcgtccacctggccaggtgtggggtcagcctccagaacgggggggctgcaaaaccccccagccaggggaagggcaaaacccggccgaatggaaattttgcctccaccctgccaaacccgattgggaaccctgggcccagggctggccccgaaaaacaatgtccgaaatccccttctcccccccggggggaaaaccaaggggcctgctttttctaaaaaggggaaaagaataatgtagccccgccccattacaagggggcctggt

SEQ ID NO: 262895 - DNA, 962 bp, Homo Sapiens
ggcctgggtggcgaattcggcacgaggattccatcccaatggcggcgctcctgaggagactgctgcagcgcgagaggccttcggcggcctctggccgccccgtaggacggcgcgaggccaacctgggcactgatgccggggttgcggtgcgagtgcggttcgctcccagccccacaggcttcttgcacctgggtggcctccgcactgccttgtacaactacatctttgctaagaagtaccaggggagcttcatcctgaggctagaggacacagatcagactcgcgttgtgcctggggcagcagagaatattgaggacatgctggagtgggcaggcatcccgcctgatgagagcccccgccggggcggtcctgctgggccctaccagcaatctcagcggttggagctgtatgcccaggccacagaagcgctgctgaagaccggagctgcttacccctgtttctgctcaccccagcggctggagctcctgaagaaggaggccttgcggaaccaccagacgccccgggtatgacaatcggtgcaggaacatgagccaggagcaggtggcccacaaggctggccaaggaccccaagcctgcgatccgcttcccgccctggaggaagggggggcggacttccgggacctgggaataggatgacacgaggatcggcgtggtcgcgtcgcaggcggaacccgcccgcagcgcggagctccgcgatgcacacataaccgcctggccgcccgcgagaacacgctcaggccgggagtcaaaatacgcgggcccagcgagccacacagaggttggctacggtaacgcggacaggcggacacacgagtgcggctggcgcgccgggcccggccgcgcggtgggtcacgagcagacgcggatcgggtgaaacctgcaaaccagggagcgccgctccgcgggcatcgcggcgtcgctgttcgcgccccgtgacattg

SEQ ID NO: 262896 - DNA, 1101 bp, Homo Sapiens
  misc_feature (65)..(160): n is a, c, g, or t
  misc_feature (193)..(253): n is a, c, g, or t
  misc_feature (388)..(448): n is a, c, g, or t
  misc_feature (876)..(876): n is a, c, g, or t
aagtagcgaggcctgggtggcgaattcggcacgagggctcgctgcctcctctatcgctgcctccnnnnnnnnnnnnnnnnnnnnnnnnnnnnnnnnnnnnnnnnnnnnnnnnnnnnnnnnnnnnnnnnnnnnnnnnnnnnnnnnnnnnnnnnnnnnnnnntccgttctagctcgtcccccaccccaccttttnnnnnnnnnnnnnnnnnnnnnnnnnnnnnnnnnnnnnnnnnnnnnnnnnnnnnnnnnnnnngcctccctgtctttcagtccctgtttttcagccccgtctccctctcggtttctctcccccaccctccctccgggtttcctccccgggggcgcagcgcctctgggcctggcggcgggagtgccggagggtgcggannnnnnnnnnnnnnnnnnnnnnnnnnnnnnnnnnnnnnnnnnnnnnnnnnnnnnnnnnnnnagaagagacggggtgcccgccgcataggaggccggcgccggtagctggcggcggggacggagcgcgggtgaggaaggggcgggaaggccctagcgggaggcgagccggggccccgtggaatcagacgccgtggcggggcgcgccttgagagaagagagatgccgcgcgatcgcaagggcgcgcgcacggcgacgccatggtacgccccacctcgacggtgggtggcgggggcagcgggagacggtggagaccgcgcgacgagaccgcggtcgggagcgaggcaggcggcgcggacggcgcgtcggcagaacgagagggcgccgggccagagcgaggcgccggagggtggcggtcggaaaggcgccgggaggcgcggcagagtggcgaggagggagggcggaggagggtggaggtcggcgcacaaagcnacgcggagggctgcgcacgaagatagcgaccaggggttgggtgacgcggcttggcgtgagcggcgtcagagagccgcgggcgcggcgcgcagcgcccgcgctccgttagatagcgcaacccgcgcacagcgagtacaaggcgacgggcgtgaagacgctgggatgtggaatatcgtcgaggtggggaggccagcgaggctggagagggcacagggacgatgcgcg

SEQ ID NO: 262897 - DNA, 1139 bp, Homo Sapiens
  misc_feature (482)..(523): n is a, c, g, or t
  misc_feature (963)..(963): n is a, c, g, or t
gctgtcccagtctcatcctgccccccctccctcctaactccgctgtcacttctctcctcttggtccctagaagtgagagtcctgaggcacaggaagagcaccaagtctttcaacatgatgtccccgacgggcgacaactcggagctactggctgagattaaggcaggcaagagcctgaagccgacgccccagagcaaggggctgaccacagtgttctcaggcatcgggcagccggccttccagcccgattcgccgctgccttctgtgtcacctgcactgtcaccagtccggagccccacaccgccagctgcggggtttcagccgctgctcaatggaagcttggttcccgtgccgcccactactcctgcgccgggagtgcagctggacgtggaggctctcatccccacgcacgatgagcagggccggcccatccccgagtggaagcgccaggtgatggtgcgcaagatgcagctgaagatgcnnnnnnnnnnnnnnnnnnnnnnnnnnnnnnnnnnnnnnnnnncccggctggccagcatgcccgcctggaggcgggacctcctgcggaagaagctggaagaagagagggagcagaagcggaaagaggaggagcgacagaagcaggaggagctgcggcgggagaaggaacagtcagagaagctgcggacgcggggctacgatgagagcaagctggcgccctggcagcgacaggtcatcctgaagaagggggacatcgctaagtactagaggccgcagactcctgtccgcagcctcgcagctccgttggggccctccgccccagccccagccagccaggccctggtggaaaggctgggagccgcacagccctcccctcctgcgctggaaaccctccctgacccccaccctggccccccgtatccccagcccttggcaacactggagtgcacacgccgccacggttgcccagaaaaagtgcccaangctgctgacgcaaacaacaacaaatgctgcttatttgcatgccgacttacatatatttgcatgtttcgttgactatcaaagagtgcagagtctccccagccccgttgggtggtgacttttgttttcctgcgggggttcagcccttccaggaatgcagcccccttcccccggaacct

SEQ ID NO: 262898 - DNA, 976 bp, Homo Sapiens
  misc_feature (917)..(925): n is a, c, g, or t
gtagcgaggcctgggtggcgaattcggcacgaggcaaacatcgccagtatccggatcagccacggggccaggctcactgtgtcaggctcgggctctggggcctacaaggagccagccatcctcgtggggcctgagaacctcaccctgacagtgcaccagaccgcggtgcttgagtgtgtcgccacgggcaacccgcgccccattgtgtcctggagccgcctggatggtcgccctatcggggtggagggcatccaggtgctgggcacaggaaacctcatcatctcagacgtgacggtccagcactctggcgtctacgtctgtgcagccaacagacctggcacccgggtgaggagaacggcacagggccggctggtggtgcaagccccagctgagtttgtgcagcatccccagtccatctccaggccagctgggaccacagccatgttcacctgccaagcccagggtgagccaccgcctcatgtcacgtggctgaaaaatggacaggtgctggggccaggaggccacgtcaggctcaagaataacaacagcacactgaccatttctggaatcggtcctgaggatgaagccatttatcagtgtgtggccgagaacagtgcgggctcatcacaggccagtgccaggctgaccgtactgtgggctgaggggctccccgggcctccccgcaatgtgcgggcagtctctgtgtcttccactgaggtgcgtgtgtcctggagtgagccgctggccaacaccaaggagatcatcggctacgtcctgcaacatcaggaaggctgctgacccaccggaagctggagtatcaggaggcagtcagcaagagcacctttcagcacctggtcagcgaccttggagccctccacagccctacagtttctacatcaagggctaaccacccccannnnnnnnnccaagctccacccttctggtcccaaccctagcttaagaaaccccctggggc

SEQ ID NO: 262899 - DNA, 1300 bp, Homo Sapiens
  misc_feature (709)..(719): n is a, c, g, or t
  misc_feature (990)..(1032): n is a, c, g, or t
  misc_feature (1092)..(1104): n is a, c, g, or t
  misc_feature (1119)..(1119): n is a, c, g, or t
  misc_feature (1190)..(1235): n is a, c, g, or t
acccgcagcgaggcctgggtggcgaattcggcacgaggctcctgtcagtctttgctcaacatccttttatcagagaggctttctgacatcctgtgcaagatagcacctctcccccatcgctgttatccttacccagtttaattccacgtagcatctgccaacgcttgacatatttgttttttgtttactttctggcctgtgacaactagaatataagctctgtgagagcatttttctcttaactgcttatcttcaagtaaacagaacagtgcctgtcctgtaggaagtgtttgatacatacagattgctcaaatgaaaaaagaacggtgcgagcaagcctggacaggcctggtgccccacggcagccttgccttttctgaagagaatggctgccttaggcatggatctccttgctgcccaaaccttgccaccttgaaaggcgtgaaacggtcactcccacgtgtattcaagcaagagtgcctgagccaatcttgcttggcaaaatgggaggatgaaatagtgtggacataaaagggcatttgggtgggggtgaacatttcaggggatggtggctgaaaccgtgggagcgcccccccctggagcctagagtcaacgaagtggtcaggaccccttttgttgggaaaacagccccccctccaattccacaccaacagtggacatgcgccacgagccccccatgtcaacaccnnnnnnnnnnnatataacctaaacaaatttttaacccaacttggttgtactgtccccccaaaaaaagcgtcttaaacacctttgggtgctcttgggggctcgggccaaagcgcggggcttctgttcgggtggggggaacaaaaacgggcgggggtgtcccccgcgacaatgatatagagcgggcgaccgccaagtaaaaatacataattatttatcctgtaattgtgtggtgtgtgtcgggccgcgtggcgcaagaatatttctcactacactacatagagnnnnnnnnnnnnnnnnnnnnnnnnnnnnnnnnnnnnnnnnnnncgcggcacacaaaaagggggcacgggaaaaccacctatcattcaccactcgcgcgggtgnnnnnnnnnnnnntctcactatatacgngtgggggggtccgccccgtcgcggtgcggcgtgactgtctctaaggtcgctcccacacccccctccagttnnnnnnnnnnnnnnnnnnnnnnnnnnnnnnnnnnnnnnnnnnnnnnctcgcaaccccactacccctcaactggggcaaagaaacaggggggcaaacacagaggggggtaac

SEQ ID NO: 262900 - DNA, 1074 bp, Homo Sapiens
agaattaactttcccgcaccaaggcctgggtggcgaattcggcacgaggggccgaggccctgcagccggaactgcccctggagctgggggaggccatcctggccgaggagtttgacgccgagttccaaaggcactacctgcagaagatgcgcaggaagctgggcctcgtgcaggtggagctggaggaagacggggcgctggtgtccaagctcctggagaccatgcatctgaccggtgccgacttcacaaacaccttctacttgctgagctccttcccagtggagctagagtcgccaggcctggcggaattcctggccaggctgatggagcagtgtgcctccctggaggagctgaggctggccttccggccccagatggatccccggcagctatccatgatgctgatgctggcgcagtcaaacccgcagctgttcgcgcttatgggcacccgggcaggcatcgccagggagctggagcgtgtggagcagcagtctcggctggagcagctgagtgcggcagagctgcagagcaggaaccagggccactgggctgactggctacaggcgtacagagcccggctggacaaggacctggaaggcgctggggacgctgccgcctggcaggctgagcacgtgcgcgtgatgcacgccaacaacccgaagtacgtgctggaggaactacatcgcggcaaaatgccatcgagggctgccgagcggcgggggacttcctcagaaggtgcgggcggggggcttgaaacttactggaaaacccccttacccacctgcgaagggcggggggcccggcaacaagaccgccggagggccaccgggaaggccgaagggggtccggcacgggcaaggccaaccccttccctagcagcaagtaaagccccctcgctctctgtggacaagcaaaaaacctgggggcggtgaacaatgaattcttctccttaaacgggggcctccggggaacgccctccccacaccccctcttggaggttctccccccagagggcgcccccctatggtggccttgcctgtgaaagggggccaacaaacatgtactgcggcccgc

SEQ ID NO: 262901 - DNA, 977 bp, Homo Sapiens
  misc_feature (910)..(921): n is a, c, g, or t
ggcctgggtggcgaattcggcacgaggatttaaggaaaaagatcctcccgggttttatttctctctttcttgagtggactgtttccctataattaaaagaggtggtgagtcctggggtagcttccgcgcctccctgtccacgtgctaacagatcaggacgcccccagcacccctgcctgcttttgctggtggcagtgacgggaccccgactcctcactctcgggccgcagacaatgctgtgagcaagtgtggccatgggcacagaatgtccctttggacgccgctgctgggggctgccaggggccctctggggtcgtgctttgaggcccgtccggttcacgagggggtccgggcagcactgactgcttccgacctgcaggaggcgtaggagcggccctgcgggccctttcacggcagctgctgctgtatagatttgtctccactcagtgacgtgggatttttttgtcttccttttggctttatttttaaactgctttagatattactgctcagtgtttgtgaactttcctagttctctatgttgttagtgcagccagcacccagtggggacctactagaaaaaggaactggcatgcacacgtgcccagcaggaaaagcttcgtcttcacgtcggctgctgccatccagaagaggccctggagcctcacgccgtcgaggctgctctcaggcgttctgttccgggcgaggcttgtgctgcaacgaagggccccctcatgcccgcctgcccctgcgagggcccgggtggttcaggccaaacttcacgttccccgttccccttcccccctagcctgatcccaccggtattcttaccggtgcccgcccccctttttggtgggctcaccacaaacgcttgacccccaccgttttttttgcaactccctaatatttnnnnnnnnnnnntcctttctccactaaacgccccttttttgcacataccttttcccgccgttagcctg

SEQ ID NO: 262902 - DNA, 225 bp, Homo Sapiens
  misc_feature (15)..(15): n is a, c, g, or t
ctctgtggctagaanactcccaaggcccttcggtaccccatcaaagtgggccccttgccaggtggcttttcagttacagagtccaatggaccattttgtagaaccatgcagctccccgcaaaaggtggggtagggtgggaaagaggagcaggtctggaggtttgtggaacccagtcccctacagaatctgtaaaacctaaataaatcatggttgtggccattctc

SEQ ID NO: 262903 - DNA, 748 bp, Homo Sapiens
tctccgctcagtgatgagggattttttggtcttccttttggctttatttttaaactgctttagatactactgctcagtgtttgtgaactttcctagttctctgatgttcagttgatgcagccagcacccagtggggacctattaggaaaagaaactggcatgtgcatgtgcccagcaggaagcttcatctccacgtcagctgctgccatccagggaaggccctggagcctcacgcagtcgaggctgctctcaggtgctacgtgttgccagtggtggcacccgttgtcctgccgagcccagggcgttctgttccgggcgagccttgtgctgcaggggcatcagcatgcaggctgccccgggagggtccaggtgctgcaggcagagttcaacgtggggcttgtccgccctcccttagctctggctcagtgcatcctactgtggggacatctcatgaggggacacgaagtcactgatctcactcccagtatttggagctgggaacccaaatagtgtggcgcaggactgatctgtgcctgttattttggttgtgagtcattgtcctgtggaattggcaaaagctacatttttactgtccttaccagcaacggttcgtgttgtcacatgctgtgagtgcaggctgtggtgtgtccttgtgtgtacatgtatgtatatgtatacatcatgcacaaagcatgtcatgctgctgtccagcggtgaagcaacaagtacaataaaatgtggctctaaa

SEQ ID NO: 262904 - DNA, 1070 bp, Homo Sapiens
  misc_feature (694)..(694): n is a, c, g, or t
  misc_feature (825)..(825): n is a, c, g, or t
  misc_feature (971)..(971): n is a, c, g, or t
gctgggtggcgaattcggcacgaggctccccaggtctgcagggaccgagggcctacacagccatggtctggaagaaactgggctcccgcaacttctccagctgccccagtggctccatccagtggatatgggatgtgttgggtgaatgtgcccaggacggctgggacgaggccagcgtgggcctgggcttgatctccattctctgactttgctgcatctaccttcccccagatcatcaaagcctacaacacgggcaacatggaccagacgctgtccctgtggttcctcctgggctggattggcggacactcctgcaacctcatcgtgctccttccttgctgaccagctgcccctgcagacctacacgagctgtgcatcatctggtggcaaacctgctgatgccgaccttctcctgatcgtcccagagactcgatgcgcatgctactctgagtgcctgccaatcctcaacctccgtgcctgtgggcctcgctggggggactccacatcacctgacagactggaaacagcagaccatcaacgcgtactgcgacgtccggagacccttgcgaagatgaacgttcctgtccgtgggattcgggcagccagaccttcgccccgggcggaagtcgttgccttcgtgatcgaggtccatctccagcctggtgtacctgctatcccgggtgcctcaaatccnccacccacttcgcccggggaggccggccagggggatctcctaactcgtccggtcgggggagagaaacgtccggaaaacgactgggtgcggatgggtccgccgcacgcgaaaacctcaaagatggccctggngggagataaaaaatggtgtctggacgcggcgccccagaagcctgcgagctccccccgaggacgccaggccacggagagcgcaccggcgggagcgcccggtcgcacggccgcgacggcgcgcccccccactcgtcctccagctcggnagcgcccggggcgtgcccgctcgcccggaggcgagcagggcagagacgagaagcagcacaccacgagtacgagcgctcgcgcacgcgaagccgagcaag

SEQ ID NO: 262905 - DNA, 1903 bp, Homo Sapiens
  misc_feature (1079)..(1079): n is a, c, g, or t
  misc_feature (1759)..(1759): n is a, c, g, or t
gggggccttggattcagccccgagagaggggagagaccattcctcctgtggagtgggttccttatcaccagaccggccactctcagaactggcgtccactgtaaatccaggtgccttacgtgtggctctgtcccttatgctgcaggggaaagctgcattgccattgttcccacctcctcactggcagaaagatgccagggctgttagcactgtctcctcaccttctgtttctcattgtggctcctcaaatgggatttgcatgttcctgtcaagcgtaacaacaatcccttctctctttgacagaggcccaggtgggacagtttctactatttgatatttgagtattatctgggatgtggttctggagctgcccagagctgtgcttagtagagtgtgtcttggaaacatgcccctgggcacactgtatctgctacattagtgggctatctcttatctgcagtgttcgcttttgctagaaagaggatgtggaggaaggaggaggtgggcaatctggcttgagttgtgctgtatcctcttccttgttagcttgccttagtctcactggagaccatttgcggatagtgcttggtccatgcccagcaggacagggctttgctgcttctgaaagtctggtgttctgtatctggggctgtgggttcctgtgtctagctgctcaggaaatcttgagaagcattccactctggggtgtaaaccagtatgagtttgaaattcaagcgtttgtacctgagttggggagagaattgcaaggcatactttctctgaaagtaacagaaccattcaggctgccatgttattaaggaatctgaactgttgatagcagttaccttgtgggtgatacaatgggaggcggcaaaaaaactacctgcataggagaccctgccctttgtcaagagctgggagcacatttcatcagagtagcaggcccacctggtgccagagggcctgcccctcctgcttctgttcctttgccttgcagtctcctggagagagcctctcttttcctgtacagcctttgggccaaaatgccccttctagctttctccaaagaagatccaagntttatttcattctatgttttaagaggtaaaaggacataacaagtgaaagaagttttgggctaaagtaggctatgtctccttatgtattactcaatactgttttgcagagaaaacatttttcaagcatgtgcttcctgaagacacctcagtctttgggccatttgatttccaatacatagggtggaagaatgtgattttggggctgaccataaactggaaatttgtgaaatggcagtgattgggcaatcttcagtttattttttcagttgaagtggaactcatttctggaatggatttaataggctgtgtctaatgtacaaactgggtgagtcctgccttagtgtgtcctgccccaccggtacgcttccaggatactcttttcccctctgtaaagtcactttccttctgatggccagtgtcactatgatgtcagtgaggtctgggggatgaagacagtgtgtccctgaaattcacaggactgactcctcaccccagtgcacgaggattcctgtggcatcaggtgctgctgtacctggtgtaggagcctaatcattgaaccattgtgttactcacattccatgtcacagaacatatcagcctcaagaaggatttggtggaggtggatttacactggttttcaaaggaccgtgtaaagtcatgaagttgtgaagtctattttnttctgtaatctatttttacagaatatagaacatcatgactgatcgtcttctcttcttcagtttccccaaaccatccagtttatgcttgtgtcaagtaatagtgcctatgataatgtaattcccatggcgtataagagttccggt

SEQ ID NO: 262906 - DNA, 1347 bp, Homo Sapiens
  misc_feature (913)..(959): n is a, c, g, or t
  misc_feature (1288)..(1306): n is a, c, g, or t
aggagcgaggcctgggtggcgaattcggcacgagggtcatcaggctgacctgcagagcgcaaggccccgagcagagaccaagcccactgaggacctgcggagctgggagaagaagcagcgagccccgctcaggttccagggtgacagccgcctggagcagtctggctgctaccaccattgcgtagatgagaacatcgagaggagaaaccactacttagatctcgccgggatagaaaactacacgtcccaatttgggcctggctccccttccgtggcccagaagtcagaactgcccccccgcacctccaatcccactcgatctcgctcccatgagccggaagccatccacatcccacaccgaaagccccaaggcgtggacccggcctccttccacttccttgacaccccaatcgccaaggtctcagagctccagcaacggctccggggcacccaggacgggagcaagcactttgtgaggtcccccaaggcccagggcaagagtgtgggtgtgggccacgtggccagaggggcaagaaacaagccccctctgggacccgccatccctgcggtgtccccctccgcccacctggctgccagcccggccctcctcccctccctagcccccctcgggcacaagaagcacaagcaccgagccaaggagagccagcagggctgccggggcctgcaggcaccactggcctcaggtggccctgtcctggggcgggagcacctgcgggagctgcccgccttggtggtgtatgagagccaggccgggcagccggtccagagacatgagcaccaccaccaaccatgaacatcaccaccattaccaccacttctaccagaacatagagcccctccccagggccccaccctgccatatgaaggaccccacccccgacaccacaaggcnnnnnnnnnnnnnnnnnnnnnnnnnnnnnnnnnnnnnnnnnnnnnnntaattattgttactccactaatatttagctagcctacatgtagaagatctatggaaacacagaactaaacttttatttatatgttgtggggactgcataactagcccaggaaatgactctggttttgagtggcctgtaatgggcagaggctccctcggggctcgggatctgcagcatctatgtggatcagcccacacccttcccagagccagggagcccttagcctcaactctgccccaccccagcctcttccaggagagcacccttacttggcccggcttccagagaccctcgaaatctccgagaagataaacagctgctacctcttnnnnnnnnnnnnnnnnnnnctcgagactagttccctcgtgccgaattcgccacccaggcc

SEQ ID NO: 262907 - DNA, 1103 bp, Homo Sapiens
  misc_feature (884)..(884): n is a, c, g, or t
  misc_feature (893)..(893): n is a, c, g, or t
  misc_feature (913)..(913): n is a, c, g, or t
  misc_feature (916)..(916): n is a, c, g, or t
  misc_feature (945)..(945): n is a, c, g, or t
  misc_feature (1017)..(1017): n is a, c, g, or t
ggcctgggtggcgaattcggcacgaggggcatgcaggaagtgcacattcatccctccgcaagctgctccttcccagactgcttctcaggcatgcaaggggctctttctgtctgtttccatctggccatgcacatggacaaggctgtgaagccataccctcttcctgtttggattctgcctgcctctggctctccagggcgcagccctgagaacttggagaacttggaggcagcagtgctgtgtccctgtaggggagattgccccgaaggcacaaagggactgtctggaaagcctcggaggcagggagcctagcaaaggtgaagtcggtggcatctgtagggaaccacatggtgcggatcacacgcagcagtggagaagcgagtccatcacatgcctgggtagctgccgtgttggcctaatgcaccacagccatggttcccagggccccccgaggcagagtcgcccacatgggattttcctctcgcctggccttgcataaacatctctccctccctcgcagagcggtgaaggcagaggcttctcccaccctgcctccctcattcctcacctgtgcagagccgcagaatcggggagagagtggcctgggggcaaacaggatggggagcagcctgggcgggcagctgtgagggaagctggctgagggacaccacactttcctgtctcccacccctgggatctcctgtgtctcctccttttgtatttcctggctccactcaggggagtctgcggaggtcctgctggctctggggacagggatgtcagacaggcctgggggcccgccgtaccctgagcctgtgcaaaaaacttcaaaggacagaggaggcctctgggatgagccctttgtcagagacatgccttttccntcccggggnctggacatctatgctgccanagnaggtggcagccaggcctggggagacccantcagcctttaggatccttagccatgcacagtaatgtgtcagtctgaggccaaagtcaccttaggactgacgnttgcccctaaaacccagtcttccctgactttgcctgcacggggccaatgcgtctgggataaaacggtcatgtgctaagccacgttg

SEQ ID NO: 262908 - DNA, 1199 bp, Homo Sapiens
accgcacctggtaccagtgggtcaggggctctgtcggggctgtggacagccacacggtcattatggagccgatgaaagcaacgtcaaaccagaaagccaggccgtggaccagccctgaatgcagcatgtggaatttgaatgggatttctatcctgtgcaaatctccttctttggcttctaagaagttcaccgtgtacttgacagacttggccatcaggatccggatgtcaaatgtgtccaccacaggctgccggaaatactcatccaccgcggcacctcggagggccgacaggtccactccatggaaagatggctggtaccagaagttggccttggtgaactgctccatgtagagctgttcatccgtgaagggtgcaaggtggacgtcaccaatggtaggaaacatgtttccgctgggcttcaggtacttcttggcgtggaggtagctctccagcatgcgctcgttgaagagcatgtagcccatgggctccgagatgatgatgtccacctgctcggggagtgacacctcctccaccttgcccgggatgaccacgatgcggtccgtcaggttgttactcttcaccaagacctcagcgtgctgggccatggtgctggcctccaccgcgtagattttccgtgctccagcttgggcggcaaaaaacgacaggatcccagagccacagccaacatcaagaacgatcttgtccttgaagtcggtgtggttttgcaggatggcgcgctggtaggtgcctgtccgcacgtagtcctgcatcatgttctgctgctgggacaggtagccataaaactggaagtactgcacggcagaagactcctccgtccgctcgctgaacacagaccgctccagggtgtggccccggcaggttttcaggatgttgtagaaggaacagaaatcgttgggtgtggcgaactggatgaggacgctgttgcagcccagggtgatgatgaaggactgcttgcccacacggctgcactctgtctctcgggacactgagcacttaaagacacacacatcttcatggctgtagagggcgatgcccgccgagtccgggccggcgcgcacctcgaggcgcagcgcctgctgctccgcgtgccgctcatcgtgccgaatcaaccaactatagagaaggtgaatgtggagcagatgctgaggggtcagggtgtgcgtgcgggcttgatgt

SEQ ID NO: 262909 - DNA, 954 bp, Homo Sapiens
  misc_feature (44)..(196): n is a, c, g, or t
  misc_feature (236)..(344): n is a, c, g, or t
  misc_feature (931)..(931): n is a, c, g, or t
cggaggggcgcgacagaggccaagcacgcgggcgagcaaggacnnnnnnnnnnnnnnnnnnnnnnnnnnnnnnnnnnnnnnnnnnnnnnnnnnnnnnnnnnnnnnnnnnnnnnnnnnnnnnnnnnnnnnnnnnnnnnnnnnnnnnnnnnnnnnnnnnnnnnnnnnnnnnnnnnnnnnnnnnnnnnnnnnnnnnnnnaagcgagaacccaacaagggaggagggagacggagggacnnnnnnnnnnnnnnnnnnnnnnnnnnnnnnnnnnnnnnnnnnnnnnnnnnnnnnnnnnnnnnnnnnnnnnnnnnnnnnnnnnnnnnnnnnnnnnnnnnnnnnnnnnnnnccgctacttgagcagccttcgcatggtgcccaacgaaggggctcctgtactcccgcccgaagtggttccagtggttcaggtagttaaacagctggtagagcagcagccgctggtcgaagcccggagccttggggatcttccggtggtaggcggtgaagaaggatctggggaaccccccaaacatcaaggcgattgccagttcaaactcggaatggccatagaaggaagccgggtcgtaaataatgggccccacgtcgtcctcagccacgtttcccgaccagagatccccgtggagcaacgcggggacaatctctaggccacaaaacagatccgggatcttcacctgtagccgggaccagagttctcgtgcctctcggtcagcatagtccttctcaatgagggtccagctgcgcctggagccggtgccgggcgaaaaaggtcggccagtcatcctgccactcattcacctgcgggatgaagccgcaacacgtcaccgtgtggaagccgaacttgtccacatactgaggctcagcaccctcacccctcgtgccgaattcgccacccagccccgcacttatccgcggggncgcgggctttgttgtcgcccttc

SEQ ID NO: 262910 - DNA, 943 bp, Homo Sapiens
  misc_feature (736)..(736): n is a, c, g, or t
  misc_feature (836)..(836): n is a, c, g, or t
  misc_feature (855)..(855): n is a, c, g, or t
  misc_feature (862)..(862): n is a, c, g, or t
  misc_feature (873)..(873): n is a, c, g, or t
  misc_feature (917)..(917): n is a, c, g, or t
ggagattatcttaggtacccatggaaatgccattcttgtatccatcttacaggggcccaagatgataaatagtaaactcaaaattgctccccactctgtttattatttaaaggtgtcaggatctgtgttgtaatgtgtctacattaatgtgtttaggagaatacaggcattggatcatttagttgatggaagtatatgccaggcaagggagataaggtatacgacaagactgatgttttcagtacttctcatgaggttgtcagagaccttcatgtcttcaaagactagtcagcaaatgaagtggtttagtgtagagacaagattggttgtgttttgataatttaagctaggtattgagtacatgtggattttgctgtccacaaatacttgtttcagagttttcatggatacagtggcatggttgaaatgaagctgtgagccttctgctttaaatctgatgtaagaaactcctgttaacaaatagtaagtatgggttaattagccctttgatcaaagccctagctttacattgtttacgatctttggaaaacaattggtttggttgcccactttccgtaggatcaagagcagaacctttcacatggcacagaagaacccaggctgcgcttcatacctgcatattcccagccttaccctgccatttctctccttggcactttgtgctccaccaacactggtcctcagttggtcatcctcaaacttgggttccatatcnagcctcaggacctctgttcctgttactatggttccttgcatgtcgcctgctcttactaaagagctcgtgtgttttccagcacacttcggtttatctcgtngatgatgatgctagtctcnccctccngcaagggcganaatggctgcctggttggttttgtaccagtgtttcctaacgtgtnagctgcagtcaggtattgtggctaaa

SEQ ID NO: 262911 - DNA, 837 bp, Homo Sapiens
gagcgaggcctgggtggcgattcggcacgagggaaacccagcaggcggcgaagatggcggagaacagcggtcgcgccggcaagagcagcgggagcggcgcggggaagggggcggtgtccgcagagcaggtgattgctggcttcaaccgccttcggcaggaacagcgaggcctggcatccaaagcagctgagttggagatggagttgaatgagcacagcctagtgatcgatacactgaaggaggtagatgaaactcgtaagtgctaccgcatggttggaggagtgctggtggagcgaactgtcaaagaggtgctgcccgctttggagaacaacaaggagcagatacagaagatcattgagacactgacacagcagcttcaggcaaagggaaaagaactaaatgaattccgggaaaagcacaacattcgtctcatgggagaagatgagaagccagcagccaaggaaaactcagaaggggctggggctaaggccagctcagctggagtgttggtctcctagggaccaaggcctttgcatttttttctaccctgactcccacttctaatttctctttattgttattattattattttctctgctattgtaatatttttttgttaattaaatgttttggtcagaatcttaacccacgggcctgccctcgttcctgtccccaccccatgtgccccaaaccacaggcacttcctaggccctcagcaacaccccgaatgaatatttgcaaattgggttttttgggggtcccccttggcccctttaaaaggatttttcctaaacctttggctttgggccgccgcgggcccccgaagggataggttt

SEQ ID NO: 262912 - DNA, 914 bp, Homo Sapiens
  misc_feature (855)..(855): n is a, c, g, or t
  misc_feature (900)..(900): n is a, c, g, or t
tgggtggcgaattcggcacgaggtgaccatgctgaagctgattcagaagaagctgctggacaagacatgtgaccaggtcatggagttctcctggagtgccctgtggaacatcacagatgaaactcctgacaactgcgagatgttcctcaatttcaacggcatgaagctcttcctggactgcctgaaggaattcccagagaagcaggaactgcataggaatatgctaggacttttggggaatgtggcagaagtgaaggagctgaggcctcaactaatgacttcccagttcatcagcgtcttcagcaacctgttggagagcaaggccgatgggatcgaggtttcctacaatgcctgcggcgtcctctcccacatcatgtttgatggacccgaggcctggggcgtctgtgagccccagcgtgaggaggtggaggaacgcatgtgggctgccatccagagctgggacataaactctcggagaaacatcaattacaggtcatttgaaccaattctccgcctccttccccagggaatctctcctgtcagccagcactgggcaacctgggccctgtataacctcgtgtctgtctacccggacaagtactgccctctgctgatcaaagaaggggggatgccccttctgagggacataattaagatggcgaccgcacggcaggagaccaaggaaatggcccgcaagtgattgagcactgcagtaactttaaagaggagaacatggacacgtctagatagaggcctccgtccccatggccgccaccgcttctggacccacaggcggggaggaagcatgcttcagcagcccagcgggcgggccccttccgaaggagcctcccacgnagtgaagagacatgggggacttttgcacaaccgacgcttttcctnaatggtagtgagaa

SEQ ID NO: 262913 - DNA, 895 bp, Homo Sapiens
  misc_feature (603)..(603): n is a, c, g, or t
gagcgaggcctgggtggcgaattcggcacgaggctgaagcagcagctggccaaggagttccaggcccccatcggctctgaggagggcttgcgcctgctggaagatcctgagcgccggcaggtgcgttctggggccagggccctgctcaacgcggagagcctgcctactcatcgaaaggaggagctgctgcaagcactcagagagttttataacacagacgtggtcacagaggagatgcttcaagaggctgccagcctggagaccagaatctccaatgaaaactatgttcctcacgggctgaaggtggtgcagtgtcacagccagggtggcctgcgctccctcatgcagctggagagccgctggcgtcagcacttcctggactccatgcagcccaagcacctgccccagcagtggtcagtggaccacaaccatcagaagctgctccggaaattcggggaagatcttcccatccagctgtcttgatagctgctttcctcccagttaggacaagtgggaagctggagccaaggttgaagagtcacctccttcccattttactacatccattaatttgtcaaaggcctgggtggaccccaacttcanaaataactaacccttagaccctaattccccagggatggcccttctggccttggaacaaaaaagaatatttggtttttgcaaaggggaaagatcttaatggggcttttggcgaacctttcaacacggggcacgagggggttccttctccccaccttcccacccttccttgccggagccaatgaacgaaacggtcccccttccgccctgctcttccgtttttggaccgttttgccccttcccgctattggggacagactcggccgtaggaggcgcacacaaagcgcaaccaacg

SEQ ID NO: 262914 - DNA, 1500 bp, Homo Sapiens
gcaaaagagggagaaagaacgaggcctgggtggcgcctcagcagcgagggcagggagagaagtcagccacgccctcacggaagattctggaccctaacactggggagccagctcccgtgctgtcctccccacctcctgcagacgtctccaccttcctggcttttccctctccagagaagctgctgcgcctagggcccaagagctccgtgctgatagcccagcagactgacacgtctgaccccgagaaggtggtctctgccttcctaaaggtgtcatctgtgttcaaggacgaagctactgtgaggatggcagtgcaggatgcagtagatgccctgatgcagaaggctttcaactcctcgtccttcaactccaacaccttcctcaccaggctgctcgtgcacatgggtctgctcaagagtgaagacaaggtcaaggccattgccaacctgtacggccccctgatggcgctgaaccacatggtgcagcaggactatttccccaaggcccttgcacccctgctgctggcgttcgtgaccaagcccaacagcgccctggaatcctgctccttcgcccgccacagtctgctgcagacgctgtacaaggtctagactcaaagcctctcccatcccttggcctggaccagtgagctggggagggactcggatgaactgaggcgcagcctacgccattgccttggacaggactctggccacaggcagggcgggtctgtgtcccatgtgtcctgtcagtcccctgagtatgtgtgtgggtgtggcgcatgtgcaggtctgtgcctcctgtcgggatttgggttttaacgtcttctgctggcccagccctgctctgttgtggggagttggcccccaggggaaagggctgtgagctgctccgccattaaactcacctccacctgagggcgctctgctgatctccgcctgggccctgatggccgtccccacccacctgccttccggcccggctccctggcggagccaagaacccagggagttgcccgcgtgctgtccttcccctctgtgttgtgattgggttgtttcctgccctgcctggggctgcttctcgtcaccaagccctggtcctgcggcagctgtcacccctaccatccataccactgtgctgaccgctcagcctgaagagcagagaatgccatgggtgggactgtgggggtcggatcgtggggttgttggcagagggcaaccctgggccccacaccatgtggacaggcagacaccagattgtccaggagcaggagctgctgggactgcgctggcccggacctagtgggccttctcctggctgctgagatgtcgtcgtgtgactggcctggctggagggggagtgtagacaaccaaagctgttctccagtctggggagggagaggcaggtcccaatgtcgagctgcatctggacgctgtctaaaggactccgggggcagggagcgaaaggctgactggcaaatgtggttgacttcttacaccgtga

SEQ ID NO: 262915 - DNA, 1292 bp, Homo Sapiens
ggcgaattcggcacgagggtaccttctgtggttcccctgggtggagatttccgaaaagtagtcttctctgaggctgggccaagcctgagggaaatggggccctaggagggtgggggcgggaaggaggggcaaggtctttcaggaaccagacccaacaggcccttctgtagcctcccccttgccctcaaagggggagtgggggccagctttacctcacccactgtgacccgccgcttccccttcagcctgggaccaggctttcctagatcccagcacagctctgagcttgttcctttgaggcatagagagccagagtctggcttccagagcattgacttcctcttcctagacttgaggccttttctctggctttcctcctttgccctgcagtagcaactggtgctgggacaagttgacccacctctcacagtcatgggtgtggcccacttgtgggagtctcctgtccacctcccagagacggccacccagcgggtctggcttcccagaaagttaactgatgattgtggggtttgtcatatctgggagggaagatgggtgctgggagagggttgggggcagggggcaaggaaaattgctacctgatttgttgaagatttttcctcttgccttacacatggaggttccaggaaacctcttgcagaacttcacacgtgattcttcaagccacacccacctgaaatcaaaccaaaggagtgctgtggctccccttgccctgccaccctttccctagtcttttgtagattgcactaatttacatcctagcaagaatcaacactgtatcagtccacagacctgctgagctgcagccacttgctctaggagctaaggacttgcattttcagtttgttcctgttgcccagaggccctgttctcacctcatgctgctccccagagtagactaacaggctcagtcccctgttgtccttgtggagactaggccttggccctggccctgagactctgtgagggggctggagcagcctggttatttcctatctgtaccaaagaggagtatggtgggagagggagttggagtgcagtgtggcttgggcctggtgctgggaacctgctagctgagcacttccacaagggcatacccctgggggcaggggctggggctgagaactgcagccctgggtcttcccttagggaggaagggcagatgaaccccagcaggcttaggaggtggcactgggtgaggacagctgggcaggggctgcagagggaggtggaaatgaaccctgagggctcccccaacttgccatgccctg

SEQ ID NO: 262916 - DNA, 925 bp, Homo Sapiens
  misc_feature (682)..(682): n is a, c, g, or t
ggcctgggtggcgaattcggcacgaggctttatagcggccgagggggccttgccttccgcactcgggcgcagccgggtggatctcgagcaggtgcggagccccgggcggcgggcgcgggtgcgaggtgatccctgacgcctctgtccctgtttctttgtcgctcccagcctgtctgtcgtcggttttggcgcccccgcctccccgcggtgcggggttgcacaccgatcctgggcttcgctcgatttgccgccgaggcgcctcccagacctagaggggcgctggcctggagcagcgggtcgtctgtgtcctctctcctctgcgccgcgcccgggggtccgaagggtgcggggctctgaggaggtgacgcgcggggcctcccgcaccctggccttgcccgcattctccctctctcccaggtgtgagcagcctatcagtcaccatgtccgcagcctggatcccggctctcggcctcggtgtgtgtctgctgctgctgccggggcccgcgggcagcgagggagccgctcccattgctatcacatgttttaccagaggcttggacatcaggaaagagaaagcagatgtcctctgcccagggggctgccctcttgaggaattctctgtgtatgggaacatagtatatgcttctgtatcgagcatatgtggggctgctgtccacagggngagtaatcagcaactcagggggacctgtacgagtctatagcctaccctggccgagaaaactattcctcagtagatggcaatggcatccagtctcaaatgcttttctagatgggtctgctttctttcacaggaacctagccaaaaagtaggtacaccaggaaggcccaaagggacaaagcaggtggtccccagccacattccacccaacagggggaaaccggcttaaagaaaaacccccgcgcg

SEQ ID NO: 262917 - DNA, 904 bp, Homo Sapiens
attcggcacgagggcttcctttccctggctggtgctgtcaggaaggaccatctgaaggctgcaatttgttcttagggaggcaggtgctggcctggcctggatcttccaccatgttcctgttgctgccttttgatagcctgattgtcaaccttctgggcatctccctgactgtcctcttcaccctccttctcgttttcatcatagtgccagccatttttggagtctcctttggtatccgcaaactctacatgaaaagtctgttaaaaatctttgcgtgggctaccttgagaatggagcgaggagccaaggagaagaaccaccagctttacaagccctacaccaacggaatcattgcaaaggatcccacttcactagaagaagagatcaaagagattcgtcgaagtggtagtagtaaggctctggacaacactccagagttcgagctctctgacattttctacttttgccggaaaggaatggagaccattatggatgatgaggtgacaaagagattctcagcagaagaactggagtcctggaacctgctgagcagaaccaattataacttccagtacatcagccttcggctcacggtcctgtgggggttaggagtgctgattcggtactgctttctgctgccgctcaggtgaactctggtccaggtcccaggatagcactggctttcacagggattagccttctggtggtgggcacaactgtggtgggatacttgccaaatgggaagttttaaggagttcatgagtaaacatgttcacttaatgggttaccgggatctgcgtgcgagcgctgacagccatcatcacctaccatgacaggggaaaacagacaaaaaaatggggggcatctgtggtggccaatcatacctcaaccgatcgatgtggat

SEQ ID NO: 262918 - DNA, 888 bp, Homo Sapiens
  misc_feature (589)..(589): n is a, c, g, or t
  misc_feature (722)..(722): n is a, c, g, or t
aggagcgaggcctgggtggcgaattcggcacgaggcgggtctgattgaagctccccgcagggttcagcatggtttgtgcgtccacaccacaagcagcgcttctcacagacgtgcacagacctgaccggccggccctacccgggcatggagccaccgggaccccaggaggagaggcttgccgtgcctcctgtgcttacccacagggctccccaaccaggcccctcacggtccgagaagaccgggaagacccagagcaagatctcgtccttccttagacagaggccagcagggactgtgggggcgggcggtgaggatgcaggtcccagccagtcctcaggacctccccacgggcctgcagcatctgagtggggcctctaggatgtgcccagcctgccacaccgcctccaggaagcagagcgtcatgcaggtcttctggccagagccccagtgagtgcccacggaggcccccagcacacccaacgtggcttgatcacctgcctgtccagctctggtgggccaagaacccacccaacagaataggccagcccatgccagccggcttggcccgctgcaggcctcaggcaggcgngggcccatggtttggtccctgcggggggaccggatctgggcctgcctctgagaagccctgagctaccttgggggtctggggggtgggttttctggggaaaagtgctttccccagaacttccctggctcctggncctggggagggggtgcccccaggggcacccccacctgagcccccttcaccgggaaagaaggagaccccccggggggccaggtggtccaacttttaaatcaggggaccgggggttcttctcattaaaactggtggggccgggccccaaaaaaacgaacatgaaaaac

SEQ ID NO: 262919 - DNA, 990 bp, Homo Sapiens
aaggaagcgaggcctgggtggcgaattcggcacgagggtcctttaaccactatttgggaggtcgggccatcagtttcggcgttttttccagagaggcaggctcacagcgatatcgcgagagacggtaagctccctctttcgaccccctttttccaactcctccggcggctaaaagaagtttaaatctgattggatgtcggcaaggaagttgataggctgaaataactgtccatcactcgcttaaaggggtaggcctgtataacggaggaggctgactgaaggtgaaagactagaacacgtgcttgctgtgggacgtcacttagatgtcgcgagagggtgactgtgcgccagccccgcctccccgcgttttcggcgttctccccacaaacatttgttaagttccgtggggtgtttggctgtgcttcggcccttggagttcgaaacttctgagctccccgccgtcgtacctgtgccggccaaggggcggggcaggctttccggctgtcggggccctccagtccctcaggaagccgtcctgggacgcctagcggacaccattttacgtcgctgtggtagctgagtgaacagccggggggagccccgccccccgcgcgcgggagagcgccgcccgcggtcacctgggcccgcggggcagagagttcacggttcctgcagcctcgggtcatgctgacgccccccggggcggtgctaacacgtaacacgcgggacctcgagagctaagaagcaggggcgaactaagaacgcagccctcgccccagaagcccggtctctcccgcggagctacgcgtttcccgcccaagtaactcggggtaaacccgaggggaagtgaacggtcccttccccggccttgggggcccgccggggccggggccccgaaactgtccgggaacacccgcgggacagtgtttttttgggccgcgctgtggtttaatggttggaaaacctcggcggggggattttttaaaattc

SEQ ID NO: 262920 - DNA, 1003 bp, Homo Sapiens
ggcgaattcggacgaggcttattttcagatgaggaggactctgaggatttgttttcttctcaaagtgcgagtaagttaaaaggtgcgtctctgctgcctggcaagctccccacgttggtttccctgtttgatgatgaagatgaagaggataatctttttgggggtacagctgctaagaagcagacattgtgtctacaagctcagagagaagagaaagcaaaagcctccgagctctccaaaaagaaagcatctgccctgttgttcagcagtgatgaggaggaccagtggaatattcctgcttcacagacccacttagcatctgacagcaggtctaaaggagaacccagggattctgggaccctccagagccaggaggccaaggctgtgaaaaagaccagtctctttgaggaagacgaagaagatgatctttttgccattgccaaggacagccaaaagaagacccagagagtgtcactcctctttgaagacgatgttgatagcggaggctctctgtttggctctcctcccacatctgttcctcctgcaacaaagaaaaaagagactgtctctgaggcaccacctttgctgttcagcgatgaagaagagaaggaggcacaacttggagtgaagtctgtggataagaaggttgagagtgccaaggagtcattaaaatttgggagaactgatgtggctgagtcagaaaaagaaagacttttgactagatctgctcaggaaaaaggcaagcattctgatttattttcttcatcatccccatgggacaaagaacccacccctaaaaccaaaactgttccttaacttgtttgatgaggaagaaggataaaaagggaagaatcaaaacattatccccggctcccccaaaagaaataggaaaagggccccgaattctggatgcccacccccaagaagacagggtggcttccacggatgaagaaactggctttttcggccccaaagcctccaaaagggcaaaggaccccaggag

SEQ ID NO: 262921 - DNA, 1021 bp, Homo Sapiens
tggtccagcaaaagggtcaccatctggtccattgcccttgggagctggtggtgaaaagcagctctccatcctgaagaccactgtgctcttgggtgggcatcaggatcgcgccccttccctattctttctgtggagcctggataatgtttggatcttccattttatctcctccctcatcaaacaagctaagaacagttttggttctaggcttggttcctttgtccccatggggatgatgaagaaaataaatcagaatgcttgactgtttcctgagcagatctagtcaaaagtccttccttttctgactcagccacatcagttctcccaaattataatgactccttggcactctcaaccttcttatccacagacttcactccaagttgtgcctccttctcttcttcatcgctgaacagcaaaggtggtgcctcagagacagtctcttttttctttgttgcaggaggaacagatgtgggaggagagccaaacagagagcctccgctatcaacatcgtcttcaaagaggagtgacactctctgggtcttcttttggctgtccttggcaatggcaaaaagatcatcttcttcgtcttcctcaaagagactggtctttttcacagccttggcctcctggctctggagggtcccagaatccctgggttctcctttagacctgctgtcagatgctaagtgggtctgtgaagcaggaatattccactggtcctcctcatcactgctgaacaacagggcagatgctttctttttggagagctcggaggcttttgctttctcttctctctgagcttgtagacacaatgtctgcttcttagcagctgtacccccaaaaagattatcctcttcatcttcatcatcaaacagggaaaccaacgtggggagcttgccaggcagcagagacgcaccttttaacttactcgcactttgagaagaaaacaaatcctcagagtcctcctcatctgaaaataagcctcgtgccgaattcgccacccaggcctcgctaccta

SEQ ID NO: 262922 - DNA, 1068 bp, Homo Sapiens
gctgggtggcgaattcggcacgagggcggcccaagggcggaagtgagaaagttgtctgcgtctcgaggcgagttggcggagctgtgcgcgcggcggggcgatggggggctcgggcagtcgcctgtccaaggagctgctggccgagtaccaggacttgacgttcctgacgaagcaggagatcctcctagcccacaggcggttttgtgagctgcttccccaggagcagcggagcgtggagtcgtcacttcgggcacaagtgcccttcgagcagattctcagccttccagagctcaaggccaaccccttcaaggagcgaatctgcagggtcttctccacatccccagccaaagacagccttagctttgaggacttcctggatctcctcagtgtgttcagtgacacagccacgccagacatcaagtcccattatgccttccgcatctttgactttgatgatgacggaaccttgaacagagaagacctgagccggctggtgaactgcctcacgggagagggcgaggacacacggcttagtgcgtctgagatgaagcagctcatcgacaacatcctggaggagtctgacattgacagggatggaaccatcaacctctctgagttccagcacgtcatctcccgttctccagactttgccagctcctttaagattgtcctgtgacagcagccccagcgtgtgtcctggcaccctgtccaagaacctttctactgctgagctgtggccaaggtcaagcctgtgttgccagtgcgggccaagctggcccagcctggagctggcgctgtgcagcctcaccccgggcaggggcggccctcgttgtcagggcctctcctcactgctgttgtcattgcctccgtttgtgtttgtactaatcagtaataaaggtttagaagtttgaccctatgtgtgacatgagatacactggtatgaggaaggactggacttctcttctaagagccttcaatcatcctaggaataagcagcatatcgagcagaggccagcgggaagtcaagccgcacccacgctgggctggtccccggtgggagggtgtgga

SEQ ID NO: 262923 - DNA, 1117 bp, Homo Sapiens
tgggtggcgaattcggcacgaggggttctcggacgtgagtgaactggggctaggtcatcgggcggcaccctgcacagagctcctgggccagcctgcgccagggatgctgctgagctgggagccgccatgcctggccttgtttctggaccactgggagcagcactgcagcccaggggagctggagtccagcttggagcagccacaggcccagggagctgtagcaagagggtagtccaaaggcagatgccagacaagacacagccaggaacccggccaggtccccccacatgcccctcagggcccaggcctgagtgagtgctgctcagatgtgactgagagggatgacctccttcagcagggcagctcctaagaggctgcgtgcaggtgcgtgtggggggagatgccacactgtgtcggggccatggtgcactgtaggtggctgcaatggtctctctgtaaggaaaatcactgacagcagctccttctggacccagtctggaaggtctagagggggatagaatttttatttcatatccttatgtggtgcttggaaaatgtttttaaccttgaccatgtattatgtttataattaaaaacccaaagaacccagctcatggtttggaaaaggaatcttccactgaaacatttggatacccgacgttctccctggacacttggcccggcaatagttggggtctcctgggaagctgagtgctggcttctagcctctccagttccctcagactctgtcttcagctcgggccccctccgttctgtctccctcgactccaagtcagggaatacccggggggcttcctgccctcaccccacaccttaaagaccatccccactggcttgcctggctggccccctgccatctcgcactcagccctgggtgcctgtgaagcctggccccactgcctgccgggggttcctgcagcacccccctactccaggctccccatctccctgaagcttccagggtagcagctggtgggacactgatctgtgagctctggaatgtctgcttagaattctgagaggcaggaactgctctgtctttgtaactactcaaggccaactgtcacatgaaggaatgaataaagagtttttactg

SEQ ID NO: 262924 - DNA, 507 bp, Homo Sapiens
cacccattttatagatgagggaactgagcttcagagaggctgggtgggccaggttcacctgggtagctgtaaacccaaggacggatggaagtggagcagcatggctttcacagcgtgcccagtgtactcagagtgaccccagagtctgagaagtccctgagcatctgtctccctcgactccaagtcaggaataccgtcggcttcctgccctcaccccacacctcaagaccatcccactgcctgcctgcttgccccctgccatctcgcactcagccctgggtgcctgtgaagcctggccccactgcctgccgggggttcctgcagcactcccctactccaggctccccatctccctgaagctcccagggtagcagctggtgggacactgatctgtgagctctggaatgtctgcttagaattctgagaggcaggaactgctctgtctttgtaactactcaaggccaactgtcacatgaaggaatgaataaagagtttttactgacttgt

SEQ ID NO: 262925 - DNA, 1009 bp, Homo Sapiens
aaagagcgaggcctgggtggcgaattcggcacgagggccagctggacgggcacaccatgaggctgctgaccctcctgggccttctgtgtggctcggtggccacccccttgggcccgaagtggcctgaacctgtgttcgggcgcctggcatcccccggctttccaggggagtatgccaatgaccaggagcggcgctggaccctgactgcaccccccggctaccgcctgcgcctctacttcacccacttcgacctggagctctcccacctctgcgagtacgacttcgtcaagctgagctcgggggccaaggtgctggccacgctgtgcgggcaggagagcacagacacggagcgggcccctggcaaggacactttctactcgctgggctccagcctggacattaccttccgctccgactactccaacgagaagccgttcacggggttcgaggccttctatgcagccgagggtgagccaagaggggtcctgcaacatctcagtctgcgcagctggctgtgggggtaactctgtcttaggccaggcagccctgccttcagtttccccacctttcccagggcaggggagaggcctctggcctgacatcatccacaatgcaaagaccaaaacagccgtgacctccattcacatggggctgagtgccaactctgagccagggatctgaggacagcatcgcctcaagtgacgcaggggactggccggggcgcaaccaactcacggcctgggattcccgcacctttgggaaggccaaggcctggcctgatcatttggagggcccggaagttccagggccagcccaggggaaccccggggaaaactctatcccccccctaaaactaccaaaaatttacttggcccggggtgggccccgcccccgggaaaatccccagctaactaaggggaaggcttaagggaaaggaaaaattttgcctggaaacccgcccaaagggggaagggttccccattgaaaacacaatatttggccccccttc

SEQ ID NO: 262926 - DNA, 558 bp, Homo Sapiens
  misc_feature (30)..(30): n is a, c, g, or t
  misc_feature (456)..(456): n is a, c, g, or t
tgacttgcaccccccggctaccgcctgcgnctctacttcacccacttcgacctggagctctcccacctctgcgagtacgacttcgtcaagctgagctcgggggccaaggtgctggccacgctgtgcggcaaggagagcacagacacggagcgggcccctggcaaggacactttctactcgctgggctccagccgggacattaccttccgctccgactactccaacgagaagccgttcacggggttcgaggccttctatgcagccgaggacattgacgagtgccaggtggccccgggagaggcgcccacctgcgaccaccactgccacaaccacctgggcggtttctactgctcctgccgcgcaggctacgtcctgcaccgtaacaagcgcacctgctcagagcagagcctctagcctcccctggagctccggcctgcccagcaggtcagaagccangagccagcctgctggcctcagctccgggttgggctgaagaaggctgtgccccaactcccattcacccaccatggacccaataataaacctggccccacccca

SEQ ID NO: 262927 - DNA, 946 bp, Homo Sapiens
  misc_feature (890)..(890): n is a, c, g, or t
aaagagcgaggcctgggtggcgaattcggcacgaggctaacatggccttgcctcctactcaatggagaaactgggcaccatcagaaggagctgccacataccctcagactcaccaaacagtctgcttcttaccccagtgtaagcactgaacaggcaggtgggtgtatgggtctgagactgaggagagctggcctgtagacacaggtttggaaatcttcaacaaaaagacaataatgagatcacccaggggatgtgtgtgaggtaaaaagagcctagtttttgaactctagaggacatcgatgtttgtgaacaagagatatctgtaagggagactggaaaagagcagccagagagatcacaaaacccaggagcatgtgggtcagagaaatcaatggaaggaagtggtcagctgacatgataatgactggcgtgtcctgtgaaccagaaacatggaggtctttaaccatctttgttagagcagttctgtgcagtattagatgaagatgccagacttctgttaacttgagtgtgactggaaaatcattctgtggaaagcacaaggactcctagaagcctctgaggaagcagagatagcaagtataaggtactctgccaaggatgtctatgcatgaaggaaggagagagatctagtggttgccttggggagatgctggtttagtggagagttcctaatgaagataacagcccatgtcatttggggcatgcttaagactgtagaaaggccagcagaagagtggagagatgaccaagcagctagttagtagagggagcccatccccctgaaaaaaaggttggctgtgtccaaaaaaagggctcctcccttgtgatggggtggccttttagtcacttgaaaacccccaagccccagnccggctttttcctccagcctccctttactccggaagttggcatttacctttccccc

SEQ ID NO: 262928 - DNA, 1000 bp, Homo Sapiens
  misc_feature (463)..(489): n is a, c, g, or t
  misc_feature (954)..(955): n is a, c, g, or t
gctgggtggcgaattcggcacgaggaccacttcagcatcatgcagcagcggcggctcaaggatcaggaccaggacgaggatgaggaggagaaggagaaacgtggccgcaggaaggcgagcgagctgcgcatccacgacctggaggacgacctggagatgtcgtccgatgccagtgatgccagtggtgaggaggggggcagagtccccaaggccaagaagaaggcgccgctggccaagggcggcaggaaaaagaagaagaagaagggttcagacgacgaggccttcgaggacagcgatgatggggacttcgagggccaagaggtggactacatgtcagacggctccagtagctcccaagaagagcctgagagcaaggccaaggcgccgcagcaggaggaggggcccaagggtgtcgatgagcagagcgacagtagtgaggagagtgaggaggagaagccgcctnnnnnnnnnnnnnnnnnnnnnnnnnnnaagaaggcacccaccccgcaggagaagaagcgcaggaaagacagcagcgaggagtcggacagctcagaggagagcgacattgacagcgaggcctcctcagccctcttcatggcgaagaagaagacgccacccaagagagagcggaagccgtcgggagggagctcaaggggcaacagccgcccaggcacgcccagcgcagagggtggcagcacctcctccaccctgcgggcggctgccagcaaactcgagcaaggggaagcgggtgagcgagatgcctgcagccaagcggttgcggctggacacgggaccccagagcctggcctgggaaagtcgacaccccagccaccatcaagcaagacaacaccaaacagcggcgacgtgcaggtgactgaggatgcccgtgcgccgctacctgacacggaagcccatgaccactaaggacctgctggaaaagttccagaccannaagacgggctgagcagcgagcaaacaggtgaacgggtttggcccc

SEQ ID NO: 262929 - DNA, 1006 bp, Homo Sapiens
ctagggagcgaggcctgggtggcgaattcggcacgagggggagaagctgagaaaccagagctgaacagcttgtttctagaagggcctaggcataaggtatggtttgggaaattgccttggccaaggacctttttggagctgcagatattctctcccaagtttagtatctgtgaagattgttctggcctagctagggaggcggacatcacaagtgagctgaagtccagaagcaaagaaaagcacttcttcagagaaacaggagtgcaccatctttagggagctgggattccgggagggccagttaaggagccatgtggggaacaggctaggaggggaggaagctgtgtttggagctagggaatatctcagaggctcaaaggcaatgaatgttaaggcctcagtgtgaaaaaagcccaggccataggatgactcactcctttatttcccaagctctgttctgcgtagacaatgaaacctcactgagattcttgctggtatggagtgggtggagggattgatgcctaactataatcagggccgacttcctagcagcaacaatacaccagatgacctggaaatagggggagggttgtagagtggaagggtgtgttgcagatgggactaggggactagcataaagggactaatgaactggtttgcctgggctggggtggagggcaaggattgccacctattggctgctgaaggtaggtaggtctgcatttaagcaggatgctcaagagacctggcccaatgcaagatactatcttttaaaactatgtcaacatttgcatcttatcagaagatacatgacattttatggaattacctggggggcttggattttttgaaatccattttatccatccctggaaaggccctccgcccttccaaaatccctaaagcgcccccaagaccaatttcgggggggcctttaaggtgaacccgaaaaattttaaaggcctgggggtaaaaaacccccgaaaagggtgtggtgtttgggggg

SEQ ID NO: 262930 - DNA, 679 bp, Homo Sapiens
  misc_feature (463)..(485): n is a, c, g, or t
  misc_feature (509)..(541): n is a, c, g, or t
actgtgtccgtggtgtgtattatgctgtcatatcagagtcaagtgaactgtggtgtatgtgccacgggatttgagtggttgcgtgggcaacactgtcagggtttggcttgtgtgtcatgtggctgtgtgtgacctctgcctgaaaaagcaggtattttctcagaccccagagcagtattaatgatgcagaggttggaggagagaggtggagactgtggctcagacccaggtgtgcgggcatagctggagctggaatctgcctccggtgtgagggaacctgtctcctaccacttcggagccatgggggcaagtgtgaagcagccagtccctgggtcagccagaggcttgaactgttacagaagccctctgccctctggtggcctctgggcctgctgcatgtacatattttctgtaaatatacatgcgccgggagcttcttgcaggaatactgctccgaatcacnnnnnnnnnnnnnnnnnnnnnnnccttgcccctttccattagttgcnnnnnnnnnnnnnnnnnnnnnnnnnnnnnnnnnaaagatggagtctccactatgttgctcaggctggccttgaactcctgggctcaacaatcctcctgcctcagcctccctagtagctgggacttttaaatggaccccacttggccctggcttggaaatcctttacgaaag

SEQ ID NO: 262931 - DNA, 1043 bp, Homo Sapiens
ttcgtcgcgcccctcccatattacatcggtgacccgcctgcgtggcgaattcggcacgaggtctgagtgttccctggcccacgtgtgtggtgtttgtgtgtctgtgcctggccaagggaggtgccaacactgggcttgccacagccccaggagaggaatttggggcctaggaaccgagggcacacgggactctagcctcatccccaggacccccttggctcagagtgtggtgctagaaactggtccccagcccagccccagtactgccacctttacacctacccctgcaagtccccagagggctgcccacgatagaagctgccaagcagggagaacctgtgccaactgtggagtggggaggttgggcctggaccctcaacccctgcaaccttccctagccccctcaatagatgagcaggtcaggctgtggcccttacctcacccgcagttctcgcccagtgctgcagccggctcacctctctccgcttcttgcacatcactggcctgtgtgtgctgcttgctcctgttctgttcgcttgctcccgttccgttcggcttttgctttgcgttagggtgaagaccctagcgtccagctcccctcaacgctatattttgacactaaaaaagaaggtttctaaattgtaggagcaggatggaaatactttgctgcccttgccatcttttaggatgggcccccaggagactgaggtcttcctgggccctcattgctgcttatcgtaccccccatcacctgcacatgggacagaccgggctggagggtgaccttggctgtgtacgtcccagcaaaagagctctggcccgcatctcgctgtgccctgaagggggatgaaaggcgatgcctcgcccgaggctttgggctgctgcactgcatgctgggactgctcctactctctgtcccacccctcacccagctgtggtccggctttgggagagtggtgaattgcgctgcccgaactcggagcggagcagggtagggaccgtgtacagcttgataacccttaataaaaagggagtttgaccaa

SEQ ID NO: 262932 - DNA, 1079 bp, Homo Sapiens
  misc_feature (72)..(114): n is a, c, g, or t
tcagattacgaggaggtggtgtagggggtggaaagactagaatggggcggcgggggtgtgggtacgttggtnnnnnnnnnnnnnnnnnnnnnnnnnnnnnnnnnnnnnnnnnnntatgtgtgcaccgcgtcggtgggggtcggcggtggtggagcggcgaacacaaccgccagtgatatgttggtgtaacggaggtggtccgctccccgccctggcgaattggggagacggggggccgagggatattttgttgtttgacgaaacgcctacgcccggggagttcttcgtaacgggagcctgatttgagggcggtcgccccttccccatgggagaagggaatgagacttgtgggaaatggtaaggagagtgtacccaggccgaaactttgctgcttgggactgtgtttgcgtggcttctccagggtggaggccaactgggtgggggggtggaagattaaaatggtgttctctccttgtgaggcggcagggaaaataaatttagggggccagagtaaagggggggattcaggtgagtacatccaattgttgacatagtttgggggtggggagaaattttgctattatatcaacttaacttcttaaaatagtgtaggtgggattaacttggttttatttccacagagacctcctggaagcgaggatcctttaacaatcctggaatatacactgcagtaaaagaacaaagcacacctcagccttaaacgacagaagaagaatgtcaagtgggaaagtgacgttggttttcagtttgtggattctgaatccacacaaacacaggattgcattctgaaaacctgaattaattattgtccttacctcaataaaacaaaaaattagaatcaaaatcattagtatgacagtcacagatatcgccaagatgagtttgttcttatagccatatcctggaacttctttcatgagctcacttgacttctgctctttctgttcattctgttccatgttctcattaatataattgttttttgcctcgtgccgaattcgccacccaggcctcgcgacttttttttgtatggtcccgtgggggaggaaaaagaaaaa

SEQ ID NO: 262933 - DNA, 478 bp, Homo Sapiens
  misc_feature (44)..(44): n is a, c, g, or t
  misc_feature (50)..(50): n is a, c, g, or t
  misc_feature (92)..(92): n is a, c, g, or t
ccctgaaatgggatggtccaggaaacccccttttgcaaggggancctgtncccccagccctctgttgcccgaacaggcccctccctgtgaanccctccctcagccgagcaggcagggaagccaaaggccattggaatggtaggaatggggatacggggccccaacaaaaaacaaattatattaatgagaaccatgggaacagaatgaacagaaagagcagaagtcaagtgagctcatgaaagaagtcccccaggagatgactataagaacaaactcatcttcgcaatatctgtgactgtaatactaataattttgattataattttttgtcttatagaggtgaattcacataaaagggcatcagaaaaatacaaagacaacccatcaatatcaggagcctgagcatgagttaaagcatgtggatggcctggagctatgtttttaaaattgttattaaatattggttttttacttaaaa

SEQ ID NO: 262934 - DNA, 1140 bp, Homo Sapiens
ggcctggagtggcgaattcggcacgaggccctgacccatgtatttgttggactttgtgaagccagaatttctcttgcttaggacacttgctcgatgcctgattttgtgggatgatattttaccaaattccaagtgggttgacagcaatgttcctcaaattataagagaaaatagtatctctctcagtgaaatcgaattgccgtgctcagaggatttgaatttggaaactttgtcccaagcacatgtctacataattgcaggagcctgcttgtctctgggttttcgatttgctggctcagaaaacttatcagcatttaactgtttgcataaatttgccaaagattttatgacttatttgtccgcacctaatgcttctgttacaggtcctcataacctagaaacttgtctgagcgtggtgctgctgtctctcgccatggtcatggctggctcaggaaacctaaaggttttgcagctttgtcgcttcttacacatgaaaacgggtggtgaaatgaactatggttttcacttagcccaccacatggcccttggacttctatttttgggaggaggaaggtactctttgagcacatcaaattcttccattgccgctcttctctgtgccctttatccgcacttcccagctcacagcactgacaaccggtatcatctccaggctctccggccacctctatgtgctggccgcggagcccaggcttctagtgcctgtggatgtggacacaaacacgcccctgctatgccctctatagaacgtacctacaagggcactcagcggtatgcaacaacaccaacagacgaatcgatggctcctacccattgcatatccagaaccaccagctcccacaacgcagatacacgcaaagaggcccacgcatacctgggaacctgctcaactagactaacacgcacgaggacacaccacagcactcgacagatccagtccgtgttcccacgggatctggggctaaacactggctacaactatccgagagcgcgaaacagccaacatcgcaacacaaagcaagactccaaaaaggggactggggcaacagcgtacgagatggacgccagaaccaggaagaataacacaagaaacactagacaaacccacggaaatcaaca

SEQ ID NO: 262935 - DNA, 347 bp, Homo Sapiens
tagcgaggcctgggtggcgaattcggcacgagggttggggacacatttctatatctacctggatggaccaagggccaagtctggatcaatgggtttaacttgggccggtactggacaaagcaggggccacaacagaccctctacgtgccaagattcctgctgtttcctaggggagccctcaacaaaattacattgctggaactagaagatgtacctctccagccccaagtccaatttttggataagcctatcctcaatagcactagtactttgcacaggacacatatcaattccctttcagctgatacactgagtgcctctgaaccaatggagttaagtgggcactg

SEQ ID NO: 262936 - DNA, 1643 bp, Homo Sapiens
  misc_feature (35)..(35): n is a, c, g, or t
  misc_feature (98)..(98): n is a, c, g, or t
  misc_feature (177)..(177): n is a, c, g, or t
  misc_feature (610)..(619): n is a, c, g, or t
tgtgttgtggtaggtgtgtaagagacccgaccccnccatgtaggggcgcggcagagcgaatacgagcttcgtgcgtcgcagagggttgcgggagggtnggatgggtagcagagagggggtggtgttgcgctggccggcaacgcatgtaaatgagaaggagacacggcgtttgcgcgngagggcgcacaggaggagggtggggtgaagacggggggtgcggcggtccgcgtgagatgcgtagagacatatgggtactccggctagagcgtcgcaggatatagtcgctgatcgctcgccttgggcaggtgagggggatggcggtggtgtcgctgttatccgcccatccgtgataggggtacagagagaggcgggggtggtaaccgtgtgaaagagagaaatgcgctataatacaagagcgggggaggttcaaattatccgcgcgcgccaccccgtggaggtgtgatgtgtacgagggaagttgttatggagaccgcgcgcttgagggcatagtggataaagtgagactaaaagtgtcgcaacagtagccgctgtttgttttaacggtccagtgtggcaaaaaaaggcggggtgacgccttatctgctttcannnnnnnnnntaacggccggcaagggcccgagacgggaggggagggtggtcgagaaaaaaatggggccgcgacgagaagaggttgacgacgaggggcggctggtccgagttgcagccggtaataagaaggggatcgtctaggagaagtggggcccaccagtatttaagctcggtctggaaaaaggtcgagattggtaaagcggttcgtaggggcggggtgtttggggaacgcaaatgggcttcggttgggcgggggttggatacagagcatccctggcaggctcgaagtgagccccgacaggcaccttcttcctgatggtgtgggattggagaggagtcagacgtaggcccccagggctgcatgaaactctgttaggcactgtaccagctgctgaaacttgggcctctcctctggatctaaggcccagcaacaggccatcacagcaaataattcatcaggacagttgattggctgggctattcggtaaccatctttcaggtatgcggccatctcgaaggggtcaatgtccacgtagggagtctggcccagagtcatgagttcccacagcgtcactccaaaggcccacacatcactagcgctagagaactcgttattaaccagactttcaagagccatccaacgaactggcctgttttcattgtcccccagacagtgatagtccatggggaacaagtctctggagagggcattgtctgtgatcttaacttgaagtgtgtcatcaatgacacagttcctggcagccaggtctttgtggatgacttcccttctggccaggtagctcattccacaggcaatctgaatagccatgtgtaccaggtcttgctgagaaattgcctgtggattattggcctctactaacttgcacctgtcgtaaaaacatttaagattcccccattcatgtaaggcaatatcaccatgggcttttctccttcttctatacacacatgagtaataggaagaagatttctgtgatgaagacctcgcagcttacaactttcagtgagcatcattg

SEQ ID NO: 262937 - DNA, 448 bp, Homo Sapiens
  misc_feature (30)..(30): n is a, c, g, or t
ccttcttccctgatggtgtgggaatggaanaggaattcaaaacgttaagccccccaggctgccatgaaaactctgttaaggcactgtaccagctgctgaaacttgggcctctcctctggatctaaggcccagcaacaggccatcacagcaaataattcatcaggacagttgattggctgggctattcggtaaccatctttcaggtatgcggccatctcgaaggggtcaatgtccacgtagggagtctggcccagagtcatgagttcccacagcgtcactccaaaggcccaacacagttcctggcagccaggtctttgtggatgacttcccttctggccaggtagctcattccacaggcaatctgaatagccatgtgtaccaggtcttgctgagaaattgcctgtggattattggcctctactaacttgcactgtcgtaaaaacaattt

SEQ ID NO: 262938 - DNA, 424 bp, Homo Sapiens
  misc_feature (24)..(24): n is a, c, g, or t
  misc_feature (78)..(78): n is a, c, g, or t
  misc_feature (120)..(120): n is a, c, g, or t
acgttaaggccccccagggctgcnatgaaaactctggtttaggccactggtaccaagctgctgaaacctggggccctnctcctctggatcctaaggccccagcaacaggcccatcacagnaaataattcatcaggaaagttgattggctgggctattcggtaaccatctttcaggtatgcggccatctcgaaggggtcaatgtccacgtagggagtctggcccagagtcatgagttcccacagcgtcactccaaaggcccacacatcactagcgctagagaactcgttattaaccagactttcaagagccatccaacgaactggcctgttttcattgtcccccagacagtgatagtccatggggaacaagtctctggagagggcattgtctgtgatcttaacttgaaggtgtgtcatcaatgac

SEQ ID NO: 262939 - DNA, 952 bp, Homo Sapiens
  misc_feature (738)..(738): n is a, c, g, or t
ggagcgaggcctgggtggcgaattcggcacgagggctgagtgacagcccatcaatgaaaaaggagagcgagctgcctcgcagggtgaactctgcctcctcctccaacccccctgccgaagtggaccctgacaccatcctgaaggcactcttcaagtcctcaggggcctctgtgaccacgcagcccacagaattcaaaatcaagctttgagcaggggagtgaggcagccagaagtgggggcagaggagggtggctctgtttccccaaggcaaagcttatgaccaatgggccatcggactggagacccctgattgtgggaagggttgccggggataaagagcttcctcactggatgggacccgcctttctgtgttgtgttctgccctgtgctcttctctctacgttaacgtttcctgtagtatgtttcttcatctcatcgccaaggtaggcttgtgtttttcagtgtgtgcctccccgagcctcagccccaagctgatttcttatctggaaatggtacactgaattctctgggtggctttcttgtggccccatgggatgcagcgtgggggctgtctgaaggaccctgctttttccaggggccgaggggctgcctttcctttgtgtgtattaagcttttcaaacaatggagggggatggagagccctggtgtcctgacgggagccaggtcggcctgagagctgtgccgctcctctgtcttggccagtggaagtggcctggngtgggggaacaaggtctcaggccctccttggcctcctccccagtgggctcccagccctccactagtggcaaagggcagggatgagggctgcccccgcctggggaaaaagtctatcttaagttccttgggcctgggaagtccccggggtcgtcttcccgcccccagaggaaaggttcctccaggaggttcacccttttcccttttttcccttggg

SEQ ID NO: 262940 - DNA, 1172 bp, Homo Sapiens
  misc_feature (38)..(38): n is a, c, g, or t
aaaaccgggagggctcacaacacagccccctccccagnaaagacacccagaagggaaagagagctggggtggggcattcagcacaactcaaggaaaagggaaaggtgaactctggagaacttcctctgggcggagacgacacgggactccaagccaagaacttagatagactcttcccaggcggtgcagcctcatcctgcccttgcccactagtgaggcctggagccactggggagaggacaagagccctgagacctgctcccccacccagggcacctccactgacaagacagaggagcggcacagctctcaggccgacctggctcccgtcaggacaccagggctctccatcccctccattgtttgaaaagcttaatacacacaaaggaaaggcagcccctcggcccctggaaaaagcagggtccttcagacagcccccacgctgcatcccatggggccacaagaaagccacccagagaattcagtgtaccatttccagataagaaatcagcttggggctgaggctcggggaggcacacactgaaaaacacaagcctaccttggcgatgagatgaagaaacatactacaggaaacgttaacgtagagagaagagcacagggcagaacacaacacagaaaggcgggtcccatccagtgaggaagctctttatccctggcaacccttcccacaatcaggggtctccagtccgatggcccattggtcataagctttgccttggggaaacagagccaccctcctctgcccccacttctggctgcctcactcccctgctcaaagcttgattttgaattctgtgggctgcgtggtcacagaggcccctgaggacttgaagagtgccttcaggatggtgtcagggtccacttcggcaggggggttggaggaggaggcagagttcaccctgcgaggcagctcgctctcctttttcattgatgggctgtcactcagccgcagcaggatgggctggtctgaggtgataacattcccattcaaagaaggttgcacttcatcggctgcccgtccagacaccggttgttgtacttcttatatgcggtgatggcatcgtcctttttcacaaacaccacctccgctaccccaggatggaccagtcgagctcgcttgagggccccacacacacagaaaagctcaaccc

SEQ ID NO: 262941 - DNA, 1103 bp, Homo Sapiens
  misc_feature (362)..(386): n is a, c, g, or t
  misc_feature (853)..(853): n is a, c, g, or t
  misc_feature (906)..(906): n is a, c, g, or t
  misc_feature (929)..(929): n is a, c, g, or t
  misc_feature (960)..(968): n is a, c, g, or t
  misc_feature (1043)..(1044): n is a, c, g, or t
  misc_feature (1053)..(1053): n is a, c, g, or t
  misc_feature (1077)..(1077): n is a, c, g, or t
attcggacgagggcgaatgggggggcgcggagcagacgccggaagtagtggtggtacgggtccgactgaggggtactcgccaccggctgcgtccacccgagcggctgcgagagcaaaggcccgagggggtgggcgtggcggccgccgaaacacaaccccctctgttccctctcttcgcggagcggcgccgcgtagcttccatccgccagctgccatgagcgagcgcctccgtcccaggaaaaggagaaggaatggcaacgaagaagacaaccatcttcccccccagaccaaaagaagtagcagaaaccctgtctttcaggattcctgggacacagagtcttcaggcagtgacagtggtgggnnnnnnnnnnnnnnnnnnnnnnnnntcaatagcccggacagggccagcgggccggaaggcagcttgagccagaccatggccggatccagccctaacacgcctcagcccgtgcccgagcagtccgcgctgtgccaaggcctctacttccacatcaaccagaccctgagggaggcccacttccacagcctacagcaccgagggcggcctctgacatgatgtgccggcagtttcttgccttctgtgaagggacagcgctgtgcagatttgatatttcaacttacaacttgttttaaaagaaaaattgcacacgaaaaatgcctgttggcttttcagtctatatttgaaataacaggttaacaggcagttgtttacttgtgggtttgctgcactattgcaatttcaaaaggggctttgaagcaatttttttataggattccttttgagggagggtatcaaatctatgtcaagggtagtgggtttgaggaaaactcnatctgtgtggtgaaatcatagtatggtccattcagactgattttcaatctgtncactagaaactctactttatgtnaagggcttttaaaaatggcgggatcttcaannnnnnnnnatttcaataaaactagtaaagagtatctagttttccatgaaaaaacattaagttttttttcccaaatataagaanngcttgattncagtccttgcacctgaaaattaanctggcaatacttacctcccccagaat

SEQ ID NO: 262942 - DNA, 1748 bp, Homo Sapiens
  misc_feature (234)..(258): n is a, c, g, or t
  misc_feature (870)..(910): n is a, c, g, or t
  misc_feature (957)..(965): n is a, c, g, or t
  misc_feature (1444)..(1444): n is a, c, g, or t
  misc_feature (1469)..(1469): n is a, c, g, or t
  misc_feature (1597)..(1597): n is a, c, g, or t
  misc_feature (1606)..(1606): n is a, c, g, or t
  misc_feature (1619)..(1619): n is a, c, g, or t
ggggcagacgccggaagtagtggtggtacgggtccgactgaggggtactcgccaccggctgcgtccacccgagcggctgcgagagccaaggcccgagggggtgggcgtggcggccgccgaaacacaaccccctctgttccctctcttcgcggagcggcgccgcgtagcttccatccgccagctgccatgagcgagcgcctccgtcccagtcttcaggcagtgacagtggtgggnnnnnnnnnnnnnnnnnnnnnnnnntcaatagcccggacagggccagcgggccggaaggcagcttgagccagaccatggccggatccagccctaacacgcctcagcccgtgcccgagcagtccgcgctgtgccaaggcctctacttccacatcaaccagaccctgagggaggcccacttccacagcctacagcaccgagggcggcctctgacatgatgtgccggcagtttcttgccttctgtgaagggacagcgctgtgcagatttgatatttcaacttacaacttgttttaaaagaaaaattgcacacgaaaaatgcctgttggcttttcagtctatatttgaaataacaggttaacaggcagttgtttaccgtgtggttttgctgcactattgcaatttcaaaggggctttgaagcaattttttataggattcttttgagggagggtatcaaatctatgtcaaggtagtggtttgaggaaaactcattctgtgtgttgaatccatagtatgtcccattcagactgatttccaaatctgtcaactagaaactctactttatgtaaagggccttttaaaaatgcgggatcttcaattttttttattcaataaactagtaaagagtaaaacccacacnnnnnnnnnnnnnnnnnnnnnnnnnnnnnnnnnnnnnnnnnggcgattctctgcacgcaagacgccgaacatgcaccccagggccggnnnnnnnnngccgccccacaaaaagcctttcccaaaacatttgcggttggggcccgcgggccccccgggcggtatagggtgacacggcggcacaaaccttgttttccccaaaggaaaaaacccccggggaccatcggaacaaagggggcttgggtttctcgctccgccgcgaatgaaaaaaaccccccccgcggcggctcatcctcgtcagcgggttttctcggaaaacaccctcctccccctcgtcggccacctcctccggagaggcgccccttctcaacccgtggggtaatccggtgaagacaaaaacgagaggaacatcattccacaactgagatagagaaaggtatggtgcgtgatgtagtctcgcaacatatccttattgatcccctcatccacacctctagctttttcggaaccccctctcaccctacgcgcgctcatatacatcgttgggggtggggacagcaaccggatattctttagtntaggcccccattgttgtcattttcntctcttacaatgtcgcgtcctgctgtgcccactgctttcccgcgtaaaaaggcgggcacttggtgtctcgccgggcaccaccacgcgggaggaactctgcgcgccccaactgcgcgctcatatctacngatgaaaancacgaatatacgnatcttcaaccttatgtgcgaggaatataaaaaccaatatctcctgcaacccccggaggggggggaaacacacgcacggcgccgggggtacaaaccggagagaaagttatttacccgcacccagctgtgg

SEQ ID NO: 262943 - DNA, 1216 bp, Homo Sapiens
tagtaagctctgcctaaaatgaagtgaaagctgcacttaaccctttgtgataatgatgacacaaaatgaatattaatggaggatattcctcggaaaaacagactttgggaatgaaggagggactcaggatcattgttatcagtgggccaaagttagattttgctttcaagatttgcttttcgggcctgatgattttaaagcaaaaatcaccctctagttgaaagagcttacagctcgagtcaccttttagctatttgtctgctttttatttacccttgtatgttatcctcagagggaagatgataatatataaataatataatgaacacacccttagtttctcataagcatttgccctcaccatggtttataaaactttggggaaaacggaatattcagaaataggtttccgccatgtactgaaaggtctgtggccatctgtgaggtagatgaagaagcagcatagtggtctccttacatctaggcctaactgtccctcttcctgcccccgggtaccacagtccacctttagaccctactgtcgccccatcttctccgtggatgggccatgcgtcctgaaaacaggacatcagattcactggttctgtaacccagtagctgtgacgttccatctcttctaaccagccatggccttcccctcctctgccatacccttaatgcggccctcagattagatgaaaaacttgctcctggtggatcccaagggaccctcaaggacctcgaggttactgcagtcagatgccatctcaacccctgtgggggccaaagtttttatgtgggcagatgctgtggtcaggaactaggcatgctttctggcaatgcactcaccagacaaaaatccccttgatgtaaatccccatgttaatttattaaatttcagtcagaaggtcagcatttacatgacagaatgtatgtagagagttggggtgtctggtaggcaaactgcaaggcagttgagatagttggattaagaggctagacgagacatagaatactattggtatgtgtgcaatttcatgaatattaaattatgtttcgaagtccagttgtcattcccgcattcagatttcatttgctgttgctttatacgttacgtacccaaggacattgcctcagggttgcaaactctttaaaggaaaatttatccatatatccatgtattatatagaagaataaaaattgagtttacttcaaa

SEQ ID NO: 262944 - DNA, 679 bp, Homo Sapiens
  misc_feature (636)..(636): n is a, c, g, or t
gtgtgagccactcacacctggcctaaaagctctgttttcaatggtaagttctggaacccagtctgaagctatacaaaaaataacaccaatggccaaggggtctgacctcatcctagaatgccctagagccgtggtgatcccctagggaagaaagaggcagctccaggtctcaccaaggtcagccaaatatccattctctcccactctgtcagagatgtgagggactgaaggatgtcaccactggtgaatgagagaatgattcagaactgcctctctgccttctggcaaggctgcctgccagggaaataaaggctggctttgcaattctagatttgtgttttgggatccatggactgagatgactatctgaggtggccacagaggtggtctctggtcacacctgcaccggtcaaaagttgaagactccaggccattctgtaactggtctcctacactaacccctatccaacctgtgctgatgggtcttctttttctgattcttctcaccaatgactgcaccctgtcaagtgccagctggatacagtcagacaacacggctgtccacaaaacacacacgggggcacagacacaatactggagacacatctttggttcgatccttggagaaaggtgtgnaaaacacctcgtgccgaattcgccacccaggcctcgctaccta

SEQ ID NO: 262945 - DNA, 1297 bp, Homo Sapiens
  misc_feature (323)..(364): n is a, c, g, or t
  misc_feature (426)..(468): n is a, c, g, or t
  misc_feature (1053)..(1053): n is a, c, g, or t
  misc_feature (1076)..(1084): n is a, c, g, or t
  misc_feature (1146)..(1146): n is a, c, g, or t
  misc_feature (1181)..(1181): n is a, c, g, or t
ggcctgggtggcgaattcggcacgagggcggttcaggcgccagagctggccgatcggcgttggccgccgacatgacgcccgaggacccagaggaaacccagccgcttctggggcctcctggcggcagcgcgccccgcggccgccgcgtcttcctcgccgccttcgccgctgccctgggcccactcagcttcggcttcgcgctcggctacagctccccggccatccctagcctgcagcgcgccgcgcccccggccccgcgcctggacgacgccgccgaccctctgatacgcgaactgtcgccacccctgtggcgccggtcgccnnnnnnnnnnnnnnnnnnnnnnnnnnnnnnnnnnnnnnnnnntcgcacgaatgacgggccgtgccgtcgcggccacaatcccccttctcgcgagccggcagtgnnnnnnnnnnnnnnnnnnnnnnnnnnnnnnnnnnnnnnnnnnnagaccacgaaccgcccaccgaccaacgacggcccctccgaccaacacctgccccgccccatataggcgccctttgacccccacggactctgacagccggtacctccctccaccccatccgatcctcacgcgagcgcgtcgcgccaatgcaccctcgcagcatgctcgcccaacgacaccgcccccggccgcgatattttttccccccgtccactaaccgtcgttccgcctggcggcccttcgccgctccgtaccgcttccgcggctcttccgcggtaccgctttcgccggacataggaacgcccctcctcgcccgccccgcattcgcggaccggcgacactacaggaagcgagctacagataccagctcgatcaataccggcgtgcgcgactatgggggccaatgcgtgcggcacgcagaactagatgtggcccgcaaggcattagcaatggtagtcgcgggatccgccactgagcaccccttggttcctcgcgccccctctcggtttgtcggcctgccgacgcgcacgttcccctgttctggcccgccctcttccacctctcacgagcgactcgtgttgcgcantagataccccgtgtgtcgccggnnnnnnnnntgctccggttagcgcctaagccgcgttccgcgctaccgcgcttatcgcgcttcggcacgcgnctcgccgcttatccatcctcgctcacgcattgcgnttcgcaacgccctatctcgcgcttcggcgagcaacccgcgtgacaccggccccccctccgcggactacgagcgtgggggaacacacggccgccccacggaaacccccgcggcaccg

SEQ ID NO: 262946 - DNA, 1694 bp, Homo Sapiens
  misc_feature (49)..(104): n is a, c, g, or t
  misc_feature (163)..(412): n is a, c, g, or t
  misc_feature (1026)..(1076): n is a, c, g, or t
  misc_feature (1097)..(1147): n is a, c, g, or t
ggcctgggtggcgggaaccttcccacaattgtttttttgtttgtttgannnnnnnnnnnnnnnnnnnnnnnnnnnnnnnnnnnnnnnnnnnnnnnnnnnnnnnntggattcaagtgttagtagctgggattacaaaagcatgtggccccacgcccagctaagnnnnnnnnnnnnnnnnnnnnnnnnnnnnnnnnnnnnnnnnnnnnnnnnnnnnnnnnnnnnnnnnnnnnnnnnnnnnnnnnnnnnnnnnnnnnnnnnnnnnnnnnnnnnnnnnnnnnnnnnnnnnnnnnnnnnnnnnnnnnnnnnnnnnnnnnnnnnnnnnnnnnnnnnnnnnnnnnnnnnnnnnnnnnnnnnnnnnnnnnnnnnnnnnnnnnnnnnnnnnnnnnnnnnnnnnnnnnnnnnnnnnnnnnnntgaaccactgtgcctggcctgtttgtttgtttgtttaaaacatttctccatcactcattccaggtcccagagcaaactctctctgctctcggagcctgtgacactggctatgtgctccacagtttcagtcccaggtcatactctccaacagttttcagagctccatatatatgtagatgccatcctttctaaaaacttctcacgacctcctggaatattcctattgatctcattttatttagcatcacctcaagaaactaagtcttagtgcacagtatcacaacaaagaaaaagctttgtttttataactggtaaaaacaagaaaagattctcatcaaaatgaaaatataaaattaatcatttctcaccaaagagtatgcctgggagcctccagctgttaaaagacaatgctattactacttcttatcaaaaatctgtaatgccctgtgaattttatgatacctcttcaatacaaaggggtaatatgtgtcatcagcaaaataacaaccaacaaaatgccactttcagaaaactgtatgtaaattttttgtaacaatgtaaaaaagaaatggggagtaagtgttcacatcattaaaaggctttgaattcatggnnnnnnnnnnnnnnnnnnnnnnnnnnnnnnnnnnnnnnnnnnnnnnnnnnngaagaccgcaaacaacccacnnnnnnnnnnnnnnnnnnnnnnnnnnnnnnnnnnnnnnnnnnnnnnnnnnnggaaaatggccataagctgtttccaaagaaaatcctggggcatgaactaaggcattggattcctcaccaataacaaagggcccgggcgccaacgcgggcgtgtaaagaaattattccaaaatgtgtttttgtggggggcggtcactgcaataatataagaaaggaaaggcaaattctaggcttcaaataataaaattaacgccccccgcccgggcccgttcttccccatccaccgaaagaaaaatacctcccggggttcctgcccaaaattggaaaacaaataccaaaaaggggggtggattgaaccttggaattcccgcgggggcaatacaagagcccttcgccggccttttgcattaaaaaaatatttcccccccggccgccaaaacgggggtttaaagaaaagttgtcccataatttgtgccccggtttaacctcccggagggggagagaaccttcccccacagggttttggggtaaaaacacaaacaccgctgttttccaaaaaccaccccttttaggcgagaataggaaaaaatattcccct

SEQ ID NO: 262947 - DNA, 997 bp, Homo Sapiens
  misc_feature (301)..(317): n is a, c, g, or t
gggcccacagaaaaacgccccctttgagaggggagtcctatttctttccgcggccggggggaaaccccccccgcccagggagcccttggcaaaatttccgccgggagcgtttgttttaaagcccccccgaagcccagtagagcggagaggtttgtcgcccaaccataaacccttctggggtgctccgggcctttttttggggccccccagcccccaggttcgcctttctgcgggtgcccccagcccggggggggctcccagctgccgaccctgtgccctgggccactgccttgagaagggnnnnnnnnnnnnnnnnnaaagtccaagggcccctgctgggggtggccccaaggtggttgagcctgaggtagagcacagggaaggaggtctggaggcgacagggccaccacggagcgcagcaagttgctcagcgtctccaccatccggagccgagccagacacctcctcgatcttctcaaacgtccgggccacagccaggtaaggaaccttctggcccggtttccagcaggcatcttccacgggatgatagttgttcttggcaggattgtaaccagatggatccaggggtccctcagcagctccctcctttcctggagcccctggctcctcttccttcacttcttttttgactgctggcttccggggggtgaagaagctgctgagcgtcttgggagctctgcggggaggcttggtctgctcttcctcctcctgcagttcctgcttcgtggccacctcaggctctgaaacgctttccgtcggggtctctgctttggaggtctttaggggcttgggaggcgtggtgggctggtccccgtcttctccttccttctctgttgccacttcagcctctgtgaggctttctttcggggtctcctcttcctcctccttcttcctcttggcttctctgtcctcgtcctcactctgctcttccaggacttcctgaatggtccgcctcgtgccgaattcgccacccagc

SEQ ID NO: 262948 - DNA, 893 bp, Homo Sapiens
  misc_feature (781)..(781): n is a, c, g, or t
  misc_feature (789)..(805): n is a, c, g, or t
  misc_feature (807)..(817): n is a, c, g, or t
ggagcgaggcctgggtggcgaattcggcacgaggctctacgtgaccgacgccgcggagctttggagcacctgcttcacgccggacagcctggcggccctcaaagcccgttttggcctgagtgcggctgaggacatcaccccccggttcaggtgagacccaagcagggaggaaggacgggtggggaggaggagggtctgccacagctctccgcacctctcctctcccagggcagcctgtgagcagcaagctgtggctctgactctgcaggaggacagagcatccctgacgctttcaggggggccctcggcactggcctttgacctctccaaggtaccaggcccagaggcagcccccaggctgcgggcgctgacactgggcctggcaaaacgcgtgtggagcctggagcggcgactggcagctgcagaagagacagctgtcagcccgaggaagagcccccggcctgcagggcctcagctcttcttaccagacccagatccccagagaggtggccctggacctggagtcaggaggcggtgtccaggagagtcgctcatcaaccccgggttcaagagtaagaaaccagctggtggcgtggacttcgatgagacctgaaggtgcagcacaagcgtggccccgcggggagtccgcctatgaggggagaggcagtctttgaggcccccatcagagaccccccgccaccacctccacctgcctgtcctgggccaggactaacacggctcctcaaattccttccctgtcaaataaacagctccccttggntggaaccnnnnnnnnnnnnnnnnnannnnnnnnnnnaaaatgttcgggcggcctccggcccctcgagaagcctttctaaaaacatttccgttttggcggcgccgggccccca

SEQ ID NO: 262949 - DNA, 1047 bp, Homo Sapiens
  misc_feature (523)..(531): n is a, c, g, or t
  misc_feature (643)..(702): n is a, c, g, or t
  misc_feature (842)..(842): n is a, c, g, or t
attcggcacgagggggtaaacacgattagtcatgtttagcttggccgggaatcacgttaagcaaattgtttggaaaataagccaggagaggaaggagcggcgggcaggtggccccgggagcccagacggacggctgctgtcgatatggcgacagctgccctgtggccgcccctgcacccagatggcgcctggcctggccgcagcatcctggagtctgaggccagcacctgcgtctccctgaagcccctcagagcctgccctgcagtgctgctgccctcgtctaccaggtaaggagccgaggcccagcgggcggcccctcccgggacacacagggagaggtggcagtggagagagatggggccggtggtcggccccctgtccgcctgggatgaatggcacctggctaggacgacctgagaagtggctggacgtggtgtcgccaccgcagcctcgagggactttcaccggggtgcccgctgcccgttgcccccaaacctctctccaggcccagcgcaaggaccgnnnnnnnnnagcaatgacagacatctgtaaacccaggtggggggcccagcacaggggccagaaaagaacaccacccttcccccacgggggcgggctgctacaaaaaccaaaacaccccgannnnnnnnnnnnnnnnnnnnnnnnnnnnnnnnnnnnnnnnnnnnnnnnnnnnnnnnnnnnggcccgcaaaaggctcccggtggggaacttgccccggcccgggggggcctcatccccttccaccggcagcaccgcggtgaggaccccagacccagctccggaggcgaggatgctagcctcctcgatgccaaactggctcntcgtgacgaactgtgactgcagccgacatacgcacgcctcatactcccaccgcctcgctccgtaccacgcacatccagccgcccgccggctgcccaggaaaccctcgaacccggctcgcggacgcggccgtgcgagcgtcccccggcgccgctcccatcgcccgacacgacgccgccgagtcgagatatccgtccaaggctacgt

SEQ ID NO: 262950 - DNA, 943 bp, Homo Sapiens
ggcctgggtggcgaattcggcacgaggagcacgccaagcagctccccatcgctccggaaacggctgcagctcctgcccccaagccggcccccacctgagccagaaccaggcaccatggtggagaagggatcagatagctcctcagagaagggtggggtgcctgggacccccagcacccagagcctaggcagccggaacttcatccgcaacagcaagaagatgcagagctggtacagtatgctgagccccacttataagcagcgtaatgaggacttccggaaactgttcagcaaactccccgaagcagaacgcctcattgtggattactcctgcgccctgcagcgtgagatcctgctccagggccgcctctacctctctgagaactggatctgcttctacagcaacatcttccgctgggagaccacgatctccatccagctgaaggaagtgacatgtctgaagaaggaaaagacggccaagctgatccccaacgccatccagatctgcacggagagcgagaagcatttcttcacttcctttggggcccgtgaccgctgcttcctcctcatcttccgcctctggcagaatgcactgcttgaaaagacgctgagtccccgcgagctctggcacctggtgcatcagtgctacggctcagagctgggcctcaccagtgaggatgaagactatgtctcccccttgcagctgaaagggtctgggggaccccccaagaaagtgggaaatgtgatcccccctgaacgactcaccctccctcgggggagcttgaccccagccaggaaccaagcccagggggttcccggcctgggccatggtccgccccaacctttcccgagcccgcagcgaagccaaaccatgggggcaaagggggacaaggaggaccgggtaaaacagccaggcaaaaccccccctccagccaaaaaagtgg

SEQ ID NO: 262951 - DNA, 1044 bp, Homo Sapiens
gagcgaggcctgggtggcgaattcggcacgagggccgtcaccctgagacgggcggcggcgggatggcaacagcctccggggcctcggacttgtctggctccggagcgcccccgcccggtgtgggagctcaggcggcggcggccgctgaggaggaggagcgagaggtggtgcgggtccgagtcaaggcccattgctagaagactgggacataatcagccccaaagatgtcattggctccgacgtgttgctggctgagaaacggtcatcactgacgactgccgccctgccctttacacagtccatcctcactcaggtgggccgtaccttgtctaaggtccaacaagtgctgagctggtcgtatggggaagatgtcaagcccttcaagccacccctgagcgatgctgagtttcacacgtacctgaaccacgagggccagctctcccgacccgaggagttgcgcctgcggatctatcatggcggtgtggagccctcgctgcgaaaggtggtgtggcggtacctgctgaacgtgtatccagatggactgacaggccgagagcggatggactacatgaaacgcaagagccgcgagtatgagcagctcaagagcgagtgggcccagcgagcgaaccctgaggacctggaattcatccgcagcacggtcctcaaggatgtactgcgcactgaccgggcccaccccctactatgcgggggcctgaggatggccccacatctacgggccgctgcacgaccctgctcaccacctatgccgttacccacccaccaggtgtccctactggcagggccatggagtgaccttgccctcaccccatcctcgcttggcatgggaccctgaaggggccaggccctttggttttgctttttgggggccccccatgaaaacgccctgggccgcccaacctttccaccccttgaacgggcacgggccccatgggtccacccaagttttgccaaacttttgaaacccggttggctttgcaacaacccctgtacccctggactttttatatcataacctgtgcaaaa

SEQ ID NO: 262952 - DNA, 960 bp, Homo Sapiens
  misc_feature (833)..(841): n is a, c, g, or t
ggcctgggtggcgaattcggcacgaggatagagaccaggagggagagcctctgttttgtaaactaaggataaccgagtttgctaaattgagaggggctattgggccctagaggacactaggagactggttaggacaaaaagaccttctccctagcccttctaccccacctgacctctgcaagagggggcattgatacatcatcgggaaaaaactttgctccaggcatcactgattccctctcccacccaaggagaacgtttggtacaatcgacatcctagccccacccagaggtggccctcccaggctggtatttatctgcaaggttgtagtcaagaggtttttctccccgctttttgtttttaagcttctagacactccttgaaatgtgtgtgtgatggagggaaggggacagatttgaggactgaagctggggcttggggattgccactaagtacagctgatggtttctccccggacactcgcctactaagtacccttgggggtggtgctgggtcattacttctgagccccagccccaatccagagaagcgctgttgcccgccctccacccactaggtgaacagcaggatgccctgttgggggcttcaggtctctgtgggtgggaatgcaagtgaacttgggagggggcacgggcctgtagatcagggatagcgctgttgatcccctctctgtgggtccaacccgttgggccccttgctgcaaacccatgaagctgggcctcagctccctgaccccctgtcctaggccatgaaggaccttctgcagggtgaagcccccagggagaaggcccggctgtcctcctggcccccnnnnnnnnnccggcttgtccctccccgcttttaagggtactgggtggcaaacttgggggtgaccccggcccccatgtggaggaagatgggggaaacccctgggccttcgtgcgcccccggactttcca

SEQ ID NO: 262953 - DNA, 1021 bp, Homo Sapiens
ggttgcacccgcggagggcggtagcgtggtcgcggccagcatggttctagggtacgtgctaccagcggcgaaggaggtacgcgggcggtggcgctgccgcatataggcgccggggcctggagcgggcgcccaggccgcgcggtagagggggcggaccctccccctccgccgcccgctcgagctcggtcccgcgcaccccgcggctcagaggggccacgcagcaggccccgcgccggccgccgcggcaacagcgggcgggccgcgcaaaccaggactcgtgttgcgctgcggcccgccgcgccacaaattagcgggcccagcccccaccccaaggggtatttagtaaggggaatgtccggggaggaaaccctcagcggtacttagtggcaatccccaagcccccagttcaagtcctcaaatatgtccctttccctccatcacacacacatttcaaggagggtctagaagcttaaaaacaaaaagcggggagaaaaacctcttgactacaaccttgcaggataaataccagcctgggagggccacctctgggtggggctaggatgtcggattgtaccaaacgttctccttgggtgggagagggaatcagtgatgcctggagcaaagttttttcccgatgatgtatcaatgccccctcttgcagaggtcaggtggggtagaagggctagggagaaggtctttttgtcctaaccagtctcctagtgtcctctagggcccaatagcccctctcaatttagcaaactcggttatccttagtttacaaaacagaggctctccctcctggtctctatggggggaacactggagaccctctctcctcccctagttgatacctgctcaacttctccctgtctgtttccaggagaggaggaagggatgacctctgatccaagggacgtcgaggcccaccagggaatcccgaacctcctccccggacctgcaggcttcagactccaggagagcctcgtgccgaattcgccacccgggccgtgagcgcggaaga

SEQ ID NO: 262954 - DNA, 1201 bp, Homo Sapiens
  misc_feature (11)..(11): n is a, c, g, or t
  misc_feature (26)..(26): n is a, c, g, or t
  misc_feature (56)..(56): n is a, c, g, or t
  misc_feature (79)..(79): n is a, c, g, or t
  misc_feature (119)..(119): n is a, c, g, or t
cctgtcttctnccccaatctcttccntgtctgtccctcccccttgtctctcctccnatctctcctgtctgtctccaccngccatctgtctcccctttcttagaatcccgagttgtgtcnaacgattcggactcggacctagaggaggcctccgagctgctgtcctcatcggaggccagtgccctgggccacctcagcttcctggagcagcagcagagcgaggccagcctagaggtggcttctggcagccacagcggcagtgaggagcagctggaggccacagcccgggaggacggggacggggacgaggacggcccggcccagcagctctcaggattcaacaccaaccagtccaacaacgtgctgcaggcccccactgccccccatgaggctccgtggcgggcggatgacactgggctcctgcagggaaaggcagccgggaattcgtgtgagctggggtggggctgggaccacaggtggcttctctctcgcctgctcctgtccctccagcacgtcccctgcaccacggcatagcttaggtgcgccgtcctggggtcgctgccgagagcgcctggacttcgacgtcccaccagcgggcgcctcctcccagaggcttccaggagcacgagggccttgcggcacaggactgtgccctgtgctgtcccctgcaccccggctcagctgagctggggaacactgctgtcgtgtgaagtcacagtggccttgttggtgcccacagggctgtgtggatggaggaagctgtccctgcccagtgcatcccccaggtcatcacggggacgcaggaggcaggccctgccctgccctctcctcacaggtctgttgcagggactccagaaaccattctgggagccgtggatgggggcggagctggggtttggtgcagtttccagggtgcagtacagcagggcctgaatactggccctggactcccttttccagaacaccaggtgtggccacctggggctcaggtacacagtggggtctctcggaagccaccgtgtggttctttcacaggcacgtttattttgctgaaataaaaagtttttaatcgggtgttttctgtggcagctgcaagcttagaagattttctgtggcagctgcaagcttagaagaaggggccagggaggggacagagagagccccgtgcctcgtccgaattcgccacccaggcctcgctactt

SEQ ID NO: 262955 - DNA, 1200 bp, Homo Sapiens
  misc_feature (627)..(628): n is a, c, g, or t
  misc_feature (639)..(729): n is a, c, g, or t
  misc_feature (731)..(780): n is a, c, g, or t
  misc_feature (782)..(808): n is a, c, g, or t
  misc_feature (813)..(815): n is a, c, g, or t
  misc_feature (819)..(825): n is a, c, g, or t
  misc_feature (827)..(1021): n is a, c, g, or t
  misc_feature (1025)..(1025): n is a, c, g, or t
  misc_feature (1028)..(1029): n is a, c, g, or t
  misc_feature (1041)..(1041): n is a, c, g, or t
  misc_feature (1047)..(1047): n is a, c, g, or t
  misc_feature (1049)..(1049): n is a, c, g, or t
  misc_feature (1068)..(1068): n is a, c, g, or t
  misc_feature (1091)..(1091): n is a, c, g, or t
  misc_feature (1093)..(1093): n is a, c, g, or t
  misc_feature (1105)..(1105): n is a, c, g, or t
  misc_feature (1110)..(1110): n is a, c, g, or t
  misc_feature (1121)..(1121): n is a, c, g, or t
  misc_feature (1148)..(1148): n is a, c, g, or t
gcctgggtggcgaatccggcacgaggctctgccctgaccccacccccagccctgcggcctgccagcatggatctcctgcgcccacactggctggaggtgtccagggacatcaccggaccgcaggcagccccctctgccttcccacaccaggagctgccccgggctctgccggcagctgcagccaccgcagggtgcgctggcctcgaggccacctattccaacgtggggctggcggcccttcccggggtcagcctggcggccagccctgtggtggccgagtatgcccgcgtccagaagcgcaaagggacccatcgcagtccccaagagccacagcaggggaagactgaggtgaccccggccgctcaggtggacgtcctgtactccagggtctgcaagcctaaaaggagggacccaggacccaccacagacccgctggaccccaagggccagggagcgattctggccctggcgggtgacctggcctaccagaccctcccgctcagggccctggatgtggacagcggccccctggaaaacgtgtatgagagcatccgggagctgggggaccctgctggcaggagcagcacgtgcggggctggggacgccccctgcttccagctgcccaanncctagggaggnnnnnnnnnnnnnnnnnnnnnnnnnnnnnnnnnnnnnnnnnnnnnnnnnnnnnnnnnnnnnnnnnnnnnnnnnnnnnnnnnnnnnnnnnnncnnnnnnnnnnnnnnnnnnnnnnnnnnnnnnnnnnnnnnnnnnnnnnnnnncnnnnnnnnnnnnnnnnnnnnnnnnnnnccccnnncccnnnnnnncnnnnnnnnnnnnnnnnnnnnnnnnnnnnnnnnnnnnnnnnnnnnnnnnnnnnnnnnnnnnnnnnnnnnnnnnnnnnnnnnnnnnnnnnnnnnnnnnnnnnnnnnnnnnnnnnnnnnnnnnnnnnnnnnnnnnnnnnnnnnnnnnnnnnnnnnnnnnnnnnnnnnnnnnnnnnnnnnnnnnnnnnnnnnnnnnnnnggcnccnncggggcggccgncgcgcngngccccgccccccggcggcnggccgaggcgggcccgcccgccngncgcgccccgcgncgcgncgcagaacagnccggccgcggccggcggcagcggacgncgcaaacaagaggcagccacgacggacgcgagcggagcgcgcggacgcccga

SEQ ID NO: 262956 - DNA, 743 bp, Homo Sapiens
  misc_feature (199)..(207): n is a, c, g, or t
  misc_feature (301)..(353): n is a, c, g, or t
  misc_feature (499)..(507): n is a, c, g, or t
  misc_feature (552)..(560): n is a, c, g, or t
  misc_feature (632)..(698): n is a, c, g, or t
ccccccccttggagaaaatttggggcaatcttgggtgggttaaaagggggggagggttaaaaaactggcggcccttaaccctttgcaaaggggcatattccaactccattttaaagagcggatgagggatccaaaaggttggaggaaaactccagggaggggggttttttgggcggcttaaaggttcccccctccattnnnnnnnnncagtacaagcgtgggggggtcccctttgtgccggacatcaaacggtgccagtggccccccaatgaaaggttcttttttttggcctgggatgggnnnnnnnnnnnnnnnnnnnnnnnnnnnnnnnnnnnnnnnnnnnnnnnnnnnnngggggaggaaaaaatccagccccgggaagggaagtccccacccgccccccctttgaaaacaacctgcaacaggttggccaaaaagggggtgcaggggggttgggccgaaaacgtccctgtgatgggggtggggatagggccctgannnnnnnnncgcggccaggagcccccatggttttgatttaaaaggttctttttnnnnnnnnncccattgggggttttgggtactcctgggggactcccatggttgtaaaaaaaggtttttttttttttttcttnnnnnnnnnnnnnnnnnnnnnnnnnnnnnnnnnnnnnnnnnnnnnnnnnnnnnnnnnnnnnnnnnnnctcgagactagttctctccctcgtgcggaattcgccacccaggcc

SEQ ID NO: 262957 - DNA, 888 bp, Homo Sapiens
  misc_feature (310)..(318): n is a, c, g, or t
  misc_feature (455)..(463): n is a, c, g, or t
  misc_feature (557)..(610): n is a, c, g, or t
ttttttatgggccatgggaggaatttcgacccccccaaattttgttgccccaaaatttttccttcaaaaatttatttcggaaaaatttccttaaggggggggttattccggtttggagaaaacccgggaagaagatgcctttttggccccttttaaagcattagggaggaggggtttcttttaaacaagtttccaacccagaacccttctggaaaagaggggtcccctccccacggttgttttggctttagacaacattttttatatttccaccctgggagatagtcgggcaatcttgggtggttttaannnnnnnnntcaaaaacatgcgcccttaaccttcaccaaagggcataatccaccccattatgaagaggggatggggttccaaaaggctgggggaaacttcagggatgggggttttttgggggtgttagaggtgtccccctccattnnnnnnnnncagtacaagcgttggggggtcccttttgtgcccgacatcagaggttgccagttgccccccaatgacaggttcatttttttggcctgggaggggnnnnnnnnnnnnnnnnnnnnnnnnnnnnnnnnnnnnnnnnnnnnnnnnnnnnnnggggaggaaaaaatccagccccgggaagggaagtccccaaccgccccccctttagaagcaccctgcaacaggttggccaacaagggggtgcaggggggtttggccgaaaaagtccctgtaatggtggtggggataggcccctgaggggtggcgcgcggccaggaccccccatggttttgatttaaaaggttcattttgggggggtccccattgggtgttttgggtacccctgggggactcccatggttgtaaataaaggtttttttttttttttcctt

SEQ ID NO: 262958 - DNA, 1465 bp, Homo Sapiens
  misc_feature (359)..(359): n is a, c, g, or t
  misc_feature (1030)..(1047): n is a, c, g, or t
aaggagcgaggcctgggtggcgaattcggcacgaggcctccttccccaaacctaccgggagcgccattcggaagtggttggcggccatcacacctccattaacgacctgctgttcgggatccaggccgggcccgagcagtactcagcctgggtaaactcgctgcccggcagccctggcctggtggactacaccctggaacccctgcacgtgctgctggacagccaggacccgcggcgggaggcactgaggagggccctgagtcagtacctgacggacagggctcgctggagggactgcagccggccgtgcccaccagggcggcagaagagcccccgagacccatgccagtgtgtgtgcncatggctcagcggtcaccacccaggactgctgccctcggcagaggggcctggcccagctggaggtgaccttcatccaagcatggggcctgtggggggactggttcactgccacggatgcctatgtgaagctcttctttggtggccaggagctgaggacgagcaccgtgtgggacaataacaaccccatctggtcagtgcggctggattttggggatgtgctcctggccacaggggggcccctgaggttgcaggtctgggatcaggactctggcagggacgatgacctccttggcacctgtgatcaggctcccaagtctggttcccatgaggtgagatgcaacctgaatcatggccacctaaaattccgctatcatgccaggtgcttgccccacctgggaggaggcacctgcctggactatgtcccccaaatgcttctgggggagcctccaggaaaccggagtggggccgtgtggtgagaacagtgagcttggaaaggaccagtatgcttggactgaaggggttctcacagtgggagccagggctgtcttcgtattcccattagaccaagcttgtccaacccgaggcccgcatgcggcccaggatggctttgaatgcggcccaacgcaaattcgcaaactttcttaaaacattatgagtttctttttgctannnnnnnnnnnnnnnnnnagctcatcggctatcgttagtgctagtggattttacatgtggcccaacacaattcttcttccaacgtggcccagagaagccaaaagattggatacgcatcagacagatggaaaagggagattcagactgtttttcagggaggtggctgggtttacacgctaatcccgattcaccctgtccaaactgcctaagccctccgccattctcaagccctgcagtcacagctacacagatcacagcttcagccaggagctgggcagaaagcccaagaggctgttcccaccaagctgctcagggctggtcttttaggaccctttccttggaccccctatggtgggggcaaaactttctttggccttaatgggagcccatcaacttcaactgctcgtggcttctttgcccacatgcttttcccctg

SEQ ID NO: 262959 - DNA, 1572 bp, Homo Sapiens
  misc_feature (837)..(1079): n is a, c, g, or t
actaagtatcgaggcctgggtggcgaattcggcacgaggcgcagagtcttgagcagcgcggcaggcaccatgttcctgactgcgctcctctggcgcggccgcattcccggccgtcagtggatcgggaagcaccggcggccgcggttcgtgtcgttgcgcgccaagcagaacatgatccgccgcctggagatcgaggcggagaaccattactggctgagcatgccctacatgacccgggagcaggagcgcggccacgccgcggtgcgcaggagggaggccttcgaggccataaaggcggccgccacttccaagttccccccgcatagattcattgcggaccagctcgaccatctcaatgtcaccaagaaatggtcctaatcctgagtcgtcacccttggattttatggatcacggagctgaccatctttacctggtcctggaactgaaaaactgtagcttgtgtgaaaatgagcctttggaccagtctttattaaaacaaacaaacatgagtagtctgcatatcgaatatctagagctctaaaccccccaatacttaaaagtctaattgctgccctgtggtttcattagtctgataggaagatagggatttcctcagtcacagatgatattttgaaggaaagctgcaataaagccacaatgatttgaggtctttgcttaagtatgagatacttgatgggggctttatcatgcaacattagtttgcttaccttaagaattgcccaaaaatgaaagaaaatatgagcttttcagttaaacatactcctaaaaacattttccggggattttactactaaaattggacatttaagcgaagtnnnnnnnnnnnnnnnnnnnnnnnnnnnnnnnnnnnnnnnnnnnnnnnnnnnnnnnnnnnnnnnnnnnnnnnnnnnnnnnnnnnnnnnnnnnnnnnnnnnnnnnnnnnnnnnnnnnnnnnnnnnnnnnnnnnnnnnnnnnnnnnnnnnnnnnnnnnnnnnnnnnnnnnnnnnnnnnnnnnnnnnnnnnnnnnnnnnnnnnnnnnnnnnnnnnnnnnnnnnnnnnnnnnnnnnnnnnnnnnnnnnagtgagccgagagcatgccgtgcactccagcctgggagactgatctcaaaaaagaaaaataaacgaagtaaaagatatttatcagaactgttacaggaaggtgtatttttagctatttggagggtgctgtggtgcttgcatgtagtcccagttattcaggaatattggttgagtccagcttggggaacatagggagactattaaaatacaatatatatggccggcggatgtcagccgtaatccagcattggaggtcgagcgggcaaacactgagggcgaggttaagaccgccacacacggggaaccgttccctgaaactaaatgccggcagggaaggcgggacccccaacagagagggggacaaatttgccccacgagggtgacagtatagcgccccggacaaaaaaattggagaaaacgctggcagcaacattgtgaaaacgttggcgctgcacacacgtaaaggcaactcatgtggtcaagatagctgtat

SEQ ID NO: 262960 - DNA, 1033 bp, Homo Sapiens
  misc_feature (398)..(398): n is a, c, g, or t
  misc_feature (737)..(750): n is a, c, g, or t
  misc_feature (786)..(804): n is a, c, g, or t
ggctgggtggcgaattccgcaccaggggacgaggttgggccccagggggcgctgggcaaaagccccttccagctgaccgccgaggacgtgtatgacatctcctacctggtgggccgcgagcttatggccctgggcagcgacccccgggtgacgcagctgcagttcaaagtcgtccgcgtcctggagatgctggaggcgctggtgaatgagggcagcctggcgctggaggagctgaagatggagagggaccacctcaggaaggaggtggaggggctgcggagacagagccctccggccagcggggaggtgaacctgggcccaaacaaaatggtggttgacctgacagatcccaaccgaccccgcttcactctgcaggagctaagggagtgtggctgcanggaacgcaacaaactcaagtcccagctccctgggggggcaggaaaagctgcagggctacaagagtgggcctgattccaccaagagaagggccaggaggaaagaagagaaaaagatggtgggggtactaggggccaaaaatgctgggcaggaccaaggaggagaaagaccatcctaaaaaaggctgggtctttttttcgagtgggggaaacaggaccctaaatcccaggggcccaaggaaaggggtattgggtccttggttccaagaagaacaaccctccccaggaagggctggggaaaaaccacccttcccctgggggcccccgaggagaaccccttannnnnnnnnnnnnnaatttaattttcgccgcccttcccaagcccagagcnnnnnnnnnnnnnnnnnnnaacccaaggggttcccctttggggagtaacctttttctccccgcgggggtgggccgaaaaatacagacacccgccttgaaagaaatttggggccccggggggccccggggagaagtcgcggcacccacggaagaaccccaaaacggggatctgccccgggggcggggcagggggccccccggtcccggtgcgtccgcggggccagcgcacgcgcgagggcgcgctggca

SEQ ID NO: 262961 - DNA, 1590 bp, Homo Sapiens
  misc_feature (75)..(120): n is a, c, g, or t
  misc_feature (382)..(399): n is a, c, g, or t
  misc_feature (544)..(597): n is a, c, g, or t
  misc_feature (640)..(682): n is a, c, g, or t
  misc_feature (713)..(795): n is a, c, g, or t
  misc_feature (1133)..(1143): n is a, c, g, or t
  misc_feature (1361)..(1361): n is a, c, g, or t
  misc_feature (1438)..(1438): n is a, c, g, or t
  misc_feature (1511)..(1511): n is a, c, g, or t
ccccatctctttcccctcccgctcctaccattacggtcctaagtagcgaggcctgggtggcgattccagacgagnnnnnnnnnnnnnnnnnnnnnnnnnnnnnnnnnnnnnnnnnnnnnnaggccggtggcgacgacgcccgctgcgtgcggctgagcgccgagcgggcacaggcgctgctggccgacgtggacacgctgctgttcgactgcgacggcgtgctgtggcgcggggagaccgacatgcctggcttctccttcctccccctttggccccgctgcctgcaccttggggcgcctcttccccccctcgcaccacctgtcaatccgccgcacgccccctctttaccgctgcttcctccatttcgccttcggcaaatctnnnnnnnnnnnnnnnnnngttttgggcagacccgcggtcgcctacgacgggcccgcggtgaccccggcccctttcgctcaccccgggcgctccctttcccctctcccccccgctacacattcttctcctcccgccatcgcacgccataacgcgggcgcccctnnnnnnnnnnnnnnnnnnnnnnnnnnnnnnnnnnnnnnnnnnnnnnnnnnnnnncgctcctttcgatcccgccctccgctacgtccgtaaggagctnnnnnnnnnnnnnnnnnnnnnnnnnnnnnnnnnnnnnnnnnnntctctcacgccgcccgttgttacctcatgcnnnnnnnnnnnnnnnnnnnnnnnnnnnnnnnnnnnnnnnnnnnnnnnnnnnnnnnnnnnnnnnnnnnnnnnnnnnnnnnnnnntcgttcccccactggcacgcccacttccacccccgttcgcagttcctccgcgtctactcccgccgcggcccgccgatattttgcccaccgcccccttcatgtggcctccccttatacttattctagtgctcaccgccaccgcatgccggtactgcccgtatatcatacccactcgcgatcgcacggctcgcacccactccattctactcctcgtgtcacgcggctgatctatctcttctgtcgccggccccggcctgcatcatacccccgtgcgctcctgcgcgctgtttccgccgccttcctattatctttactgcaccccccgctccgtgtgtgtnnnnnnnnnnntattcacccccgcgtctatatgttctgcagctttcgctgttgtgcactttttcgctctccctactctgcgtacttgacacccggatctttttgtccgcctttatctaccgtgatggtttatccccgcgtttatcctgcgcctccgcccctatactcgcgcgccataccgcttacggtacattccgcgccggcgcgtagtcaccccccgtttgtacgtncactctgccctgacgccgtcgccctcgtattatattctaccccgatcggaccccctccgcgatagatacgcgcgcgncttacgcggctcgtcccctcggcaaaagttaccgaccgtacgtgcgccccgtggccctatgctcgctgcgtgnctactcgcccccccatcccacgcatttccccggccaagcctcgacctcagttttcccacctttttgccgcccgccggcc

SEQ ID NO: 262962 - DNA, 983 bp, Homo Sapiens
  misc_feature (936)..(936): n is a, c, g, or t
ggcctgggtggcgaattcggacgaggaacaaaccccttccttgtgtaccagctcccctgcttctggaatgtgcagctgtcagaccacacccgctccgagcagtgctacagagacgtgtctgatctaaaggtcattcactggaactcccccaagaagctccgggtgaagaacaagcatgtggagttttttcgcaacctctacctgaccttcctggagtatgacggcaatcttctgaggcgggaactgtttggctgccccagtgaggctgatgtcaacagtgaaaacctccagaagcagctgtctgagctggacgaggacgacctgtgctatgagttccggcgagagcgcttcactgtccaccgcacccacctgtacttcctgcactacgagtatgagcctgcagcagacagcacggacgtcaccctggtcgctcagctgtccatggacaggctccagatgctggaggccatctgcaagcactgggaggggcccatcagcctggccctctacctgtcagacgccgaggcccagcagttcctccgctacgcacagggctctgaggtgcttatgagccgccacaacgtgggctaccacatcgtgtacaaggagggccagttctaccccgtgaacctgctgcgcaacgtggccatgaagcacatcagcactccctacatgttcctgtctgacattgacttcctgcccatgtatgggctctatgagtacctcaggaagtctgtcatccagctcgatcttgccaacaccaagaaagcaatgattgtcccccgcgttcgagacacctgcgcctaccgggctgtcccttccccaaagccaaaaagcgggagttgcctgtccaatggctggacatgggggaccctccttcacaatccagggaaacacgtctggggacaaaggggcacgcaacccccaaacttccgnccagggggggaaccgccaccacgccttttacgggggtggagaggggg

SEQ ID NO: 262963 - DNA, 793 bp, Homo Sapiens
gtctatgtggtataatcgagatggatacctgtgtctttaaattacgtagggaattttgtatgtttaaataattgtactgggttccataatgcttatcttagaaactttagtaaaagaaaatatatgaaccgtgcatttgtgaatgccccccttagagcattcatccaagttcagtgtgtagtgtgatggttattatagatatttaaagtatagtaagtggctgtgtaacaggagagactgctgtttacctacgtactgaagggtaactgctgcccgcgtaattaaatcagtattgtcctttcctgtcggtttgatcaattgcggtaccggtagcttcctgcttgtgactgttacctaattgtgtcaatgtacatctgtagtatgtacatgtgaaagtgcctttctattttagaggagttttagccttgctcttgtaccgttgccccgctctgtgccccacccccacctcctcctcccaattcctgctgcccactcgagtgtttcgaagcttcctccctgtcccccaccttccccatccccgccttcctgtgcctcggtgctcagtaatgtcccatctcacctccctgtcggtcctcagactgtctcgttttccttgtagacgtgattgtgcctttctcacccctgtgtcctcccatcccaccgcatccgtcccccgctcatgtgctgctgacagcatcgcattcgccccgtgctctgtactgcctctcaccatttcattcccctcctctctgaggtgaaaaataaaagggggatgcttttacagtctggaaag

SEQ ID NO: 262964 - DNA, 1345 bp, Homo Sapiens
  misc_feature (474)..(489): n is a, c, g, or t
  misc_feature (732)..(759): n is a, c, g, or t
  misc_feature (1055)..(1055): n is a, c, g, or t
  misc_feature (1290)..(1290): n is a, c, g, or t
aaggtagcgaggcctgggtggcgaattcggcacgaggcatgagctgggtactgactgagataagaaaagcctgaactatttattaaaaacatgaccacccttggctattgaagatgctgcctgtatttgagagaccgccatacataatatatgacttcctagggatctgaaatccataaactaagagaaactgtgtatagcttacctgaacaggaatccttactgatatttatagaacagttgatttcccccatccccagtttatggatatgctgctttaaacttggaagggggagacaggaagttttaattgttctgactaaacttaggagttgagctaggagtgcgttcatggtttcttcactaacagaggaattatgctttgcactacgtccctccaagtgaagacagactgttttagacagactttttaaaatggtgccctaccattgacacatgcagaaattggtgcgnnnnnnnnnnnnnnnncctatgctgctctgttttgtcttaaaggtcttgagggttgaccatgttgcgtcatcatcaacattttgggggttgtgttggatgggatgatctgttgcagagggagaggcagggaaccctgctccttcgggccccaggttgatcctgtgactgaggctccccctcatgtagcctccccaggcccagggccctgaggcctgctagaatcactgccgctgtgctttcgtggaaatgacagttccnnnnnnnnnnnnnnnnnnnnnnnnnnnnacattagtcattggaccacagccattcaggaactaccccctgccccacaaagaaatgaacagttgtagggagacccagcagcacctttcctccacacaccttcattttgaagttcggggtttttgtgttaaagttaatctggacattctgtttgccattgttacttgtactatacatctgtatatagtgtacggcaaaagagtattaatccactatctctagtgcttgactttaaatcagtacagtacctgtacctgcacggtcacccgctccgtgtgtcgccctatattgagggnctcaagctttcccttgttttttgaaaggggtttatgtataaatatattttatgcctttttattacaagtcttgtactcaatgacttttgtcatgacattttgttctacttatactgtaaattatggctttattaaagagttcattttaaggaaaaatactttgggaacataattattggaaattaaagagaaggacccctttaattaaaaattctataattttttcccacctcgnggcggcgaacaacaaaaaagcccagtctcccgttacccgtaccccacactaccgt

SEQ ID NO: 262965 - DNA, 919 bp, Homo Sapiens
tgggtggcgaattcggcacgaggaagtgggtcaaattttcttcagtatctgatggcttcaactccgatagtactagccaccatgggtgggaaaatacccagaaaattagcaaatcatgtggtggatagagtttggcaagaatgcaatatgaacagagcacagaacaagaggaagtattctgcttcattcaggtggtctatgcgaagaagcgacagctgctaaagtggcatcctgggattttgttgaagccacacaaagaacaaattgcagttgtttgagggaattaaatttccctagactcgcttgctttctggagttggctaataggaggcactaacagaagattggagggcacaaaaatctcaagtcaagaaatgctggacaacaaggacaggcaccatctttaggtcaccaaccaacaaatacttcctaagcacaagaccaatgagaagcaacaaaagagtgaaaagccacagaaacgcccccttgactccttctcaccatcgtgtgtctgttagtgatgacgttggcatgccacgcaaattcacccacccaaacacttgtgatctctgctccagacagtcaagtgagattctccaatatccgaactaatgatggagcaaaggactcctcagatgcatggaaccgacatgggaaattcacctccaccacccccacttaaccctccccccttggatgggggctgacgaaggcaggactaaaacacctttcacttccttaaaaggcaaaatcttttatcaaattggcccccacccgaatcccttgggttcctttcctaaccccatggggaagatagggataacaagcgttggttcccaatcttttcccaccttcaatatcagggagaatgggacaaacctaagcggcatttgggtgggcacccccacggagatttggg

SEQ ID NO: 262966 - DNA, 564 bp, Homo Sapiens
  misc_feature (15)..(15): n is a, c, g, or t
  misc_feature (47)..(47): n is a, c, g, or t
  misc_feature (471)..(471): n is a, c, g, or t
acaaaggcaagcccngctcttcatttttaaaaaaagaaagaaccctngggataaaatttctcaggtagtgccattgaggaaggaatgcttttctcaagagatttatatggctgtatagcttatagatactatatataccatagctccatataaaattgtcttttatttagctactaggaaacaaaactttccagagtctgcctctggtaacagtgaatgaactgaaagcttatatttacatgtacttctataatcagcttcaaattcctgaaatatttttcctgaattttcttttgaaaaaaaatcctgacatatgttcatgtaagctgtttcaaataaagtgggcataagcattcagtggcgtaacaaactatcacacataggcatcaatcgatcgggaaataatctacctcaaacaactgcaatttgttctttgtgtggcttcaacaaaatcccaggatgccactttangcagtgtcgcttcttcgcatagaccacctgatgaagcagaatacttcctcctaagatttaaagttacaaaattctttaaaattcataaaattt

SEQ ID NO: 262967 - DNA, 736 bp, Homo Sapiens
ggatagagtttggcaagaatgcaatattgaacagagcacagaacaagaggaagtattctgcttcatcaggtggtctatgcgaagaagcgacatgcctaaagtggcatcctgggattttgttgaagccacacaaagaacaaattgcagttgtttgaggcacaaaaatctcaagtcaagaaatgctggacaacaaggacaggcaccatctttaggtcagcaacaacaaatacttcctaagcacaagaccaatgagaagcaagaaaagagtgaaaagccacagaaacgccccttgactccttttcaccatccgtgtgtctgttagtgatgatgttggcatggacgcagattcagccagccaaagacttgtgatctctgctccagacagtcaagtgagattttcaaatatccgaactaatgatgtagcaaagactcctcagatgcatggcaccgaaatggcaaattcacctcaaccacccccacttagtcctcacccttgtgatgtggttgatgaaggagtgactaaaacaccttcaactcctcagagtcaacatttttatcaaatgccaacaccagatcccttggttccttctaaaccaatggaagataggatagacagtttgtcccagtctttcccacctcaatatcaggaagctgtagaacctacagtatatgttggtacagcagtaaacttggaagaagatgaagccaatatagcctggaagtattacaagttccc

SEQ ID NO: 262968 - DNA, 914 bp, Homo Sapiens
gctgggtggcgaattcggcacgaggcatagccacctccctgtggagaggacacttagggtcccctcccctggtcttgttacctgtgtgtgtgctggtgctgcgcatgaggactgtctgcctttgagggcttgggcagcagcggcagccatcttggttttaggaaatggggccgcctggcccagccactcactggtgtcctgtctcttgtcgtcctgtccttcctatctccccaaagtaccatagccagtttccagatgggccacagactggggaggagaatcagtggcccagccagaagttaaagggctgagggttgaggtgagaggcacctctgctcttgttgggaggggtggctgcttggaaataggcccaggggctctgccagcctcggcctctccctcctgagttgccttctgttggtggctttcttcttgaacccacctgtgtaaagaggttttcagttccgtgggtttcccctttgattctgtaaatagtcccagagagaattcgtgggctgagggcaattctgtcttggaggaagaagctggacattcagcctgtggagtctgagttttgaaggatgtagggagccttagttgggtctcagaccataagtgtgtactacacagaagctgtgttttctagttctggtctgctgttgagatgtttggtaaatgccaggttgatagggcgctggctgcttggagcaaagggtgcattttcagggtgtgggcacacagggtgctgtgaagtttctgtggctcatggccttctgggctggtccccttgcacagggccccacgctggagtcttaccactctgcttgaaagggggggaaaaaggggccccttcttggtccccaataaccctttcttacaaaaaataagttacccccgaagtttacctgggccct

SEQ ID NO: 262969 - DNA, 500 bp, Homo Sapiens
  misc_feature (94)..(94): n is a, c, g, or t
  misc_feature (487)..(487): n is a, c, g, or t
cacggttgatagggcactggctgcttggagcaaagggtgcatttcagggtgtggccaccaggtgctgtgagtttctgtggctcatggctctggntggtcccttgcacagggcccacgctggagtcttaccactctgctgcaggggtggaaggtggcccctcttgtcacccatacccatttcttacaaaataagttacaccgagtctacttggccctagaagagaaagttgaagagtcccaaacctactagcattttgcaactatgcttgtaaagtcctcggaaagtttcctcgcgtaccaagacaagcggcgggggctgatagcaattttagtttttggcctccctaatcctctcacatgagaacacttgcctggaatgcatctcatgatctctgggagaatttccccatctttctcttctttccatcgtgtggattcaatagtgtggaatttgaaaggctgccctgcccccgactctcctggccgnacccctgggcatt

SEQ ID NO: 262970 - DNA, 1319 bp, Homo Sapiens
cccccgctcgaccccaaacacgccggtacaaaatcaattcccctcacgcagcctgggtggcgaattcggcacgaggccgttgcctcctcaggccctcaccacttcccaggatggacacagaaggaaaggggactcagaagctgaggcactctcagagataaaagatggttcccttccacccgaactgtcttgcatcccatcccacagagttctagggcccccgacttcaattccacctgagcccctaggccctgtatccatggactctgagtgtgaggagtcacttgctgccagcccaatggcagctaagcccgacaacccatcaggaaaggtctgtgtcagggaagtagcaccagatggcccactacaagaaagctccacaagactgtccctgacttcagaccccgaggagggggacccactggccttagggcctgaaagcccaggagagcctcagcctccacagctcaagaaagatgatgtcactagctccaccggtccccacaaggagctgtcaagcacagaggcaggttccacagttgcaggagcagccctcagacccagccatcattcccagcgttccagtctctctggggatgaagaggatgaactgtttaaaggggcaactctgaaagctctgaggcccaaagcacagcctgaggaggaggatgaagacgaggtgagcatgaagggacgcccgcccccaacgcccctttttggagatgatgatgatgacgatgacattgactggctgggatgaagacccaggaaactggtgcaaaggtttctctgcaacccttccctaagcatgattttgcacagccaaccctgggtctaggcgagccacagggtgaggtcaaggtgagcattctgggaacaatatttgggctcagagggtgggttggccaccttctgagccccacccccgccagacctgggtgaagaggatcataaccctgtcttcaagaacactgggatttcagcagcaagttggaagaaggactggtaggttcccctccaagccagtcacctgtaagagtcctgtcctctgccagactttttaatctcttcattaactctcagactgacctgggagccctcctctacctgaatccagtgctcaactgtgccccggcaacaagacctgggctgaggtctccctggtagaactaagggagattacaccatctaaatcccagtgcagtcaacagcctggcctatagtcctgggacatgtatcttcttctttgccttaaatctgatacaagaggtcaatgactttgaaaataaaactaaaataaatgtctataatgaaacttg

SEQ ID NO: 262971 - DNA, 507 bp, Homo Sapiens
  misc_feature (41)..(41): n is a, c, g, or t
tcttgcatcccatcccacagagttctagggcccccgacttnaattccacctgagcccctaggccctgtatccatggactctgagtgtgaggagtcacttgctgccagcccaatggcagctaagcccgacaacccatcaggaaaggtctgtgtcagggaagtagcaccagatggcccactacaagaaagctccacaagactgtccctgacttcagaccccgaggaggggaacccactggccttagggctgaaaagcccaggagagcctcagcctccacagctcaagaaagatgatgtcactagctccactggtccccacaaggagctgttcaagcacagagggcaggttccacagtttgcaggagcagccctcagacccagccatcatttcccagcgtttccagttttttctgggggattgaaggagggttgaactgttttaaaggggggcaattttggaaaggttttgagggcccaaaggcacaggcttgagggagggaggttgaag

SEQ ID NO: 262972 - DNA, 1277 bp, Homo Sapiens
tccctctgcgtgccgatgaacagcgccaccttcctagtgtgcgaggctgggtggcgaattcggcacgagggacaagtatgcagctctggcagaactagacagcgttttcagttctgcagccacctccagtaatgcgtatacttccacaagtaatgctagcagcaatgtttttggaacagtgccagtggttgcttctgcacagacacagcctgcttcatcaagtgtgcctgctccatttggagctacgccttccacaaatccatttgttgctgctgctggtccttctgtggcatcttctacaaacccatttcagaccaatgccagaggagcaacagcggcaacctttggcactgcatccatgagcatgcccacgggattcggcactcctgctccctacagtcttcccaccagctttagtggcagctttcagcagcctgcctttccagcccaagcagctttccctcaacagacagctttttctcaacagcccaatggtgcaggttttgcagcatttggacaaacaaagccagtagtaaccccttttggtcaagttgcagctgctggagtatctagtaatccttttatgactggtgcaccaacaggacaatttccaacaggaagctcatcaaccaatcctttcttatagccttatatagacaatttactggaacgaacttttatgtggtcacattacatctctccacctcttgcactgttgtcttgtttcactgatcttagctttaaacacaagagaagtctttaaaaagcctgcattgtgtattaaacaccaggtaatatgtgcaaaaccgagggctccagtaaacaccttctaacctgtgaattggcagaaaagggtagcggtatcatgtatattaaaattggctaatattaagttattgcagataccacattcattatgctgcagtactgtacatatttttcttagaaattagctatttgtgcatatcagtatttgtaactttaacacattgttatgtgagaaatgttactggggaaatagatcagccacttttaaggtgctgtcatatatcttggaatgaatgacctaaaatcattttaaccattgctactggaaagtaacagagtcaaaattggaaggttttattcattcttgaatttttcctttctaaagagctcttctatttatacatgcctaaattcttttaaaatgtagagggatacctgtctgcataataaagctgatcatgttttgctacagtttgcaggtgaaaaaaaatttatattataaaatatgc

SEQ ID NO: 262973 - DNA, 967 bp, Homo Sapiens
  misc_feature (735)..(735): n is a, c, g, or t
  misc_feature (760)..(760): n is a, c, g, or t
attcctccccctccgccccttctctctccctacctccccatctaccgaggcctgcgtggcgaattcggcacgaggtagccactttggtcccgtgcagcttctgtcctgcgtcgaagctttgaaggccgaaggcagtgcaagagactctggcctccacagttcgacctgcggctgctgtgtgccttcgcggtggaaggcccgaggggcgcgatcttgaccctaagaccggcggccatgatggtgctgacctctggtggccgatcggggcactgcaggggccgagccattttggggggcccccctccttgctctgcaggcaccttagtggcctttttcctcctgtgtacagggaagagaggggtacatttccctgtgctgacggaagccaacttggctttcccggactgcaagcacagctctgccccagaggcctctctctccgtcgtgggagagagacgtgtacatagtgtaggtcagcgtgcttagcctcctgacctgaggctcctgtgctactttgccttttgcaaactttattttcatagattgagaagttttgtacagagaattaaaaatgaaattatttataatctgggttttgtgtcttcagctgatggatgtgctgactagtgagagtgcttgggccctcccccagcacctagggaaaggcttcccctccccctccggccacaaggtacacaacttttaacttagctcttcccgatgtttgtttgttantgggaggaagtggggagggcctggnctgtatggcctccagcctacctgttccccctgctcccagggcacatgggttgggctgtgtcaaccccttaggggcctccatgggggtcagttgtccccttctcacctccccagctctgttccccattaggggcccctggggtggcacccgggaaggaatgggacttgacctttccacggaacctgggttggggttgccacgggaact

SEQ ID NO: 262974 - DNA, 797 bp, Homo Sapiens
  misc_feature (770)..(770): n is a, c, g, or t
cccccccgcgccaccccaccttgcacactcctcgcctaccccacccccgaacccaggcctgggtggcgaatccagcacgaggcttagctgccggaggttccgcactctctaaggccccgggtgaagccccacctctgctgcgcgcagcctgcggtgcgggtcatggcgcggctaccgaagctggcagtctttgatttggattacactctctggcctttctgggtcgacacgcacgtagaccctccgttccataagagcagtgatggaactgtacgagataggcggggccaagacgtccgactgtacccagaggtgcctgaggtcctaaaacgattgcagagccttggggtgcccggtgcggctgcttcaaggacaagtgagatagaaggggccaaccagctactggagctctttgacctcttcaggtactttgttcatcgggaaatctatccaggcagcaagatcacacactttgagaggttgcagcagaagactggaattcctttctcccagatgatcttctttgatgatgagaggcggaatattgtagacgtcagcaaactgggtgttacctgcattcacatccagaatggaatgaatcttcaaactctaagtcaagggttagagacatttgcgaaggcccaaactgggcctttgaggtccagccttgaggagagcccatttgaggcctaaactgaaaggaaatcaagaaggcattttcaggtgcatttgtaatttattaaagttcatctgtgtgtgacagaagaccnccgagagaggaacacaacgaacctggc

SEQ ID NO: 262975 - DNA, 940 bp, Homo Sapiens
  misc_feature (797)..(807): n is a, c, g, or t
  misc_feature (814)..(816): n is a, c, g, or t
  misc_feature (821)..(821): n is a, c, g, or t
  misc_feature (825)..(825): n is a, c, g, or t
  misc_feature (827)..(827): n is a, c, g, or t
  misc_feature (834)..(834): n is a, c, g, or t
  misc_feature (843)..(843): n is a, c, g, or t
  misc_feature (862)..(862): n is a, c, g, or t
  misc_feature (876)..(876): n is a, c, g, or t
  misc_feature (918)..(918): n is a, c, g, or t
ttgtagcgaggcctgggtggcgaattcggcacgaggcccatgcgggccggccagtcagaggccggctgctgcctgctggagaggaagatctacatcgtcgggggctacaactggcgtctcaacaacgtcacgggcatcgtacaggtgtacaacacggacaccgacgagtgggagcgggacctgcacttcccggagtccttcgcaggcatagcctgcgcccccgtcctgctgccccgggccgggaccaggaggtagcccccaagacccccgggaccctggcctgaccgcatgttgtctccaagtggggcttggcgaatgcacgtctgcctgagaaccccagtgccccccttcgcccgggctgcccttgaggggcctgctgcgttgataagcccccctcccaggggtccctccctccctccttcccaaagcagatcctggctgcgagtccatccgagggagcctgccggcaaagcgtctgacatgtggtggcagcaaattcgtccccggggtggtttcctcgcctggcccccgagtccccacggggctggcgggtggaatcccaggtctccagggggtccctgtgcagctccatctcacttctctactgcctcccagccccacggtttcaggcattcagatgtgagctcatcaacattgaacccaaagtcggtggtatatgactcaccctccttccaagtctcctgcgcgcgtgtttttaaaataaactcacccgaaacgtccgtaacacacggaccctcaggagcagtgagaggtgggcttaaaagcccccgggtttnnnnnnnnnnntggaggnnnttttntttntncggttgntggttcgtntggcttgttgttgtgtttntgggttgtgggttngggtgggtttgccccccgttgcggtcgttgggcgcgctgtcncgcgtcgtggttgcgggtatat

SEQ ID NO: 262976 - DNA, 1230 bp, Homo Sapiens
  misc_feature (841)..(841): n is a, c, g, or t
  misc_feature (936)..(936): n is a, c, g, or t
  misc_feature (958)..(958): n is a, c, g, or t
  misc_feature (979)..(979): n is a, c, g, or t
ggagcgaggcctgggtggcgatttcggcacgaggctcccttctgggttccgaggcccaagcccttggcagtgtttgtgagtggaagggaggtcacgctatcgtccgcggccccagcagccctgtgccctcgttggatcccgcgacgcggctcctttaagagcctcgcgggtcgcccgccgctaggtcgctccccggccatgcgggcgctgcgggccggcctgaccctggcgttgggcgcggcgctgggtgcggtcgtcgagggctggcgggggccgccgtgagtcgcacctgctgtgcccggacccgtcaccctctccgcgcttcgggtggccgacggcatcgcacaccaatccgtcccacggacgtcacccacttattataagcccaacattccgatcggacaaacacccttgtcaacgctggctcccggggccaaaacccgaccagcataccggcgagcgtccgacgccgcaacgccgtttgtcgcagctgcgcccggcgggggccttcgtacgccaccgtagcagaaggtcacctcgcccgattaccccctgccacacccccgcctgttggtgccccaccgcccctcacacacccgatcagccggtgaccgtgcgcccgcggccgaaccctatgctaatatcatatcacgctcgcgaggagcgagtctcgcgcaacctctccctccgcgctgcccacccctacattatgtggcctcccagacctaatgtagagcatttttagtgcgcatatacggccacgatgaatctagtgctaactcgagctaacccaggcccgctgtggtgaatatgtttgcgcctctattccacgccgacaggngccgccccgccagacgggcgcgccccgagccccgatagtgcgcattcacgacccgccacgcctaagcgcgccctttacgtatgcgttccgagtcnattatccttcgggtccgcacangcgcgagctatgacgggcacnacacgtacccaacgtaatcgacattcataccccaaaatagatcgtaacgcaccagcatgccgacaacacagcgcggaggagtgctcgtcgtggctgtcgcgccgccgctattgccaagcgttcgaataacgctcgtgtatgtcccttatccgcgcacccgcgcctgcaagtcaccgcctacctccgccggcgctttccgcttccaacccgtcgctcccgcacccccttattcctctccacccgccccactt

SEQ ID NO: 262977 - DNA, 882 bp, Homo Sapiens
gcctgggtggcgaattcggcacgaggggctggccaggagcggtttcggtcagtgacgcggagttattaccgaggggcggctggagccctgctggtgtacgacatcaccagccgggagacatacaactcactggctgcctggctgacggatgcccgcaccctggccagccccaacatcgtggtcatcctctgtggcaacaagaaggacctggaccctgagcgggaggtcactttcctggaggcctcccgctttgcccaggagaatgagctgatgttcctggagaccagcgctctcacaggcgagaacgtggaggaggcgttcctcaagtgtgcccgcactatcctcaacaagattgactcaggcgagctagacccggagaggatgggctctggcattcagtacggggatgcgtccctccgccagcttcggcagcctcggagtgcccaggccgtggcccctcagccgtgtggctgctgagctctgtggagccagctcacctgttctccaggaccagccctgctggggcccaggcccaggctctgagaggccgtgtcctaacctgccctggccccggagaagctacgttgccacctgtcccccttccctggcctggtggggcctggctttggggcaagactgagccacgggggaagggggaaatcccgtacctgctgctgcttcctctgtcttggctaacgtctgtccccctgaacccctaacatatcccaagagctcccaaagcctgagaccagggtcatttgtccccaactccccatctggcccctgcctgttgctagtacctgttaatttattaccctggaaggcctgtccagacacccaaccctaccccccataaaggcatttgtttacacccttggaaaa

SEQ ID NO: 262978 - DNA, 1179 bp, Homo Sapiens
  misc_feature (261)..(261): n is a, c, g, or t
  misc_feature (1006)..(1006): n is a, c, g, or t
gcggtgcctcccattcggtcctaggtagcgaggcctgggtggcgaattcggcacgagggtctgcacccccagcaagaaggcgagttagttttctagagacttgaaggagtctcccccttcctgcatcaccaccttggttttgttttattttgcttcttggtcaagaaaggaggggagaacccagcgcacccctccccccctttttttaaacgcgtgatgaagacagaaggctccggggtgacgaatttggccgatggcagnatgttttgggggaacgccgggactgagagactccacggcagggcgaattcccgtttggggcttttttttcctccctcttttccccttgccccctctgcagccggaggaggagatgttgaggggaggaggccagccagtgtgaccggcgctaggaaatgacccgagaaccccgttggaagcgcagcagcgggagctaggggcgggggcggaggaggacacgaactggaagggggttcacggtcaaactgaaatggatttgcacgttggggagctggcgcgcggcggctgctgggcctccgccttcttttctacgtgaaatcagtgaggtgagacttcccacaccccggaggcgtggaggagaggagactgtttgatgtggtacaggtccactcagtgcgagggtgagtggttttcgccccccaccactttcgctccccaccacccccccttggtcggccgcccttcggccttccagaaccttttctatcaccatttcgtttgggcgcgccgggccccgtaaggtaaagggcacatgggccattacctgttctcctaaggaaacccctgggccatgacctagggggtttggattccccccccaattaaaaaaaccgcccggggggacaatcccgcccgtttcctgaccaaaatcccagaatgggccgctctggaagcgtcagtccctgggaatcttacccccagggaagtccacagcccaccctcccgatattccaagtcttcttcnccgccgccccgggcacaccctcccggcaaggaaatggggggataatttcctataagacccttttttgccccgcaaaggggaactccgctccgcaaaaaggcgtgcaggaatgaaacccttaatttccctgccgcccggattcacacccccctctggcgccccttggcgacaaa

SEQ ID NO: 262979 - DNA, 1004 bp, Homo Sapiens
  misc_feature (753)..(753): n is a, c, g, or t
  misc_feature (866)..(866): n is a, c, g, or t
  misc_feature (943)..(943): n is a, c, g, or t
  misc_feature (958)..(958): n is a, c, g, or t
cctgggtggcgtcttcggcacgaggacttggatgagttaaatatcagggacccggaacacagagctgttctcttgacagcagtggagctgttacaagagtatgacagtaacagcgaccagtcaggatcccaggagaagctgctcgttgacagccagggcctgagtggatgctcaccccgagactcaggatgctacgaaagcagtgagaacctggaaaacggcaagactcggaaagctagcctcctatctgccaagtcatccaccgagcccagcttgaagtcttttagcagaaaccagttgggcaattacccaacattgcctttaatgaaatcaggggatgcactgaagcagggacaggaggagggcaggctgggtggtggccttgccccagacacgtccaagagctgtgacccacctggtgtgactggtttgaataaaaaccgaagaagcctcccagtttccatctgccggagctgtgagaccctggagggcccccagactgtggacacttggccccgatcccattccctggatgaccttcaagtggagcctggtgctgagcaagacgtgcctaccgaggtgacagaaccgccccctcagattgtacctgaagtgccacagaagacgaccgcctcttccacgaaggcccagcccctggagcgagactctgctgtcgacaatgcattgctactgacccaaagcaagagattttctgaacctcagaaattgacaactaagaaactggaggggctncatcgcagcctctgggcgcggcctggcaccccctcagtggttgcccagaaactatgatgctcagcctccctggagctaaacacgggtttagcaagggacgcctctggagaggnccacagaaaaaggacacgaggttggagggaacaccccatcccctggggcacaaaggaaggggtagatggctgagcanaaaaatgcagccccnaaatttcatccacagcctcccacctgttccctggccaaaaagagcc

SEQ ID NO: 262980 - DNA, 994 bp, Homo Sapiens
  misc_feature (801)..(934): n is a, c, g, or t
gtagcgaggcctgggtggcgaattcggcacgagggccgacccggaccccaaggcgcgtatcgggcgagtgggctcgcggtggcggcctagcccacagcgtccgatttgctgggggcctcccgagcctggagactgagtgacccacccctcctgcctaagggacgctatcttcaagaaccggaagagaccactcccacccccaccccgcccctgctttcgctcttctctgcaatggggtctccgaaaggagaagactgcagccctgtgaccctggaggtttgcgctctcctatgctgtctcaaaaaactgcctccttctaggcaagggcttccaaaccctcatcctgatctcaccttcagccttacccgccagctatgatccactcgactgtgaacttaaactcggcatagcctaaaacaagcccaaacttctcacccgttttcactcctaggcttgagagctcagtatgtagagttcctcacttcctcatccctccagcctctcaaatctatcaccccttctccgtggccaccgtttcagccagatctttgcattccaaacacaacagaaagtaggaagtgccctctcaaaggtgggtctgctgaacctctgctgatactctctttgcagcaagtcatctgacctccctcctccagagactcagccctctgccccccgcctggacccctgtgtcagtacctcttgaatggccacttctgcccatggacaagaaagggagggagtctgagttcttaccaagctcctcaggccattctgatgctcatcaaagtgtgggaaaannnnnnnnnnnnnnnnnnnnnnnnnnnnnnnnnnnnnnnnnnnnnnnnnnnnnnnnnnnnnnnnnnnnnnnnnnnnnnnnnnnnnnnnnnnnnnnnnnnnnnnnnnnnnnnnnnnnnnnnnnnnnnnnnnnnnncctggggcatgggggggcctgccctgaaatcccggtttcaaaaaatccgggattccggaa

SEQ ID NO: 262981 - DNA, 974 bp, Homo Sapiens
  misc_feature (799)..(799): n is a, c, g, or t
  misc_feature (859)..(859): n is a, c, g, or t
ggctgggtggcgaattcggcacgagggtccgctggttgacccgggcagcggagagaggaggttcttgtgtactgtgtttaacattgacaagaagataattaggaaataaatatatataaatacaggaacataaagagaaataaagaggaagcaccacagtcaactaaaaaagagagattcccagcaacctacacaaccatttctataggctctcagctgatgcttagtgtttggacaactcatacatgcagattgacagatgaccaacttataaaagagatttttaataattcttaatgatttcacagggtgttgtcaatggaaatatggattcttctacagcaaacatgtacatctatatcatgtggaacaaggatagtgggaaaacctctgattgtgaggacgtagaactgagaagagcatatgaaatgtcataagaaaaacacttctggagcatgtcgtcttcaagaaaatggtgcccagacagtcaggattgtgttacattttaataggaatggggatatttgtgatatactgacaaaccaagacaggtgactataaaactgcaatgtaaagtgtcagcttctcctcacacctttatagtagacatctgagaacctcactcctgtcagcatattcttgggggttgaatctcaagtgatccatagaatcttaaataaagcagaatgaaaataggcttttctgtcttcctaagtaaacagcaatgaagttgagagaaagaagatattgctggaagtcatgataaagtctatcttctgtgaccatatgttttccttanagagttttagacattggaccctcatctaaaaaaatggggaaaaagggactctcaccaggnctggttaatatgtaatcaatatgaaaagaaattactgggtaaacttcctaaggcaggcattgggggctaccttttttttatcctttaatggggccggggaaaaggaatgggggga

SEQ ID NO: 262982 - DNA, 974 bp, Homo Sapiens
  misc_feature (147)..(156): n is a, c, g, or t
ggggcggggggcttccataatataggggagttcatgggggcctaaaagccagaaattataagcacggggagtacggcgccgggccccggggtgacgtactatggggattcccacggcccggagggggacggggttcgaaaagacttnnnnnnnnnncgccccaccccaacagtttgggagggcgccttaggtggaggacaaccttgggcgggcggacggaggacggcacgggtcccctccagggagagaaggggctgggcccccgcggcaggcaggacgatgggcccgccccttaagggacacgggcgagggcctcgagccctccatccacgcagacgacggcggtggggtctggctggggctgctccctgttgcacgctcatgaggggagggacatctggtcccggggtcacctgcgacccgcgatcagtccagcctaatcctcctccccggccctgtgtgccctcgcagccagacgtgctcttccgtcccgtccttgctcgtcctctcctcacctccttctttcctttcttctgggaagcatcaccatttatgacaagcacaggcacaggcctccttagctcacagcgctttcagagtgttcaattatccactcgatagcagcccaccccttctttgcattggatgatatcgtattggccattaaactttccaaataactaccaaggctaatccccttcacagtgatgatggcttcttgtgtgagcacggtcatttctgggttctctggatgaggtgtgtacaccaacctctcattaactgacaccaaatttgtgagtgtgatattggtagaacaaagttccattttcttttccactggatccaccacagaatgttctcggatgtatgtcaatgtcctactggttcccaaaatcgctctcacgaggctgggcagcccccactcggtgcgagcaggcgcaagctgtccctcgtccgaattcgccacccaggcc

SEQ ID NO: 262983 - DNA, 1021 bp, Homo Sapiens
ggcctgggtggcgaattcggcacgaggcatcccagtcgcgccggcggtgaccatctcggctcttttgggcttaactgccgctcctctggactctgtctgactttgggggcaccatggaccaaagtgggatggagattcctgtgaccctcatcattaaagcaccgaatcagaaatacagtgaccagactattagctgcttcttgaactggaccgtggggaaactaaaaacgcatctatctaacgtttaccctagcaaaccattgacgaaggatcagagattggtgtattcgggcagactgcttcccgatcatctgcagctgaaagacattctcagaaaacaagatgagtatcatatggttcatctagtatgtacttctcggactcctcccagttctccaaaatccagcaccaatagagaaagtcatgaagcattggcatccagcagcaattctagttcagatcattcaggatcaacaactccatcatctggtcaagaaaccttgtctttagctgtgggttcttcctcagaaggattgaggcagcgtacccttccacaagcacaaactgaccaagcacagagtcaccagtttccatatgtaatgcaaggaaatgtagacaaccaatttcctgggcaagctgctccacctggattcccagtgtatccccgcgtttagcccactgcagatgctatggtggcaacagatgtatgctcatcagtattatatgcagtatcaagctgcaagttcagctcaggccacatcaaatgtcaacccaacccaagcctactacttcacagcctctaaattttgccacatgttccctgggagaaaaaaccccaaccagctccaaaacctagtggccccaaagaaaatccgaccccatgaagtgacgaatggttcacaatggaatgccccaagggaaggtcccaggtacttaaaatgggaggaaggccttccaaattccgagaacttgggcttaagacctgggatgggacacccgtttcttccacgcaagtcgggtt

SEQ ID NO: 262984 - DNA, 1601 bp, Homo Sapiens
  misc_feature (503)..(503): n is a, c, g, or t
  misc_feature (1043)..(1219): n is a, c, g, or t
  misc_feature (1312)..(1355): n is a, c, g, or t
  misc_feature (1507)..(1507): n is a, c, g, or t
ggggcttccggcacagcggaactccgggtgccggttgaggttgctggtggacctgctctggtggtcttggatgaggccccatgagcgcggcgcccctggtgggctacagcagcagcggctccgaggatgagtccgaggacgggatgcggaccaggccgggggatgggagccaccgtcgtggccagagcccccttcccaggcagagatttccagtacctgacagtgtgctgaacatgttcccgggcaccgaggaggggcctgaagatgacagcacaaaacacgggggacgggtgcgcaccttcccccacgagcgaggcaactgggccacccacgtctatgtaccatatgaagccaaggaggagttcctggatctgcttgatgtgttgctgccccatgcccagacatatgtcccccggctggtaaggatgaaggtgttccacctcagcctgtcccagagtgtggttctgcgccaccactggatcctccccttcgtgcaggctctngaagcccgtatgacctccttccacagattcttctttactgccaaccaggtaaagatttacaccaatcaagagaaaaccaggacctttattgggcttgaggtcacttcagggcatgcccagttcctggacctggtttcagaggtggacagagtcatggaggaattcaacctcaccactttctaccaggatccttctttccacctcagcctggcctggtgtgtgggtgatgcacgtctccagctggaggggcagtgcctgcaggaactacaggcaatcgtggatgggtttgaagatgctgaggtgctgctgcgcgtgcacactgagcaagtccgctgcaagtctgggaacaagttcttctcgatgcctttgaagtgagcaccagaggccttcctcctccagggccctctgcagaccaggctgagatggaggaacctgctaaaatcgatggagatgcttctagcctcccagtaggaggccccagccatgccttcaacctggcaggaggtgtagccactcctcatcctccctgagtgctgatannnnnnnnnnnnnnnnnnnnnnnnnnnnnnnnnnnnnnnnnnnnnnnnnnnnnnnnnnnnnnnnnnnnnnnnnnnnnnnnnnnnnnnnnnnnnnnnnnnnnnnnnnnnnnnnnnnnnnnnnnnnnnnnnnnnnnnnnnnnnnnnnnnnnnnnnnnnnnnnnnnnnnnnnnnnnnnnnaacgctttactaaaccctccagctccactccccctacccacccccacagactcccgtgccgcatgcaaacgactcggacctcggcccgcgcannnnnnnnnnnnnnnnnnnnnnnnnnnnnnnnnnnnnnnnnnnntccgttgactcacacattctcatgacgccccccagaaccgcccaaagcatgtggagccccacgcgccacagcgtggcttgtcccgtgaggtgagtgcggtagacgccaccgagctcgtatgtcagaggctggggtcggagggtctgctgctnagtgcggctccccaccacaccttcaacccccatagcacctgcatccatcccaattagccgcgatagacacgtagcgatcgccgaccgcgcgcta

SEQ ID NO: 262985 - DNA, 1080 bp, Homo Sapiens
aacgagcgaggcctgggtggcgaattcggcacgagggtttaacgaagtgttcagaatccccgtgcattccagcgcgttgacactgaagtcacttcagttatacgtgtgttcagtgactccgcagctgcaggaagaactgctgggcattgctcagattaacctggctgactatgacagtttgagtgagatgcagctgcgctggcattccgtgcaggtgttcaccagctctgaaccatcaaggacgcgggaggctgggtgtgcaggagagagctccgcccgggaccctgcacacaccatctccatctccggcaagacggatgcggtgacggtgctcctggccagaaccacggcacagctgcaggcggtggagagggaactggccgaggagcgggccaagctggagtacacggaggaggaggtcctggagatggagcgcaaggaggagcaggccgaggccatatccgagcggagttggcaagcggactcggtggatagcggctgtagcaactgcacccagaccagccctccgtacccagagccctgttgcatgggtatcgactccatcctgggccacccatttgctgctcaggcacgggccttacagcccccgaaaaatttcagccccccgcctccttaaggctgacaaaggaaaccttcaccgggaaatatccctttctctgggaacaacaacatccctaccctcgtggaaaaggagcggggactccgccggccgcggccacgaaggggctgcacgctttaggtcccagaagcggacaaccacccggtgcccgtcccccccacaacaactccctaccgcccggcaaccagcaaacccgctcacatgccctcgcacgaactctcctccttcagccgacatgtgcccgaatccctactgcctcgcaccagcgaaaagccagcccccgtgaggcccgttactcgtcttgtgcgtaagagtcggatatccgtagtccgttctatgcgtcccctctgtgccagccgcccagtccgaggccccggtcgtgagcgtgggccccaccgtcacgcctcgagaaaccgtgtttgccacacgcaccacccaca

SEQ ID NO: 262986 - DNA, 819 bp, Homo Sapiens
actaagataatttcagaagttcagtctattttttcagcggatactgccgccaccaagaatccaaaacctatttttgacttggagagacttgcttttgttggttccgcccgtggagacgacgatagtgtttctgtataataaagtgtctgccggctcgcgggccaggatcctctcggtgggatgggcaccacagacaggaggcccctcaggccgtgcggcagcttgttctgctgccgcctgccggggtggcagagtgagttgtctcaggaccccgtcactgcgacgttgacactcctctcccttcccttcctccccaactccccaaacactgtggaaggggagaaggaagtgatccacagcattcaggccacttggggtctagaccatggtggtgccagcctggggggggcagtggccttcagctctgcccgctggagcgtttgagtgcagaagggtgcgcctcttccctctacccccgcaccacctgctgtgtgccagcctgagacggttcctgcctgtcttgggggttggtggagggtggaggcagttctgccagccgtggcagggctgctatggggcatccagggctgtgggggtctggaggaggggacatgaggtgagaggtatccctggccgagggcggggggcagcggggggtctcctccggacctacctcagggagctgagcgtgcaggcgctccagggcaggcctgggacagagtcaaggctcagagaataaaggtagctaatctcatcataatatttttattagaatgttctgatgataaaaataaaacttgttttctttaataatttctc

SEQ ID NO: 262987 - DNA, 1316 bp, Homo Sapiens
  misc_feature (468)..(557): n is a, c, g, or t
  misc_feature (579)..(596): n is a, c, g, or t
  misc_feature (600)..(819): n is a, c, g, or t
  misc_feature (1035)..(1035): n is a, c, g, or t
  misc_feature (1110)..(1171): n is a, c, g, or t
tcggacgaggggaggatgctgggaaggaggtaaaatggccaccggcggcggcgcggaggaagagaggaaacgggggcggccgcagcttctgccccccgcgcggcccgcggcccggggcgaggaggccgacggcggccgcgagaagatgggctgggcccaggtggtgaagaatctagccgagaagaagggcgaattccgcgagccgcggccgccgcggcgggaggaggaaagcggcggcggtggagggagcgccgggctcggcggccccgcgggcctggcggcgccggacctcggcgacttcccaccggctggccgcggggacccgaagggccgtcggagagatccggccggcgaggcggtggacccccgcacaaatctcgtcgttgtgcgaggcgcgccggagccactaatcgtttacgccgtcggttccgccttgtcgctccccgcctgtcccaggcccgctcctgnnnnnnnnnnnnnnnnnnnnnnnnnnnnnnnnnnnnnnnnnnnnnnnnnnnnnnnnnnnnnnnnnnnnnnnnnnnnnnnnnnnnnnnnnnctgcgcgttcgtataccctttnnnnnnnnnnnnnnnnnnttannnnnnnnnnnnnnnnnnnnnnnnnnnnnnnnnnnnnnnnnnnnnnnnnnnnnnnnnnnnnnnnnnnnnnnnnnnnnnnnnnnnnnnnnnnnnnnnnnnnnnnnnnnnnnnnnnnnnnnnnnnnnnnnnnnnnnnnnnnnnnnnnnnnnnnnnnnnnnnnnnnnnnnnnnnnnnnnnnnnnnnnnnnnnnnnnnnnnnnnnnnnnnnnnnnnnnnnnnnngtccacgccgtccctctctctcgctacgatatctcgccctctctgtcgccgcccccccgcgcccctctatcagtgaatacccaccctctcgccggcgcgccgcactttctgcctctcgcctggcggccgcgatgtcacccctcccctttgtccaacccgcgccttctcacccgtttgtcgtgtgtatccgtatatccccctttccagcctttcgcnatctttccctccgcctcccctctttgtttcgctccctgccatgacacttcgccgcgattcctgacccgcgcctannnnnnnnnnnnnnnnnnnnnnnnnnnnnnnnnnnnnnnnnnnnnnnnnnnnnnnnnnnnnncccgtccgggtcacgcacgccgcgcgctgtccctcgcgttcgcccgtccaccttatccactccttccaccgtgccgcgtccattccctgtgtgcccgaacccccgaactacgctctcactcctctccctatccttttcctctccc

SEQ ID NO: 262988 - DNA, 1082 bp, Homo Sapiens
  misc_feature (231)..(231): n is a, c, g, or t
gtgtgttcgagggtgccaccggccctttatttctgtgggggggagccccaggagggaaaatcccacgggatggcttgcagggaggcccaggaagtttggccactattcaagggagccttgacaggaaaggtaatgggggccaagggaaggaaaaggcaaggaaataggttagcctgcccaacttaattttttcccacttgcctaatcctgggtcagtgggccacttaaggngaaaaataatgggggcagggagagaaaagaaggaggtccttagaatgaaacctgattggctttctctgggctttggaacatttcttcccctaatggtggggtaagaggaaactgggaatccaaatgattgaggttaaaagagtgggaaagcattaggaagctgcctaaatattggcaggactatgggaaacaggatagaaaattgggcaggaggaagcagttgtttctgtctggggtttctcctttctcacctctacaatttgctcacacctgtctctggttttcagggcttctctgagttggaagaggttcctggtttggagaatggtcccacggtggccagcacaggagcaaatgagagggtgggacagcgggaacagacacgtgctgctctccttccaccctgagagaatgctctccagacattcctgcatcccaccccaccaaactcagaagcttgctgggatccttcgagtccaataggaagtccgggagtgccttcagttttcactcaaagcaggcccttttttcgttccttccctgttaggggaagatacacctggacgagaatatatcctcacctcaccaccctgaaaagctgctttctcccttgcatccatatcctctcttcctgtcacctccccatacagcttcacatttgcctcatcgcacttttcttttctgtccacctttcataatcccatccactccaaatcccggaccctgcacacgccaactccctgaatccaattcaggagtgccccagttcccctttcgcctcgtgccgaattcgccacccaggcctcgggggatgggtggattgttgcaccggagaagaggggtgggggtgg

SEQ ID NO: 262989 - DNA, 495 bp, Homo Sapiens
gctgtcccaccctctcatttgctcctgtgctggccaccgtgggaccattctccaaaccaggaacctcttccaactcagagaagccctcctgcagctcttgatagtgcagactctggctcctgcagcatcctggtttcctctggctcagcaagaatagggcgtgcactgagaccagcactccccctagggtgaaggcctcagcactgagttccagcaccagcaagccagcatgctgggaggaggcagttggggcaggccccaaggctgtcttcatcacctcgaccaccaccacgatgaaacccaagatcaagttgaaggtgttgaatatcatcatggcccgcaccttccagaggcggggtgctctgcgaagctccagagtgacagtcccagtgaggagacctgaggctccaggcccaagaggcagcgctgtggccatgtgacaatcagagttcaggcaggcgactgagacagcaaggggcaccacaaccactgcca

SEQ ID NO: 262990 - DNA, 497 bp, Homo Sapiens
gacacgtgctgctctccttccaccctgagagaatgctctccagacattcctgcatcccacccaccaaactcagaagcttgctgggatccttcgagtccaataggaagtccgggagtgccttcagttttcactcaaagcaggcccttttttcgttccttccctgttaggggaaagatacacctggacgagaatatatcctcacctcaccaccatgaaaagctgctttctcccttgcatccatatcctctcttcctgtcacctccccatacagcttcacatttgcctcatcgcacttttcttttctgtccacctttcataatcccatccactccaaatcccggaccctgcacacgccaactccctgaatccaattcaggagtgccccagttcccctttcgatccatctcctttctactgtagcggagactacaagtcccaggatgccccgctagcccgtgaccggctaggaaataaagagccttctctccgcggtaaaa

SEQ ID NO: 262991 - DNA, 1141 bp, Homo Sapiens
  misc_feature (346)..(354): n is a, c, g, or t
cgctctccctgggtccagcacccgacagggagatccgcgcgcgggcgtgcgtctcttcggtgcttatcaacgtgtggcgaagaagaagcgcacacacgccgtgggggcatgggtgggaggattagtaataggacaaacggcggggtggaagatgcgcgtggggtcggcgaaccactgtgttggaccgcgtgtaggaaacccgcgtgtctcgtgggttctcacggcggcgggaggattccataatggggggggaagtgcgcgggtctaggggccgtccccttgcgcagccacgagttccccgcgctttccagggggtgccaccgcacgcaggcttctggaaccgggnnnnnnnnngagatagtcggggaagagaagtggggatcatggccccctccgttatagtaggtggctaacgcttccccgggggtgccctcattcccggggaaggggaggtccgggtgattgggaaccggggggagctcagcgttccggagtctgcggcccggggcccagccgggctgaaacgcgcctcctgagtgttgaaagcggcagggcgccggcctttgcacccagaggccagggcgtctcactcaccttcacatccaggcctcttaggggagcgcggcttgggcttttccaggaaggaatggactccaacgaacagagaaagaagaagtgtggagagacgggcaggataagcaggcactgggcccaagccgcccttggaggctctgcatgttctgatgtgaaggcggaggctcagccgtgctctcccaggaagccacctgggcgtttggggctttagctaggaaagaggatgtcgcctgcggctgcgaaggcgccaaagcccagacctcgcgcctccgcccgcgacggcggcactgggggcccggagcgggcgggagacgtggattactgcgggcttcggggccctagcctcgaccgcgacgttcgctcgcatcgcgtacggacagaaacccgtgagcgctgaagaaagaacacctgaatccggagccccagcccccgtcgctcgtttgcgcgaccccaaaacccggcgggacgagggtcgcccgatgtctcgccacccagccctcgctacgtaggaagttaaaagccgcgccggattgtgcacgaggccaca

SEQ ID NO: 262992 - DNA, 1206 bp, Homo Sapiens
  misc_feature (484)..(527): n is a, c, g, or t
  misc_feature (585)..(595): n is a, c, g, or t
  misc_feature (682)..(682): n is a, c, g, or t
  misc_feature (706)..(706): n is a, c, g, or t
  misc_feature (757)..(757): n is a, c, g, or t
  misc_feature (915)..(915): n is a, c, g, or t
  misc_feature (1056)..(1056): n is a, c, g, or t
  misc_feature (1115)..(1115): n is a, c, g, or t
  misc_feature (1155)..(1155): n is a, c, g, or t
tgggtggcgaattcggcacgagggcggcgacggcaggcggggctggggagctgcggctgttaccgcgagctgcgcaggcgtctctgtcataagttgaagaatccatacaccattaagaaacagcctctgcatcagtttgtacaaagaccacttttcccactacctgcagccttttatcacccagtgagatacatgtttattcaaacacaagataccccaaatccaaacagcttaaagtttataccagggaaaaccagttcttgagacaaggaccatggattttcccaccccagctgcagcatttcgctcccctctggctaagcagttatttaggattgaaggagtaaaaagggggcttctttgggacccaaattccttccctggccccaaggggaaaatggaaaaaatttaaccgggaaattttcttgaaaacccaaaaaatttttgtggcacccaatctccggggggccttcctttttggccnnnnnnnnnnnnnnnnnnnnnnnnnnnnnnnnnnnnnnnnnnnnagaaaaacaccccttttctctcgggggaaaaaaaaccccgggtgcgtttctcccctcnnnnnnnnnnnctatctctgtggtggcggcgcttctgtggggggcgcgcgctacccctccgctttttctaaagcggggagaagcctctgttttcgccncctaacaacacacccgccaagaanaagaaaaagccgtgggggggcccacacactattttttgtcgcgcgtgccgntgccgagataaaaacaataaggtgagacgagggggggcggcggtggtgtgttattattttctctctcttcacctagacagcggagagcggtgtctgttgttttctaacagataaatagagaggtcaggtgtttgtgtgttctctagctcgacgcaacnctcagtgtacatacacaagcacacccatcgccgatagcagcggcggcgtggttgtgtttgtattgttatcgctaatacaagactctatatcgccgacgcgatccgctcacgccgcacattataacaacatcgcactgcgcngcgccgcgctctcttcttctcgctcttcgcgaggcacagacacaccacacgatggctgngttatccgttatcgcatctgcgtatgcgcgcgcagccccncgtgcgcgcgcgcgcgatcgtacctgtattctatacagtgattctatgcgt

SEQ ID NO: 262993 - DNA, 1032 bp, Homo Sapiens
agggtctaccacgaaagacaccaagcggcatgggatagtacttggcgtaggtactggcggagacaaggtggacatagtggaccgggcgtctcgctagggcccattatcgggcgcggcgtgtggccgtgcggtgcccacgcgaagggtacccattttgggccgcgatgtaagccaacagaagaggccaaggcggcggggcgataaatgggggccagcgcggcgtacataaaaccgtacgggatccagcgggtacacggggcaggcaaaaggggggtgggagacggagaaggaggagtcgatgtaccggcggagtagcagagggagaacccctccagggaagcgagcctcacttaccagcgggtaggaggagcctctgtcaatcaccacctcagtcaggacctggtactgcaggccctgcttcccgacatccatgtccaggcctgcagcctgcgagccgttctcacccagcccattgtgcacggccgtcttcttcccccggagctccttcaccaccctgaccttcagccgactccggagaacaacagctgcgttcccctctatcacctgagtaacttgggactgaaagttctcaaagctgaatggggtcaggaagcccagggagcccaggtggaaggccatgaccggagggacgctgccctggaaaagcgaggaagcgtacagcagcgtcccgtctccccccaggcagatgatgaagtctatctgattggaaatgtcatcataatcttctcgaaaggtacagaatttcttcttcactgccccaaagctttcatcgctggcgatggcagggtcttctagcactttcttttccacatacacgatcatgttctcctccatgaggtgcgtgcagagctccttgaacggctgcagtaggctggcatctctcatcttcttgatgacaaggacgctctttggggacttgttccacgtcagccgctggctcgcggggtcctgaatgtgcatgatggtctgggggttctgcagcacacaggcccgccacccaggcctcgctct

SEQ ID NO: 262994 - DNA, 1005 bp, Homo Sapiens
  misc_feature (816)..(816): n is a, c, g, or t
  misc_feature (870)..(957): n is a, c, g, or t
ggcctgggtggcgaattcggcacgaggtgtaccagaagtgtaccactgtggatgaagcagagaaagcaattgagctgcgtctggcaaaaattgaccatactgcaattcacccacatttacttgacatgaagattggacaagggaaatatgagccgggcttcttccctaagctgcagtctgatgtactttccactgggccagccagcaacaagtggacgaaaaggaatgcccctgcccagtggaggcggaaagatcggcagaagcagcacacagaacacctgcgtttagataatgaccagagggagaagtacatccaggaagccaggactatgggcagcactatccgccagcccaaactgtctaacctctctccatcagtgattgcccagaccaattggaagtttgtagagggcctgctgaaggaatgccgcaataagaccaagaggatgctggtggaaaagatgggccgagaagctgtggagctagggcatggggaggtgaacatcacaggggtggaagagaacaccctgattgccagcctttgggatctcctggaaaggatctgggagtcatggactacaagtgaaacagggggaaaccccccttatggggcccacctggtacctaatcagggacaccggcacagaaacctcccatcgggaggcctcctcacttggggaaaactcccggacgcgaagcgcaggaggcccaggcgagcccactcctggcgcgccctgggggggtgcccggatgccggggagggggcggcgtccgagaccctccggcgcgcataagggtgggcggccgcacacgcgnacggcccggcggaggccgggcgaggcgcggaaagcgcagcggtccgcaggcagnnnnnnnnnnnnnnnnnnnnnnnnnnnnnnnnnnnnnnnnnnnnnnnnnnnnnnnnnnnnnnnnnnnnnnnnnnnnnnnnnnnnnnnncgaggaacgccgagccccgaggagcccgcgggggcgcgcccgtagggc

SEQ ID NO: 262995 - DNA, 1162 bp, Homo Sapiens
  misc_feature (48)..(67): n is a, c, g, or t
  misc_feature (257)..(316): n is a, c, g, or t
  misc_feature (1025)..(1052): n is a, c, g, or t
ggcctgggtggcgaattcggcacgagggagagagaactagtctcgagnnnnnnnnnnnnnnnnnnnncaagaccatccaataatttactgtgatcccatctgtgcccgacaagggcccacagaggcctgggaggggagctaagggctggggttccggtggcatttgggatgttcaagacagtctgtgcacagcctccctgggagggtctgcagtcacctcggcccacggtcccggggtgactgggctccagcagccnnnnnnnnnnnnnnnnnnnnnnnnnnnnnnnnnnnnnnnnnnnnnnnnnnnnnnnnnnnngcatccggcacctccatgtcctgagcttgtgctgcgtcaggagagcacacacttgcagctcatgcagccggggccactctcatcaggagggttcagcttccgcagcttgagctgccggatctcacggcaccaacgtgtagaaggcatcctccactccctgccggggtcttgcccgaggtctcgatgtaggggatgccgtagcttcgggcgaggtcctgagcctgccgagattccacagtgcgtgcagccaggtcacacttgttccccaccagcaccatgggcacgtcatccgagtccttcacccgtttgatctgctccctgtactggtggatgccctcaaaagacttggtgttgttgatggcaaacacacacaggaagccctccccggtgcgcatgtactggtcccgcatggcgctgtactcctcctggccggcggtatccaggatgtccaacaggcacgtctccccatcaatgaccacctgcttccggtaggaatcctctatagtggggtcgtattcgtccacaaaatggttctggatcagctggatggtcagcgcactcttgcccacaccgccggcgcccaccaccaccagcttatattccgtcatcgctcctcaggggcctgcggcccggggtcctcctacagggtctcctgccccaccgttcacaggcgcgactgcccccggggccagggccgggtccgaggccnnnnnnnnnnnnnnnnnnnnnnnnnnnnttcgccccgcgcatgggctccgtccgcggcgggtgcggccctcgtgccgaattcgccacccaggcctcgaaaagggggaataaaggggaatgggagaaaaaaggagaggg

SEQ ID NO: 262996 - DNA, 1011 bp, Homo Sapiens
  misc_feature (929)..(943): n is a, c, g, or t
gagcgaggcctgggtggcgaattcggcacgagggcagattcggggctggacatgtcctagcccagactctacccgtgaagacttggcctactgtgagcacctctccgactcccaggaggatatcacctggcgaggtcggggcagggagggactggcacctcagcgtaaaactaccaaccctttggacctggctgtgatgcggctggctgccctggaacagaatgtagaacggcggtacctgcgggagcccctctggccaactcatgaggttgtgctggagaaggccctgcttagcacacctaatggtgcccctgagggcaccactacagagatatcatatgagatcacccctcgcattcgtgtctggcgccagaccctcgagcggtgccggagcgcagcccaggtgtgcttgtgcctgggccagctggagaggtccattgcctgggagaagtctgtcaacaaagtgacatgtctagtctgccggaagggtgacaatgatgagtttcttctgctttgtgatgggtgtgaccgtggctgccacatttactgccatcgtcccaagatggaggctgtcccagaaggagattggttctgtactgtctgtttggctcagcaggtggagggagaattcactcagaagcctggtttcccaaagcgtggccagaagcggaaaaatggttattcgctgaacttctcaaagggtgatggccgccgacgccgggtactgttgaggggcccaagaaagcccagcagcaggggcctcggtaactcggaagaagggctctccccctcccaaggggggggcgactcttctatgcgggaacccccacagtgagtctcacatttttgcgagattaccctggaagggaataggaggtcccatgatgcagccctgggcctttcctagaggctggggaaccaccgttttnnnnnnnnnnnnnnnacccggcgcattcattaaaaaatccctatggggttttttccccccctgcgggaaacgggttgctttca

SEQ ID NO: 262997 - DNA, 1087 bp, Homo Sapiens
  misc_feature (18)..(18): n is a, c, g, or t
  misc_feature (21)..(21): n is a, c, g, or t
gggtagttggaaaaatgnccncccccgggtcgcgggggcgggagcgtaaagatggttgggtttatagtggcgcggggttatttcgtggcggacttccgggcgccggttttggtaccgccgcggggaatgcgtcgctagagaacatttcctgtccggggcgtgggtgtgcgagaaaacggggacggggttcctgccgccaagtttctgttgggctgggggaggccccgccgcccccgggaggagagctggttttaaagtgtgttccggggtacgagccgggcggccaagcctattggtgccgggcggccaagcaaatggggctgaagcccagaagggccccatggtctgcgcctattactgagggagcaagaggagggaagggagaaagggatgtaggaataagaggatgtggggcactgccaaggccaaggtcaaaaatcagggttgtatctgacttgagtctggacccagggcagcatcagcaggtgaaaatggcaggtttttgtttggaaggtggggggagatgccacaaggtgactccccacctcccttgcctcacagattggcctgttttccctgataaaactcctcccagcggctctcgaagaagcggcgcatgatgtgcccagccttgcctacttcagagtcatcctcgttgaaagtctggcagttgtcaaataccaggagggcatcagccgcaaactcctctgagctggtgtaccctcccctgagcagccgctcccgcatggtggaaaaatccataggatttttgatgatgcgccggtacccactcaccaaacgtgggttcacaggctctaggaaaggccaggctgcatcatgggactccatctccatcaggataatctcgcaaaatgtgagatcactgtggtggttccgcatagagagtcgccgccgcttggagggggagagcccttcttccgagtaccgaggccctgctgctgggctttctcggcccctcaacagtacccggcgtcggcggccatcaccctctgagaagttcagcgaataaccacttttccgccggacgcgtgggtcgacgatatcccgtaaattccgggccggtacc

SEQ ID NO: 262998 - DNA, 895 bp, Homo Sapiens
gctgggtggcgattcggacgagagatgcccagccccaggatgaagcaagacatgtggggccgtagcgaggtgtcacatggggcagggaagcttcatgcccacgggttctgccagccccagcacagacccaaactggggctgggcctctatccctcctctgcctctgttcgcatagtaagaaggagtgaccgggatcctccccttcccctaccctaagctgtagcctgggtgactgactggcctgggcctggggtggggacgtccccaagccaaattactccagggtctctgctcctcgtggctgccaggggcctgaagggtctgggtgggtctcccaggagaggaatactgagtgggagatcggctgtctggagtgttctgatgcaagtctctctctcctgagcctcctcttgatgcaagctctaaagggagaagtcaggccctgcctctccagggtatagacggccctgctaggccccagttcttcctccttccccctttcccaggaaaggccagcccagtccatggccttcttgggcctctgggcacagagccaatgttcgtcattgcagctctcagcaaactgggtcatagctttccccacagctcagcctggggcctgggcagggctcccagcctgcaccgcctcccactgccagtggggcatgattctctcaggcttctgccccgaggccttcgtcatcctcagggtctggacttggtcagtggcctttcaccagtggagctgccttcccagggagaaggagccgtgcgccagggcagggcccgtgccttagacttctcccgacccccagagcgctggtacacaggtctaggcaccacacagtgctttggaaattctcagtgaatgatgtttaataaagcaaaaaatgtc

SEQ ID NO: 262999 - DNA, 1077 bp, Homo Sapiens
taggtagcgaggcctgggtggcgaattcggcacgaggatacggagtgcatgtgtggagacagaggaatatgctccaacaaatttcggatagaggcgccgaagacaggacgtggggaagctaaagaagtaaacaggtcatggcacgtttaacaaaaagacgacaggcggatacaaaagctatccagcatctttgggcagccattgagattatacggaaccagaagcagattgccaacattgaccgtattacaaagtatatgtctcgagtccacggtatgcaccctaaagagaccacccgtcagctgagcttagctgtgaaagatggtcttattgtcgaaactctaacagtgggctgcaaaggttcaaaagctggtattgaacaagaaggatattggttgccaggagatgagattgactgggaaacagaaaatcatgactggtattgttttgaatgccatttgcctggagaggtgttgatatgtgacctgtgttttcgtgtgtatcattccaagtgtttgtctgatgagttcaggcttagagacagcagtagtccctggcagtgcccagtttgcaggagcattaagaagaagaatacaaacaaacaggagatgggcacatacctcagattcattgtctcccgcatgaaggagagggctatagatcttaataaaaaggggaaggacaataaacacccgatgtacaggaggctggtgcactcagctgtggacgttcccaccattcaagagaaagtgaatgaagggaaataccgaagttatgaagagttcaaagctgatgcccaattgcttctccacaataccgtgattttctatggagcagacagtgagcaagctgacattgcgaggatgctatataaagacacatgtcattgacctggatgaactgcagctttgcaagaattgcttttactttgtcaatgctcgtcctggacactggttctggtatccttggaaacctatccatgacctgggttgggctaaaatgaaaagggtttgggttttgggccagccaaagttcgtgcggaaagagaacaatcaggtcgagcgttgccttccttgg

SEQ ID NO: 263000 - DNA, 647 bp, Homo Sapiens
  misc_feature (561)..(600): n is a, c, g, or t
gctgggtggcgaattcggcacgaggcttaggattgaatccacccccattctgtacatagcctcttctgttggtcttgttgaaatctagtttcagatttttaactacccaattctgctgggggtgggggacacccccccttcctcgctgggtgctggaccccttttgcagcctgggctctgccttgcactatttccccttcctggcctgacggctcctccccctccttaaaaggggcaggttcaggggcccggtgctcttcctcccttccatgcacccccatgcccatttgcacagctgcccaggtacccctaacagtggggaggggtcacagggagggggtagcgggaccagtccctgttatctatttaaaaagtgatgatgtaatatattggggtggcggggagatcgggttgtcctgggcctcatcttagcatttcaggtgatggggggagcccagggctggggagacctggggcccagccccagaaagtggggacaatgtggcctcccttctccctactttcggctttcccagtcagtgccttagggggagaggcacnnnnnnnnnnnnnnnnnnnnnnnnnnnnnnnnnnnnnnnnacctcgggtgtaagcgacaggaagaaataataataatttaagattca

SEQ ID NO: 263001 - DNA, 998 bp, Homo Sapiens
tggtacggtccggaatcctcgggatatcgtcgacccacgcgtcgggaggagggtgatgttgatagtgatgaagaagaggaggaagatgaggagagctcctcggagggcttggaggctgaggactgggcccagggagtagtggaggccggtggcagcttcggggcttatggtgcccaggaggaagcccagtgccctactctgcatttcctggaaggtggggaggactctgattcagacagtgaggaagaggacgatgaggaagaggatgatgaagatgaagacgacgatgatgatgaggaggatggtgatgaggtgcctgtacccagctttggggaggccatggcttactttgccatggtcaagaggtacctgacctccttccccattgatgaccgctgtgcagagccacatcctccacttggaacacgatctggttcatgtgaccaggaagaaccacgccaggcaggcgggagttcgagggcttggacatcaaagctgagtcactggacctagctgtgccccccaacctagatgtggcagcaccaccccaggggcagaggactctctgggcacccgctgtgcatggagccagagtgcagagccccagatcctttagtaatgcttcccctggtcctgcaacaggccggtcacctcggcgggcccggggctgaggtcagctcatgctggttattgcctctttctcagaatcctctttctccccatttgggcctgggctcaaggagcagtgggcggtgggaactgccgggctaacccacggtgcctcagtggaataaaccaagccgcagccagatgggccgaggtccgacggaagagccttcccttgcaacataaagcctgggggggccccagctctggaggtcaaaagcaatggtcgcctacgtgtaccccaacagataacaaaataaatagatcgtaacaccaagcaaagaagataaaaaatacacagtcacatcacaaacagacacaaccacacatac

SEQ ID NO: 263002 - DNA, 994 bp, Homo Sapiens
gcctgggtggcgaattcggcacgagggaggagctcatctgccctatctgcctgcacgttttcgtggagccagtgcagctgccgtgcaaacacaacttctgccggggctgcatcggcgaggcgtgggccaaggacagcggcctcgtacgctgcccagagtgcaaccaggcctacaaccagaagccgggcctggagaagaacctgaagctcaccaacatcgtggagaagttcaatgccctgcacgtggagaagccgccggcggcgctgcactgcgtgttctgccgccgcggccccccgctgcctgcgcagaaggtctgcctgcgctgcgaggcgccctgctgccagtcccacgtgcagacgcacctgcagcagccctccaccgcccgcgggcacctcctggtggaggcggacgacgtgcgggcctggagctgcccgcagcacaacgcctaccgcctctaccactgcgaggccgagcaggtggccgtgtgccagtactgctgctactacagcggcgcgcatcagggacactcggtgtgcgacgtggagatccgaaggaatgaaatccggaagatgctcatgaagcagcaggaccggctggaggagcgagagcaggacattgaggaccagctgtacaaactcgagtcagacaagcgcctggtggaggagaaagtgaaccaactgaaggaggaagttcggctgcagtacgagaagctgcaccacctgctggacgaggacctgcggcaaaacaggggaggtcctagaaaaagcccaggccaagttctgcagcgaaaacgcagcgcaggcgctgcacctcggggagcgcatggaggaggccaagaagctggtgggctccctgcacctggtctttaataagacgggagaggccagctttcttgaaaacaccaaggctgtgagaatccggatggaaaggacccagaccggcccgagcggcaaccctttccccccctaagatacggccccctggaacttcaagt

SEQ ID NO: 263003 - DNA, 970 bp, Homo Sapiens
  misc_feature (641)..(641): n is a, c, g, or t
  misc_feature (644)..(644): n is a, c, g, or t
  misc_feature (652)..(652): n is a, c, g, or t
  misc_feature (890)..(890): n is a, c, g, or t
gctgggtggcaattcggacgagggcggcgggtgcctgcctggctggggagccccagggatagcggtcggacttcaggttctggccaaggctgagggaccctggctgcagcggatcggcacgccgggtgggcgagagcttggcctgcatgtgcctcccacagaccctggggtgatggccttccccctcttggccgggacgttgccccacgttgagtcccacacaacatcctgtgagcctggctccccaggagggcccccagacagctcccaggcacgtcataggcaaagcctgttcccccgactcaggatttccaaggcctggggtcctgctcacccccctttgctctcacgcccagcctgtccccaggtttcagctgggagaggccacctccctcagccaaggaaaacgagaacccccagggtacaggaggaggctggggcaggtccccttgggtgtcactccctcagcccctgcccaggcccactcccgctggtgctggagtacgcactgggtgggggggccctgctcagcccaacctggagggtcccagtgtcaccagaaccaggggcacggcaacagcatcgatgggttctgcagcccagggcccccgatgcggggtcagtggcgtgggggggccccnggncccccgcntgcccatggccgggcccatgtgcgcttgcgccgcccccccctctgttgttcgcttccctgcctcccggcgtcgcccccttcgtctccttccacccacgctacgttcgcctcctcaccccctcataccgcccttgcggccaactgtcagtcatcgagctctaacgacatgcgtccccaaatttacccctctagaaccgccacgctcctccaggctaatttacgccacccgccctcaatncacgcactagatccagcctaagaggcgaaatgaaagaaggctggctacttcccgaagatacgtaacccacccccggcgag

SEQ ID NO: 263004 - DNA, 832 bp, Homo Sapiens
  misc_feature (87)..(370): n is a, c, g, or t
  misc_feature (372)..(389): n is a, c, g, or t
ggtgatactgtttaattttctatgcttcataacgtacacagaagtgggttttcaaaattttgtgctatcaaaatgttaggagataannnnnnnnnnnnnnnnnnnnnnnnnnnnnnnnnnnnnnnnnnnnnnnnnnnnnnnnnnnnnnnnnnnnnnnnnnnnnnnnnnnnnnnnnnnnnnnnnnnnnnnnnnnnnnnnnnnnnnnnnnnnnnnnnnnnnnnnnnnnnnnnnnnnnnnnnnnnnnnnnnnnnnnnnnnnnnnnnnnnnnnnnnnnnnnnnnnnnnnnnnnnnnnnnnnnnnnnnnnnnnnnnnnnnnnnnnnnnnnnnnnnnnnnnnnnnnnnnnnnnnnnnnnnnnnnnnnnnnnnnnnncnnnnnnnnnnnnnnnnnnggagacaactgacaactgaatgattcagaaccagaccttggggtggagacagagtagactgtgggagggactgtctgaggcagtgagtactatttctggtgcagccactaacttgctgtgtgtccttggctgcacaaatcactcctgggcttaagtttttcatatgaaaactgaagatgcttctggtagctctcaggaccttccaattctgttgtctgtagcggggcttgtatgattctcatggaggacaccaggtaggacctcaagctgaaaagggtggaaaggcaagggagtgtcacagcaagctgaaggggtcccagcccttcgggattttcctcaggaccttgctctcttggccccaagggcgccaagtgctgctggaaacaggaaccgaacgggaaactggacaccggggaaaagcccagggaccgcccctgcccctt

SEQ ID NO: 263005 - DNA, 763 bp, Homo Sapiens
ggagctgcatcttgtgtagggtccagctgcttttggggactgcaggaatcatctccctgctgaatggaggagccgggggtcccccaggccaactggaaaatctcccaggctaggccaattgccttttgcacttccccgttcctgtcacatttccccagccccaccttcccctcctgatgccctgaaagcttccggaattgactgtgaccacttggatgtcaccactgtcagcccctgccttgatgtccccatttagccatctccatggagctcctgctggagggccctgaaccctgcactgcgtggctgcccagccagctgcctcctgtcctgggaggaggcctcctggggtgtcctcatctggtgtgtctactggagggtcccacaggagaggcagcagaggggtcaggggaggtctcctgccgggggttggcctctcaagcctcaggggttctagcctgttgaatataccccacctggtggtggcccctccgatgtccccactgatggctctgaaaccgtgttggtggcgatgtcccagacaatcccaccaggacggcccagacatccctactggttcgctggtggctcatctcgaacatccacgccagcctttctggggaggccacccaggccgcctgtccgtctgtcctccctccagcagcacccccctgccccctggagtggtggggccatggcaagagacaccgtggcgtctcatgtgaactttcctgggcactgtggttttatttcctaattgatt

SEQ ID NO: 263006 - DNA, 1052 bp, Homo Sapiens
  misc_feature (29)..(29): n is a, c, g, or t
  misc_feature (197)..(197): n is a, c, g, or t
ctcgtgtctcgcggagtcatgtcgagtgnggatcgtaccgatgccgcgaacgctcgtccacgcggcggctctggcggtctgcagtgtcgcgggactgcgtcgccgtgcagttactcacgtgtatcttgggggtgcattgccgcagccgtgcgagcgcgcgaccgcggtgagggcaccaaggagaatatacgcaggcntgcggatagtgggtgcctgttggcagcggcaagtctggtgggactgggagttggcctggttgcgtcggtagaagcggccgctggcaccgcacgtccgctgcggcggagcgccactggtgcgccccgctcgtcatgtccgccgctgcccggcccggacgggcctgctgtgttacgtgaggccgcgcgcggtgggccgcgcgggtgcgccggggcgggattaccctagagcggggcggccgctggcgtcgagttgtctgggttgcacggtggtgcggcgttattccccgcctctttccagacggcggcgccccactcctgctatacaccccgcgccctagcgaaccgcctggagacaggccagcgcatagcaaatgggccccattacccggccgcagaggagccgcacgatcgcccggaaggagcctgtgcatggccgccttagtggcacggggaggggccgttcgatagctccccagtgccctcagtataaagtccaacctcttcaacattcaaggcccttctaatcagacctctgctgaatttcctctctgtgttatcctcctccatgaccccatgtcagggcagcccattgctcctccagtccccaggtaaccatcatgggccttgtcagggacacctcctgccttccctcctcatgtccctgccctgctccctttgggcccagggccttctttcttgcccctctctaatccaccttccacctggcatctggaagcatctttctctccttccatagctttgcccatgtcctcagaacacagttcagctcctcagtctggtagtcaaagcccttggagatccagccccatctcatctcatgctgatcccttctcc

SEQ ID NO: 263007 - DNA, 382 bp, Homo Sapiens
aagcgcgcccgcccccacaggcctaggtagcgaggcctgggtggcgatttcggcacgaggctgggcaggcacgaggcttcggcgcggctctgggaggttgggagtggcatccgatccttggccgggccctggtggcctccgtggccccaagatcacaagggcgtagcgaaggcgagccggcgatcgcacctcgtcccgcccaccctgcccggactcgtaacgccgagcttggggagggccgggacgcgcagccgccgccgagcgtgaccaagtttggaaacgcgcgcggggccgggacgctggctcggggggccctgccgaggagcggtcgccccctccgctgctccccgcgccaggcctggggccctggagggaggggggg

SEQ ID NO: 263008 - DNA, 952 bp, Homo Sapiens
ggcctgggtggcgaattcggcacgaggggatgacaaaccaagccctatcaagaaagagcgctcacccagacctcagagcttctgccactcctccagcatctccccccaggacaagctggcactgccaggattcagcactccaagggacaaacagcggctctcctatggagccttcaccaaccagatcttcgtttccacaagcacagactcgcccacatcaccaaccacggaggctccccctctgcctcctaggaacgccgggaaaggtccaactggcccaccttcaacactccctctaagcacccagacctctagtggcagctccaccctatccaagaagaggcctcctcccccaccacccggacacaagagaaccctatccgaccctcccagcccactacctcatgggcccccaaacaaaggcgcagttccttggggtaacgatgggggtccatcctcttcaagtaagactacaaacaagtttgagggactatcccagcagtcgagcaccagttctgcaaagactgcccttggcccaagagttcttcctaaactacctcagaaagtggcactaaggaaaacagatcatctctccctagacaaagccaccatcccgcccgaaatctttcagaaatcatcacagttggcagagttgccacaaaagccaccaccctggagacctgcccccaaagcccacagaactggcccccaagccccaaaatggagatttgccgcctaagccaggagaactgccccccaaaacacagctgggggaactgccacccaaaccccaactctcagacttaccccccaaaccacagatgaaggacctgcccccccaaaccacaggctggggagaccctgctaacaaaatcccagaactggagatgtgctcaccccagggtcacaaacccctcttgagtcacacttgaagtcacaccccattggaatc

SEQ ID NO: 263009 - DNA, 1112 bp, Homo Sapiens
actcgcctgtgtggcgaattcggcacgagggacaagctgaaagcctcagccccttcgcggatcatcaacctctcgtccctggcccatgttgctgggcacatagactttgacgacttgaactggcagacgaggaagtataacaccaaagccgcctactgccagagcaagctcgccatcgtcctcttcaccaaggagttgagccggcggctgcaaggctctggtgtgactgtcaacgccctgcaccccggcgtggccaggacagagctgggcagacacacgggcatccatggctccaccttctccagcaccacactcgggcccatcttctggctgctggtcaagagccccgagctggccgcccagcccagcacatacctggccgtggcggaggaactggcggatgtttccggaaagtacttcgatggactcaaacagaaggccccggcccccgaggctgaggatgaggaggtggcccggaggctttgggctgaaagtgcccgcctggtgggcttagacgctccctctgtgagggagcagccccctccccagataacctctggagcagatttgaaagccaggatggcgcctccagaccgaggacagctgtccgccatgcccgcagcttcctggaactacctgaagccggggagacccaggactggcgggcgcccatgccccgcaggaagggttctaaggggggccggtggctgggcccgcaagtggaacctgggcccctgcacggtggaggcacctgcccccttggggcctcctggggttgtgtttcccggtcttgggttcctggctggccacagccaggggggaacaaagggggccccaatcctggaattgcgctctcccccccggggggaaaatcctcaaaacttggggcaaatgggccccgcaaaggaagggaaaagggggcccttcccctgggccaccttggccgaggggccaccccgttctggggaaaacaccccaccccgcggtgccctctggtccccggggtaagagacctctccaagggggggccctccccggggaaaaaaaggcaatggggcgcaaagattgcgccccggaaacacctttgtggcggggaactttctcttcggggc

SEQ ID NO: 263010 - DNA, 1147 bp, Homo Sapiens
ggcgaattcggcacgagggaaccgactccgctccgcactggccttggtcacaggttgagggggttctttccccgggcggtttggggtattggagtgaggtcaggggcgtgcccttggagtgcgcggccgctgtgacctctggccccttacccacattttactttctgccctgtgacctctgatccctgccctctcctccccgtgcccggtccggcgtgttctgtcctacctcaggtgcggggagcggcatcggccgagcggtcagtgtacgcctggccggagagggggccaccgtagctgcctgcgacctggaccgggcagcggcacaggagacggtgcggctgctgggcgggccagggagcaaggaggggccgccccgagggaaccatgctgccttccaggctgacgtgtctgaggccagggccgccaggtgcctgctggaacaagtgcaggcctgcttttctcgcccaccatctgtcgttgtgtcctgtgcgggcatcacccaggatgagtttctgctgcacatgtctgaggatgactgggacaaagtcatagctgtcaacctcaagggcaccttcctagtcactcaggctgcagcacaagccctggtgtccaatggttgtcgtggttccatcatcaacatcagtagcatcgtaggaaaggtggggaacgtggggcagacaaactatgcagcatccaaggctggagtgattgggctgacccagaccgcagcccgggagcttggacgacatgggagccgctggaactctgtcctcccaggggtcattgcaacacccatgacacaaaaagtgccacaaaaagtggtggacaagattactgaaatgatcccgatgggacacttgggggaccctgaggatgtggcagatgtggtcgcattcttggcatctgaagatagtggatacatcacagggacctcagtggaagtcactggaggtcttttcatgtaactgcctcaaggaccctggactctgctcacccccccaccactctgcctggcctcctgctgatgaggactctaagttcccaggatacaaaaggggtggcagtgtatggttcaggaatgctgaatatgggaagcaggggtgcttgtgaccctaataaattccaagtcctcttccctgccaaa

SEQ ID NO: 263011 - DNA, 1049 bp, Homo Sapiens
  misc_feature (12)..(12): n is a, c, g, or t
  misc_feature (29)..(29): n is a, c, g, or t
tccagccccaanccgccttccccggtgcncccctcaccaagccggctgccatccccagagtatggagtggcgaattcggcacgaggcccagggggaggagcagcaccgggaccccgcgtcggctgggcgccccacaaggtaggcgagtctggccaccttcgggcccggtccctgcggcgcgcccccgcatcccctccatgtgtgtgggtgtccaggtgcctttccagcggcttccccagtggagttcctggcatcaaggacatttcctgtaaaagggtccttgttgaagagggaagccagtcttaatatgatggaaacatctctgaacttctaaaagaccaaggttggcgttttagctctattaattttacttcgtcttggccagaattcacaatgacaacagtgacagtgaccacagaaattcccccaagggataagatggaagataattctgccttgtatgagtctacgtccgctcacattattgaagaaaccgagtatgtgaaaaagattcgaactactctgcaaaagatcaggacccagatgtttaaagatgaaataagacatgacagtacaaatcacaaactaaatgcaaagctgcaagcctccagagaagcaggagcagcagctctgagaaacgtggcccagagattatttgaaaactaccaaacgcaatctgaagaagtgagaaagaaccaggaggacagcaaaacaattacctccagcctaacaagcttgaacaaacacagcaatttgaaccaacctgttgaaaatctgaacccaagctgctgcaaaactctgaacaacaaaccacgccccacttacaaaaattcggacaaactctggcacagaacaaatgcgaaccgggataccgacaaaccccacacttgtcccccaaacactcgctctcccgccaacaagaacccctaactgtggaccctccaacatccacatccccctaacacatttgccgcctattagtacacccctcttacagacacgcctcccgcctttacaccccatgaatatttccctcattaccctctccc

SEQ ID NO: 263012 - DNA, 1250 bp, Homo Sapiens
  misc_feature (585)..(585): n is a, c, g, or t
  misc_feature (593)..(593): n is a, c, g, or t
  misc_feature (1018)..(1018): n is a, c, g, or t
ggagcgaggcctgggtggcgaattcggacgaggccggggccagccctgcaactcctgtagggagcagtgccctggcttcctgctccacggctggagaaagatctgccagcattgcaaatgcccgcgggaggagcatgcagtgcacgcggtgcctgtggacctggaacgcatcatgtgtcggctaatctcggacttccagcgccactccatctccgacgacgactcaggctgtgcatcggaggagtatgcctgggtgcccccaggccttaagccggagcaggtatatcaatttttcagctgcctcccagaggacaaggtcccctacgtcaacagtcctgggggagaaatacaggatcaagcagctgctgcaccagctgcccccacacgacagtgaggcacagtactgcacagcactggaagaggaggaaaagaaagagctccgagcctttagccagcagcggaagcgggagaatctggggcgtggcatcgtgcgcatcttcccggtgaccatcactggggccatctgtgaggagtgcggaaagcagattggaggtggggacatcgcagtgtttgccagccgtgcanggcctggngtgcctgctggcacccacagtggcttcgtgtgtaccacgtgccaggaactgctggttgacctcatctacttctaccatgttggcaaggtctactgcgggcgtcaccatgccgaatgcctgcgtccacgctgccaagcctgtgacgagatcatcttctcccctgagtgcacggaggctgaaggccgccactggcacatggatcacttctgctgctttgagtgtgaagcttcacctaggagggcaacgctatgtcatgcgtcagagccgcccccactgctggcgcctgctacgaggcccggccacgcggagtactgtgatggctgtggggagcacatcggcctggaccaaggccagatggcttacgagggccagcactggcatgcctcagaccgctgcttctgctgtatccgctgtggggcggcccnggcttgcccgcgtagcccggcggcccccgagaggatatcgccctgcttgccaaaccgagagacccatggcccccgaccgcggccccctccccgcgacggagcacggccagtaccacgcgccggtaaggaacctagaccacaaatccgccactcgcccgacgcgcgccaccggcgactactatactccccatccgcacacatacgccatgcaagactcagctccaagccgcca

SEQ ID NO: 263013 - DNA, 932 bp, Homo Sapiens
gagcgaggcctgggtggcgaattcggcacgaggccagcgcctcttgcaggaccggctggtcagtgtgagggccaccctctgtcacttgactcaggagcgagagagggtttgggacacgtacagtggcctggagcaggagctgggcaccttaagagagacgctggagtacctgctgcaccttggttctccccaggacagagtgtctgctcagcagcagctgtggatggtggaagacacgctggcaggtctgggtggcccccagaaaccgcccccacacactgagcctgactccccatctcccgtgctccagggcgaggagtcctcagagagggagagcctgccagagtccttggaactgagctcccctaggtcccccgagactgactgggggcggcctcctggaggcgacaaagacctcgccagccctcacttaggtcttgggtctccgagggtctcccgggcttccagccctgagggtcgccacctcccttccccacagctaggaaccaaggccccggtggcccggccccggatgagtgcccaggagcagctggagcggatgcgcagaaaccaggaatgtggacggcccttccctcgcccgacctccccccggcttctcaccctgggaaggacactgtccccagccagacgccagcctgacgtggagcaaaggtccaaggaacaccaccccttacttgccgacttccgaaggtcaccgggagcgggttctcagcctctcccaagccctggctactgaggcgtcgcagtggcacagaatgatgacaggtggaaaatttggactcccagggagaccctcttcccggtgtgccgctgcctccttcgggaccccacgcggccgggagaacccctccccccagaatctccccccggtggggctaattcgggggttccacggggtttctcctccgccc

SEQ ID NO: 263014 - DNA, 1113 bp, Homo Sapiens
aacacctagaaagactagatgtttcaaactggacttaagttttccattatatacacagtagcattgaataaatggtatacatacataacacagactgtaatttgagtgtcttctaaataggaacattctggcctagaacccttccctttcccacctctaccaaccccgtggacagctataagccatctgtaatgcttaggggggggtttaacaatttcacttgtttttaagaagtcttccctatgaattttaacaaaaagggtactcaatgtagtagtttactaattctacttttgtcatatactggcaacctttttaacatcgactagacgtaaattaggactcctatgtccgcttatatacactatatacacagcacagtaaatgaaaatgcagacataagggacaatggtcaatgtgcctcctcataaacacactggacactggtagaaagccctttgcactttgtgctcctccttccccctgaaccagccacaaatatcaaaatgggtactgctcagagaattgatcaatttccaagacaatatttcatatcaaaaggatagctacaaaatgtgttatttactacctctacttttaacatactttgtgcacttctaaacatctagaaagactagatgtttcaaataaggacttaagtttgtccgctatatacacagtagggttgaataaactacacacatgtaacaatggttatatctgatagtgtcttctaaatacgaacattctggtctagaacccttcattccttccaactcctctccaccaccaacctgatggatataggcacgtgtcacttagagctgatgttatctcacttccaaaagtccttttcagaagacagcctttctacaaattttaacaaagtgtacaaaatgtgttagtttactaactctacttctgtcatacattggcaacctctttaatatctagagactagatattataaaatcgggactaatttgtccgttatatatacaatatatacagtatagcaaagttaaatgaaatgcatgtaacatatacacaatggattaagctgaaattttctaataaacaatggcaaaaccctcgtgccgaattcgccacccg

SEQ ID NO: 263015 - DNA, 958 bp, Homo Sapiens
acccagccggggggccaaagaaacctatggggaagctttctggggaatggccgcttattccaatttttggcagggaagtttttgggcccaagttttggaagtgttatgtctgaaccagtgtgccggaacagtggttcccttgaaggccctggggcctagggagaaagaagaccactgaggtggtttcctacccaaacatgtgggtccgtgctcctccaaaatatcttttgagctgaacgtccaggccctttgcaggaggggccatgggggctgtgaatgggatgcagccccatggtgtccctgataaatccagtgtgcagtctgatgaagtctgggtgggtgtggtctacgggctggcagctaccatgatccaagagggcctgacttgggagggcttccagacagctgaaggctgctaccgtaccgtgtgggagcgcctgggtctggccttccagaccccagaggcatactgccagcagcgagtgttccgctcactggcctacatgcggccactgagcatatgggccatgcagctagccctgcaacagcagcagcacaaaaaggcctcctggccaaaagtcaaacagggcacaggactaaggacagggcctatgtttggaccaaaggaagccatggcaaacctgagcccagagtgagccgtctgaactgtgggagggaagtgctaacagcccagcctccagcctggcctttcctccttcccctctgaacctcctgcaaccctgagccatcaggacaatcataccccttcccttctctccacccaattgtgccagtaaatgggggttgagggtgacctaggcagcattagaatcacttatttatttctttcctcacctgttccctgactgcgtgaaatgttcagggaggtcagttgatttccccaggtacattcatggtgtgacagacacatgggtacaaataaaagacccagaaagcc

SEQ ID NO: 263016 - DNA, 486 bp, Homo Sapiens
  misc_feature (410)..(410): n is a, c, g, or t
  misc_feature (428)..(428): n is a, c, g, or t
gtgaatgggatgcagccccatggtgtccctgataaatccagtgtgcagtctgatgaagtctgggtgggtgtggtctacgggctggcagctaccatgatccaagaggtaatgcactccttttcccatctctccaccatctgtatcctggcccagaaaacttcctcaaccaccaaatttcttcaaggcataacccaatgccatcttgtccgtctataaagcctcccatttttccctgggtatgcattccagctcctgccttcaggtttctgtctgtggggtcatagttatctcctccacttgctggggagctccttgaaggcaaagactctaattgcctccatctattccagtgggaagtgggctctttcagaggggttgccaagttagtattgtatggacttgttcatctnttcccaacaggggcctgnaattggggaggggtttccagaacagttggaagggttgttaacctaaccgtgttgggga

SEQ ID NO: 263017 - DNA, 973 bp, Homo Sapiens
ttctaggtagcgaggcctgggtggcgaattcggcacgaggctggagccgacagacgaggaagaattctcctgcttgtggcaggaatgtggcttttgttctctggacagttctgctgacctcatccgccatgtctacttccactgctaccacaccaagctgaaacagtgggggctgcaggccttgcaaagccaggctgaccttggcccctgcatcctggacttccagagccggaacgtcatccctgatatccctgaccacttcctgtgtctgtgggagcactgtgagaattccttcgacaatcctgagtggttttatcggcatgtggaagcacacagtctgtgctgtgaatacgaagcagtcggcaaggacaacccggtggtgctgtgtggctggaaaggctgtacctgcaccttcaaggaccgcagtaaacttcgagagcacctccgcagccatacccaggagaaagtggtagcctgccccacctgtgggggcatgtttgccaacaataccaagttcttagatcacatccgtcgccagacctcattggatcagcagcacttccagtgttctcactgttccaagagatttgccacagagcggctattgcgggaccacatgcgcaaccatgtgaatcactataagtgccctctgtgtgacatgacctgcccgctgccttcctccctccgcaaccacatgcgctttcgtcacagtgaggaccggcccctttaaatgtgactgttgtgactacagctgcaagaatcttattgacctccagaagcacctggatacccacagcgaggagccagcctacagggtgtgattttgagaactgcaccttcagtgcccgaatcctctgctctatcaggtccacttacgcaaagtacatggaggaagactctgagccaaggtacaaatgtcatgtgttgtgacaaatgcttcacacgggggcaacaaacctcaccgggacccttc

SEQ ID NO: 263018 - DNA, 983 bp, Homo Sapiens
  misc_feature (705)..(705): n is a, c, g, or t
  misc_feature (730)..(730): n is a, c, g, or t
  misc_feature (914)..(914): n is a, c, g, or t
gcctgggtggcgaattcggcacgagggtcgggcggtagcgacaggtcagagctgcggcctgagcagccagcgtccggcatgaaggtctggggtctggctgctgcctgcttcttgctccagcaccatggaatgcctgcgcagtttaccctgcctcctgccccgcgcgatgagacttccccggcggacgctgtgtgccctggccttggacgtgacctctgtgggtcctcccgttgctgcctgcggccgccgagccaacctgattggaaggagccgagcggcgcagctttgcgggcccgaccggctccgcgtggcaggtgaagtgcaccggtttagaacctctgacgtctctcaagccactttagccagtgtagccccagtatttactgtgacaaaatttgacaaacagggaaacgttacttcttttgaaaggaagaaaactgaattataccaagagttaggtcttcaagccagagatttgagatttcagcatgtaatgagtatcacagtcagaaacaataggattatcatgagaatggagtatttgaaagctgtgataactccagagtgtcttctgatattagattatcgtaatttaaacttagagcaatggctgttccgggaactcccttcacagttgtcttggagagggtcaactcgttacataccctttaaccttttgagtttagagctatagaagcactcctngcaatattggatcaacacccttcanggggaaacttagcattttgcagccactgatccttgaagaccttggaatggcttgggtgaaccccaaacatttcttctgtagacagaaagcaaactgcaacattttactacagaaatggcaaaagtctatcagagttagaaacagatattaaaattttcaaagagtcaattttggagaatctggnatgaggaagaagtgctagagaagctctgtggtatcaaaatggagtgacccacagtcttttgaaagaagc

SEQ ID NO: 263019 - DNA, 1008 bp, Homo Sapiens
ggcctgggtggcgaattcggcacgaggccccaaccaattagactggggatgaaggctgcttagttggactaggaaaagtaatggatactggattccagagtgggcaatgttgggaggagcaaggtagaatgtgatttaaagggactaagaaattttgggctgagctaggctataggagaatggtagacagacctgaggattttgctgggctgtgtcagtctgggttatagaagtgggtggaaattacaactaagggacttggagatgaggggaggtaagaagacagatctgatggtattgaggtaggggctgctaagagaagcatcaaacaggagggctagcccaggtttgagctggacactccactgacagttctaaagcagaaaattagggaaggaatagtcaggggcttatcagctatgcagtagcttctagaagtcaacagctggctctgggagggaaaagattgagaaaaacaaaagaaataaataagagcagaaggtataggggaaaaggtaggggtgagagttatcagtctggttagagctgggctaaacatttagtcttaccatcagtttaaaagcaccctggaacagttagttgctgtacagggcaaagtcaaagggagaagcctggccctctctctactccgtccaggggtcttgacttttaggaggactgcgatgcaacccaggtataccagggaaaggaaaacgcgcacctgccggtctgaaagacaaaacttttatgccggccctttttaaccaacccaggctggcctcgcccttgcgcgccacaggaagggtgccccgactctcagaggaggaccacatccgtgtaggtgaacctttctacaactcgcctcccgagaccctgccgtgccaaactgagggtgacactccaaccgcgccgccctttgcctctgagttgaccgcggctccaagcatctaccgcactcagttgcggggtacacactacgccctagcacgcgccatactctctgtcccc

SEQ ID NO: 263020 - DNA, 807 bp, Homo Sapiens
  misc_feature (323)..(373): n is a, c, g, or t
tcagttgccctacctcactcaggggagagaagagccacactcaaagataagagacctgttcctagctcagtcttaaacaaatggcttttctgtgcctcagttgcctccaccatgaaatgctaatcataaatgtcgggtctagaaacacagaatcttagctctatgatcagcctgcctaagagttcctcctgagattacagaaacactctacaactgcccatgccgaccgtagggcagtcactagccacacgtgcctacagagcatttgtggctagcatgaccgagaagctgaatttttaatggtatttcaatctaattaattnnnnnnnnnnnnnnnnnnnnnnnnnnnnnnnnnnnnnnnnnnnnnnnnnnntctataaattccaagagggaaggtgccatttctctttgttcgctgctatattcccagagcccagcatggacgctggtctataaccggtgctcaataactatttgatgaacaaatcaaaagcaaaggacttttcaggtgctctaatagtacctcatctcccacacaggcattgattcttcatgttccctggagagtggacatttagccttggcttgacacagaattcagggcttcctaatgcagtctggtagggagttgctcttacaataaaaaatatcttccactgagctaaatcaatatccctaaaatttctagttactagtcctggcacataaactcagaagtgtgggaaaaccaaaagaagttatgaaaaaacacttaaatgtttttaaacacctgaatgcaggcctcgtgccgaattcgccacccaggcc

SEQ ID NO: 263021 - DNA, 862 bp, Homo Sapiens
tttacaaatccaatagagctttaatcccaaagatccagtggccaccagagtacagaagtcagaatcaaatgctcagaatcaaaaggtgtggcactcctgcccagccggcttatcagcagttgtatagacagatcagaaaaaactagcatttattataaaaactgtttttcaaatggggtgatttcctgtccttctccagagatcataattcttcacgtttctgaggaccttctcggcttggttcttttgtcttctctttgtacagtgctcccgtttctttctccttctgaaagcggatctgtagctgtttgatctcttggtcgtagtcctgccactccgggacaatccgcacagctgcttccagtttcggctctttggtcatcggattattacacaaatcaatggtttttgcccttttcttagaggcgtcatcacaccacgtttcacaccaaagccattcttgagggagggatttaattggcacctgatgaatcatgttattgggcagatcttgatcaagatttgaaaggctgttagggtcctgactcagaccttggtactgtcccctgagtctgtcaccagcagctattttcctaaaactcttcagatccaacacataaagtggcccggaaaggaaactttgccccgggtaaaaggaatgggccagtaacccggattccagaaaccgtagccgtcccatttctcttcgggtgtcccagaaaggagtggtaaccataaggaggcacaatcaaaattgaaatctttaaacctttcagatctgtttcgtacatcctggttacgcatcccaaacaaggaactgtcaaaacctaagtgggaaaagtacatccaggaagaggatttt

SEQ ID NO: 263022 - DNA, 935 bp, Homo Sapiens
gctgggtggaaattccgacgagggcgggacagggcgaagcggcctgcgcccacggagcgcgcgacactgcccggaagggaccgccacccttgccccctcagctgcccactcgtgatttccagcggcctccgcgcgcgcacgatgccctcggccaccagccacagcgggagcggcagcaagtcgtccggaccgccaccgccgtcgggttcctccgggagtgaggcggccgcgggagccggggccgccgcgccggcttctcagcaccccgcaaccggcaccggcgctgtccagaccgaggccatgaagcagattctcggggtgatcgacaagaaacttcggaacctggagaagaaaaagggtaagcttgatgattaccaggaacgaatgaacaaaggggaaaggcttaatcaagatcagctggatgccgtttctaagtaccaggaagtcacaaataatttggagtttgcaaaagaattacagaggagtttcatggcactaagtcaagatattcagaaaacaataaagaagacagcacgtcgggagcagcttatgagagaagaagctgaacagaaacgtttaaaaactgtacttgagctacagtatgttttggacaaattgggagatgatgaagtgcggactgaccctgaaacaagggttgaatggagtgccaatattgtccgaagaggaagttgcactccctggatggatttctatagcctacgacgcccctcaacgggcaattaagctttgggggcggatggcgcgggcgggccgtgccgttaattccccgtggggaggaacttgctgcgtaggggacacggtatcctcctgtgtctgtcggcccccagcaattacgtgccccccgggaccttttcctgaaccgtgacgttacaaagaacgcctacaattgtggtaccgaccgcacgtgaacgacc

SEQ ID NO: 263023 - DNA, 1137 bp, Homo Sapiens
ggcttccatcagaaccaagggagagccggccccgccgcccgggaaagcaggagagaagtcagtgaagaagccggccccgcctccagccccaccacaggccaccaaaaccactgctcctgtccccgagcccaccaagccaggagaccctcgggaagccaggaggaaggagcggccagccaggaccccccccaggaggcggacgctaagcggcagcggcagtggcagtggtagcagctatagtggttccagctcccgatccaggtccctgagcgtgagcagcgtctcctcagtgtccagtgctacgtcgagcagcagctctgcacacagcgtggactcggaggacatgtacgcagacctggctagccccgtgtcctcagccagctctcggtccccggccccagcccagaccaggaaggagaaaggaaaatctaagaaagaagacggtgttaaagaggaaaagcggaaaagggattcgtccacacaaccacccaaatctgcaaaacctccagcaggggggaagtcctcccagcagccctcgacaccccagcaggcaccccccgggcagccccagcagggcacatttgtggcccacaaggagatcaagttgacactgttgaataaggcggctgataaaggaagcaggaagcgctatgaaccatcagacaaggacaggcagagccctcctccagccaagcggcccaacacatccccagaccgaggttctcgggaccggaagtcaggtgggagactgggctccccgaagccagagcggcagagaggccagaactccaaagcccctgcagccccggctgacaggaagcgccagctgtcaccccagtccaagagctccagcaaggtcacgagcgtgcccggcaaagcctcggatcccggcgccgccagcaccaaatcagggaaggccagcacgctgtctcggcgggaggagctgctgaaacagctgaaaggccgtggaggatgctattgcacgcaagcgggccaagatccccgggaaagcataggccgtgcccccgaccggactggacgcatttttatacatagggtaagccgcaacccattttgggattttgcaggtaatgtcttattttggctgtggatttcttttttaaaagccccgcaaga

SEQ ID NO: 263024 - DNA, 889 bp, Homo Sapiens
  misc_feature (720)..(720): n is a, c, g, or t
ggggggatctcggactccctggaccctccctccagcccagcctcgctagctccgcctgcggtacgtgctcccgcctccgactcaaaatgcctgtctggggaggtggaaacaagtgtggggcctgtgggaggaccgtgtaccacgcagaagaggtgcagtgtgatggcaggagcttccaccgctgctgctttctctgcatggtttgcaggaaaaatttagatagcacaacagtggcaattcacgatgaagagatctactgcaaatcctgctacggaaagaagtatgggccaaaaggctacggttatggccagggcgctggcacgcttaacatggaccgtggcgagaggctgggcatcaaaccagagagtgttcagcctcacaggcctacaacaaatccaaacacttctaaatttgctcagaaatatggaggtgctgagaagtgttccagatgtggggattctgtatatgctgccgagaagataattggagctggaaagccctggcacaaaaactgtttccgatgtgcaaagtgtgggaagagtcttgaatcaacaactctgactgaaaaagaaggtgaaatctattgtaaaggatgctatgcaaagaactttgggcccaagggatttggctatggccaaggagcaggggctcttgttcatgcccagtaagatgtaaaccctgaactaaacatcacacactgagaatctcttcataatctangcacagataatctttaacactaaactactgtgaaattctaccagcattaagtactgtatatcgccctgtacttggataggctggctaactcgtaggaagagagcactgtatggtatccttttgctttattcccagcattttgggggaacatttcttttacatttaaata

SEQ ID NO: 263025 - DNA, 1175 bp, Homo Sapiens
  misc_feature (67)..(189): n is a, c, g, or t
  misc_feature (509)..(517): n is a, c, g, or t
  misc_feature (563)..(718): n is a, c, g, or t
  misc_feature (723)..(778): n is a, c, g, or t
  misc_feature (1102)..(1115): n is a, c, g, or t
cgcctggggtggcgaattcggcacgaggactcggcagtgcagccatgactatactccccaaaaagannnnnnnnnnnnnnnnnnnnnnnnnnnnnnnnnnnnnnnnnnnnnnnnnnnnnnnnnnnnnnnnnnnnnnnnnnnnnnnnnnnnnnnnnnnnnnnnnnnnnnnnnnnnnnnnnnnnnnnnnnnatcgcgaccgtgactccggcgtcgtgggggcccgtccgcgagcttcgccaccgcctcaaggcccgctaccaggaccgccgggcgctcttcatcgctgggcgctggccgtgccgcctggtgcagtggcgggtccccggccacaacaggcttctccacctccttgcgggggcccaggtggtcccggcggcggtcccggcgacgcgctgggcgcagcggcggcgggtgtgggtgcctcccccgcgtcgctgtgtttctgtcctccactaactacctgtccttttccctctcgtgccccccctatgattgtcgctgcccggcannnnnnnnnacaactcttacttcgccttgttttgctttttttcccttgcacgtannnnnnnnnnnnnnnnnnnnnnnnnnnnnnnnnnnnnnnnnnnnnnnnnnnnnnnnnnnnnnnnnnnnnnnnnnnnnnnnnnnnnnnnnnnnnnnnnnnnnnnnnnnnnnnnnnnnnnnnnnnnnnnnnnnnnnnnnnnnnnnnnnnnnnnnnnnnacatnnnnnnnnnnnnnnnnnnnnnnnnnnnnnnnnnnnnnnnnnnnnnnnnnnnnnnnnaacccacactagccgccccttcccccttgctgccgccatccccgctaattgctgtcccccacgccctaccgagtccccgcatatttctgtcttgaccctcgcccccgtccttctttcgctcgcttctttgtctgccaacatcctggtttgctacacccgcgacggctactatcaccttttcctacgatcttactccccctctcccacgccactattttctcacatacaactttattctttctttccccttctctgcgccttatcctttactccacccctcacacttcgtcaacatactgattgtcacctcactcgtttcttctnnnnnnnnnnnnnntttacatccccacgcctctctccctttcctcgtcgcccctaccgcgtgtctcttatttcg

SEQ ID NO: 263026 - DNA, 965 bp, Homo Sapiens
  misc_feature (710)..(761): n is a, c, g, or t
  misc_feature (790)..(790): n is a, c, g, or t
  misc_feature (877)..(877): n is a, c, g, or t
tgggtggcgaattcggcacgagggtcctaccaaagccagcgtttcggctcgcgtgcgccggcctagtttgctcgcgtcctcacgcgctttgggtttcccggtctcatggccggcctgaccttatttgtgggccgcctcccgccctcggcccgcagtgagcagctggaggaactgttcagtcaggtggggccggtgaagcagtgcttcgtggtgactgaaaaagggagtaaggcatgtcgaggctttggctatgtcactttttcaatgctggaagatgttcagagggccctcaaggagattaccacctttgaaggttgcaagatcaacgtgactgttgccaagaaaaaactgaggaacaagacaaaggaaaaggggaaaaatgaaaactcagagtgcccaaagaaggagccgaaggctaaaaaagccaaagtggcagataagaaagccagattaattattcggaacctgagctttaagtgttcagaagatgacttgaagacagtatttgctcaatttggagctgtcctggaagtaaatatccctaggaaaccaggccggacagtggctgtggattgggccgtggcaaaggataaatataaagatacacagtctgtttctgctataggggaggaaaagagccatgaatctaaacatcaggaatcagttaaaaagaaaggcagagaggaagaggatatggaagaggaagaaannnnnnnnnnnnnnnnnnnnnnnnnnnnnnnnnnnnnnnnnnnnnnnnnnnnacatggaagagaagagaatatagaatccnaggtgaccaagccctgtgcaaattcagaagagagcagtcaagagacccagcccctgcaaaaagcagtgatccttctgaggaggacantggacctaaaggaaagcgataatattgatgaatggaaaggaactgggctcccaatgaatccagccacttgaggagcaggagggataag

SEQ ID NO: 263027 - DNA, 983 bp, Homo Sapiens
  misc_feature (135)..(249): n is a, c, g, or t
  misc_feature (301)..(357): n is a, c, g, or t
  misc_feature (390)..(431): n is a, c, g, or t
acagaagtgatagcgggtccgagggcaaaaaaaaggagaaaaggtgggttaagggggggagagaggtgatacggtgaaagtaaaaagacaaggtgggggaaggaagtgtgggcgggaaaaaaaatagaggcagtnnnnnnnnnnnnnnnnnnnnnnnnnnnnnnnnnnnnnnnnnnnnnnnnnnnnnnnnnnnnnnnnnnnnnnnnnnnnnnnnnnnnnnnnnnnnnnnnnnnnnnnnnnnnnnnnnnncgcaaccagccaggggggccaaccaaataattggggcccgcagggcaaggcnnnnnnnnnnnnnnnnnnnnnnnnnnnnnnnnnnnnnnnnnnnnnnnnnnnnnnnnngggaggcagaagcaagggcccggtgttcccctnnnnnnnnnnnnnnnnnnnnnnnnnnnnnnnnnnnnnnnnnntaccaggtccaatcgggctgcaggggacaatccgcctccctgggccccagctcaaacaggtaccaacaaggcctccaggcaacacatccaccctcaaagactccacccaagtctggaatccaacaagggatccttccccttgggaatccagggaatcagtagttcctgctcccacagggaccaccccctccaaatccagagctcactgtaggcccccaactcctgcccagactgggctgcagtaccacatagcccccggagtccctgccccattcagatatatcccagccttccaccagcccctcagggtgccagggatatgacctccagctgttcacagaccagcaccaacagcccctgttccatttaaaagtgacagcctttgacaaccccttccagagaccccagagcaccatcgctctcttgggaatctaggtgttcaacccattatcctcacccttctagagaatccagatcacaaggtctcctgcaaggcccagggtccttggaacccaggtgcccctcgtccgaatcgccacccaggcctcgctc

SEQ ID NO: 263028 - DNA, 1244 bp, Homo Sapiens
  misc_feature (20)..(20): n is a, c, g, or t
  misc_feature (49)..(49): n is a, c, g, or t
  misc_feature (51)..(51): n is a, c, g, or t
  misc_feature (77)..(77): n is a, c, g, or t
  misc_feature (82)..(82): n is a, c, g, or t
  misc_feature (92)..(92): n is a, c, g, or t
  misc_feature (94)..(94): n is a, c, g, or t
  misc_feature (101)..(101): n is a, c, g, or t
  misc_feature (664)..(664): n is a, c, g, or t
  misc_feature (670)..(682): n is a, c, g, or t
tgcgacagggacgacatatntggcgcgcgtgcacatatatagatgttgngncgcacgcgcagttgttctcgcggcgncatantatatcgtcngngcgcgcnacacgcgcttatgagcgcagcgcgacacagtgggcgcgggttaatatatgatcacccgagtgtggtgcgcacgacaccgcgcacatgttagttacagaatattacacggcacatatatatgcgaggaagtatatatgttatggcacgcggtgatggcaaggtgggggtggcggcagagtaataataatatatcaggcgtatcatattgggaggttataggatacgatgatagccgcgcggcaaaatgcgcgggcgcgggattggcgggcgtatatataggcggatgcgcagagcccggtttacaacgcacctgtattggagcaaccggcgggataatgggcaaggcggtgtcgcataaccgtgagggtactgccagcgttaagacaacggggtgggcggccggggcagtaggccgatttagtttaggcgataagggcgtttcgagggcaatgaggatgtccgggccgcggtgtttttgaaagggggcggggggaatgacagcggtaacgaatggaagaagcgtttgaagtattgggggagggcagggggagaaaagggacggnttgacnnnnnnnnnnnnnataaacagccatgcacggggttgcgacgaaagggacgcagacggaggcagggggggtttatggcaattgaggaaaccggcaacgcgacgggaacacagcatgcaggtagcggcacttcttgcgaagcaagctggggagggggttcggatgcgacatgtgcatccatcagatgcttcaggccacggtgcaggccctggggagtgtacagcgcgagaatccggagcgcatgaggtccatgagcggcagcggcgaacggcggcctatgaatcaaggccgtagccctggaggaacatcgggtgatggtccatggcggcaggcaaggagacatccggggacagcgcgcgctaatcagcaccggctcccccggcccgggccagcggctgctctgcggcgggagacccgggcaccgtgcggtccctgcagctcggccgggcggagcaaaaccaaacccgactggtgccccggcccagcccaatactgcgcaccttgcggccgcagcctggggtcacaaaggcccgcaacctgtagtgctccgcctcgtgccgaattcgccacccaggcc

SEQ ID NO: 263029 - DNA, 1057 bp, Homo Sapiens
  misc_feature (928)..(928): n is a, c, g, or t
gatgctgcccccgtcccccccatcgttccttcaacccactaaagaccgaggcctgggtggcgaattcggcacgagggccactagacagagccgggcctagcccagagacatggagagttgctacaacccaggtctggatggtattattgaatatgatgatttcaaattgaactcctccattgtggaacccaaggagccagccccagaaacagctgatggcccctacctggtgatcgtggaacagcctaagcagagaggcttccgatttcgatatggctgtgaaggcccctcccatggaggactgcccggtgcctccagtgagaagggccgaaagacctatcccactgtcaagatctgtaactacgagggaccagccaagatcgaggtggacctggtaacacacagtgacccacctcgtgctcatgcccacagtctggtgggcaagcaatgctcggagctggggatctgcgccgtttctgtggggcccaaggacatgactgcccaatttaacaacctgggtgtcctgcatgtgactaagaagaacatgatggggactatgatacaaaaacttcagaggcagcggctccgctctaggccccagggcccttacggaggccgagcagcgggagctggagcaagaggccaaagaactgaagaaggtgatggatctgagtatagtgcggctgcgcttctctgccttccttaaagccagtgatggctccttctccctgcccctgaagccagtcatctcccagcccatccatgacagcaaaatctccgggggcatcaaacctgaaaatttctccaaagggacaagacagccaggctctgtgcggggtgggagatggaattttatctgcctttggggacaagggggcaaaaagaatgccctttggaggttcgcgttcccacgcagggatgcacccanaatggcctgggcaaggtcctttgcggggactttctccccccatcagatgtggcccccaaacccctaatgcccactggttgttcccgggacacctccccctttttcacaggaatcaaaaattgtgacccg

SEQ ID NO: 263030 - DNA, 867 bp, Homo Sapiens
  misc_feature (747)..(747): n is a, c, g, or t
  misc_feature (754)..(754): n is a, c, g, or t
aaggtagcgaggcctgggtggcgaattcggcacgaggccccacgcggagggcgggctcaggaatcccacacgcggactgcagagagtgggagggcgggctcaggaatcccacagctagtgtttcagcgtctccgtgtcccgtgtgcccccagcacgttccaagagccaggctgctgcatgcgatgtggacaacagggtgtcctcggcagtggactgtgcttctgtgagactggacacggggccgcccgcggtgccgcctcgggtatgactggctgccgtctgagggaggggacgtggccgttgccacatgggtggcttgtccctgccatcctctgtggggcccttggctgcccctgggggaggcagagaccatcttgtggtcatgtcatgacagcccttccctgtacgagctagcggccgagggcgcgtgtcctggtgactaggctgcacactgtgagtgagttgctgtgcttttcagtgaagttgtgaaaatacttaaaacgggaactcaggcagactgtggctacttttctaagtaacgtgcacctcgtgcaaaccggaatgcggttcggcgttgccaagctggttctgaactgcagcagtctggacacatgttgagtttcagcccagctccagaccgcggtcagagcgctgtcaccgagagcgggttccccggaggccattggctgagctgcccccggggggggccaggcttttctcctgagtgttagcttttgatgcccatanaaagagnttttttattttcatggttttttaattaaaatggaatcattggtctttttatcaagttacatacttggtattcactttaaaacaattttttaaaataagacctttcctggccag

SEQ ID NO: 263031 - DNA, 1097 bp, Homo Sapiens
  misc_feature (1022)..(1022): n is a, c, g, or t
  misc_feature (1036)..(1036): n is a, c, g, or t
  misc_feature (1047)..(1047): n is a, c, g, or t
  misc_feature (1075)..(1075): n is a, c, g, or t
ggcctgggtggcgaattcggcacgagggacggccgcaaggccaacgtgaacctggcatatctgggcgccaagccgcggagcctccagacgggctgaccccgcactacatctacccaccagccatcgtgcagcccagcgtggtgatcccagccgcccctgtcccgtcgctgtcctcgccctacattgagtacacgccggccagcccggcctacgcccagtacccaccggccacctatgaccagtacccatacgccgcctcgcctgccacggctgccagcttcgtgggctacagctaccctgccgccgtgccccaggccctctcagccgcagcacccgcgggcaccactttcgtgcagtaccaggcgccgcagctgcagcctgacaggatgcagtgaggggcgttcctgccccgaggactgtggcattgtcaccttcacagcagacagagctgccaggccatgatgggctggcgacagcccggctgagcttcagtgaggtgccaccagcacccgtgcctccgaagaccgctcgggcattccgcctgcgccctgggacagcggagagacggcttctctttaatctaggtcccattgtgtcttgagggaggactttaagaatgactgagaactatttaaagacgcaatcccaggttccttgcacaccatggcagcctctccttgcaccttctcctgcctctccacactccaggttccctcaggcttgtgtccccactgctgcatcgtggcggggtgtcacagaccctctgcagcccctggctgccctgggactgtgcagagatgcctgactccagggaaacctgaaagcaagaagttaatggactgtttattgtaacttgatcctcccgagctgtgagcgcagtctgaggtgtgaggacacggcctcctgttggagtcccattttctccatcagggcacgtgggcggcttcctcaagcccggaggagcttcccaggcgcacaggggccgccggttaacagggggccgccgcaaaaggccccttttnccagttcatagcantggaagttggnaattttttcttgtaattgttttggttantaagataattttcagaatttca

SEQ ID NO: 263032 - DNA, 991 bp, Homo Sapiens
  misc_feature (927)..(937): n is a, c, g, or t
  misc_feature (947)..(947): n is a, c, g, or t
  misc_feature (972)..(972): n is a, c, g, or t
aaagagcgaggcctgggtggcgaattcggcacgagggatggctgaaggggatactcaccggctgaaggccgactgtgattccccctacccccacaaggcgattttgaccccctgagggctgctctagaggactcaggccccgaagctgtcccagggaggtccccgctgcatcccaccacccaagctgtgcctcatggagtcgatgtttagcagccctgccgaggcggcgctgcagcgagagaccggggtgccaggactgcttactcctcttccggacctggacggagtgtacgagctggagcgagtcgctggatttgtccgcgacctggggtgtgaacgagttgccttgcagttccctgaccagctattgggagatgctgtggctgtggctgcacgactggaggagacgacagggtcaaagatgttcattctgggtgacacagcctacggcagctgctgcgtggatgtgctgggtgctgagcaagctggagctcaggctctcatacattttggccctgcctgcttaagccctccagcccgcccactgcccgttgccttcgtgcttcgtcaacgttctgtggccttggagctctgtgtcaaggcctttgaggcccagaacccagaccccaaagcgcctgtggtgctgctgagtgagccggcctgtgcccatgccctggaggctttggctactctcctgcgcccacggtacctggacctgctagtctccagcccagcttttccccaaacagtgggttcccctgagtccagaacctatgcccctaaagcgtttttgggcgccgccttcccccttgccccaagggaggcgtctaaaaaaagtatggtggccttctaatgaaagggggcttctaaggggcagcccctgaccccaaaccctgacccaggaccttgaagtcggctggcctcctnnnnnnnnnnnaccaaggggnaacccccttctccccccctggtggnccagaatacaaggggaaac

SEQ ID NO: 263033 - DNA, 940 bp, Homo Sapiens
gtagcgaggcctgggtggcgaaagaccagcacagcctagatttggatcgctccttcgatatcctaaaaaatccaagccgccctcgacattgcttgctgcaggccggctttcagacatgctgaatggaggtgatgaagtctacgctaactgtatggtgattgatcaggttggtgatttggatatcagctatattaatatagagggaatcactgccactaccagccctgaatccagaggttgcactctgtggcctcagagcagcaaacacacccttcctacagaaaccagtcccagtgtgtacccacttagtgaaaatgtcgaagggacagcacacactgaagcccagcagtccttcatgtcaccatcaagttcgtgtgcttccaacttgaatctttcttttggttggcatggatttgaaaaggaacaaagtcatctaaagaaaagaagttctagccttgatgccttggacgccgacagtgaaggggaagggcattctgagccatcccacatctgttacactccagggtctcagagctcctcaagaactgggattcctagtggggatgaattggactcttttgagactaacactgaaccggattttaatatctccagggctgaatcccttcctctatcaagtaatctacagtcgaaggaatcactgctttctggagttcgctcacgttcttattcttgctcgtcacccaaaatttctttaggaaaaactcgtttggtgcgtgaattaacagtatgcagttcaagtgaagagcaaagagcttacagcttatcggagccaccaagagaaaacagaattcagggaaaaagaaggggataaatacatcatacccgcccaaatcagagtctgaaaaaatataaagtggaggtccaacttttcaattttcctcatgaaataaggatggaccagccccctcgcgaatat

SEQ ID NO: 263034 - DNA, 998 bp, Homo Sapiens
ttactaagaatagccgcgtaggggtttctgtaaggaagtgttatcccgggaccccccataaagaaaggggaaaaaggtatttccggttttgatgtagaggggggttttggcaaaaatttgggttgccattttccgaaaacgccaggccaaaaatttccagttttcctttagtaaccggtaaacgcagtcccccttccttcgtgggtttcttctcagaacgttgccatctccagcaaagagcgcttgaacagctgggcatttctagaaaggtctgtcacttggtgcaccatttcctgcagggccgtggtgctggggtaatggagggcggccatcttggttgccatgactatagtcttgagctgctcgcagagctggttgctggagttcatgactttgttgcgaatgtcctgggcagtcacctgccgtgtcagcgtgtctccaatgaacaccagtttgtgtgcactgaggatgacaaacttgctgtgtgccacgaagattcgcgggggctgggctgagctgacacaactgaagagtgcgtcaatggcgttgagaagggaaatgaaatgggtctcacattggtcatagtagaagcacagcaactgccgatcctgagcactcacgccactgtttgtggtgggtaggctctgagagggcttccacttcgagatgtcattctccacgggctttgtaatctcttgttccaacagctggaactggctcagctgatgatgttccagctgcatcttgttctgtttcatgatattctctttttccaatagctctttctgttgcctctcaaactcctccttaccctgtaggtggacgtaatcgtagtcatccatccagctcctctcagaaccatcactgctgctacagtcaggggcctgctccttgctcaggcctgggggcagtgccttgtcctcgtgccgaattcgccacccaggccgcgcggcgaaggagttgtcgacataatttaatacccaccccaacaccccaac

SEQ ID NO: 263035 - DNA, 479 bp, Homo Sapiens
  misc_feature (47)..(47): n is a, c, g, or t
  misc_feature (73)..(73): n is a, c, g, or t
  misc_feature (82)..(82): n is a, c, g, or t
  misc_feature (90)..(90): n is a, c, g, or t
  misc_feature (129)..(129): n is a, c, g, or t
  misc_feature (138)..(138): n is a, c, g, or t
  misc_feature (174)..(174): n is a, c, g, or t
aatgacgttgagaaggaaaatgaaaatgggtctcacattggtcaatngtaagaaagcaacagacaaactaccnatcctgagnactcacgnccaactgtttgtggtgggtaggctctgagagggcttccnacttcgaanatgtcattctcaacgggctttgtaatctcttgttcnaacagctggaactggctcagctgcaaggaagacgaaagcaagatctcattagagcaagggagtgtgttgcaatggaaattcaccaggccttggagttaaaagacagggattttagtcgctagtaactgtcagatgcatgtgagctgtaaaccctgggtcaagctgccttgctttcctaaattgtaaaatgtagacgttgggaaagatgatcctcaagctcagaccttctatgattggactactggtctcttgtaccctctggctagaagctagcatagtgtttaaaccgcagccctgttacctac

SEQ ID NO: 263036 - DNA, 806 bp, Homo Sapiens
ctttcaggctcggggagtgaaggcctcgttgagagaaggtctcattcggtgttttgggaagagagtcgtgtgggcccaggtatcgtagcggcgacacgagagagacgggcggtgtgacagccttccactacctgcacgagtgtattggtctgtctgctatcagctatgccgctgcccgttgcgctgcagacccgcttggccaagagaggcatcctcaaacatctggagcctgaaccagaggaagagatcattgccgaggactatgacgatgatcctgtggactacgaggccaccaggttggagggcctaccaccaagctggtacaaggtgttcgacccttcctgcgggctcccttactactggaatggcagacacagaccttgtatcctggctctccccacatgaccccaactccgtggttaccaaatcggccaagaagctcagaagcagtaatgcagaatgctgaagaaaagttggaccggagccatgacaagtcggacaggggccatgacaagtcggaccgcagccatgagaaactagacaggggccacgacaagtcagaccggggccacgacaagtctgacagggatcgagagcgtggctatgacaaggtagacagagagagagagcgagacagggaacgggatcgggaccgcgggtatgacaaggcagaccgggaagagggcaaagaacggcgccacatcgccgggaggagctgggctccctatcccaagagcaagaaggcagtaagccgaaaggatgaagagttagaccccatggaccctagctcatactcagaagccccc

SEQ ID NO: 263037 - DNA, 856 bp, Homo Sapiens
  misc_feature (169)..(194): n is a, c, g, or t
  misc_feature (672)..(672): n is a, c, g, or t
  misc_feature (715)..(715): n is a, c, g, or t
aaagtagcgaggcctgggtggcgaattcggcacgaggccctccccgagacccaccggaccccgaacccaggccgaaacgggctccccgtcttaacgatttggcgtctccctcgaccaccacctctttgtgcagcagcccccgggcagaccctgttccgagggcaacgcnnnnnnnnnnnnnnnnnnnnnnnnnnggaatcatgcatcggactacacggatcaaaatcacagagctgaacccccacctcatgtgtgccctctgcggggggtacttcatcgacgccaccactatcgtggagtgcctgcattccttctgcaaaacctgcatcgtgcgctacctggagaccaacaaatactgccccatgtgtgacgtgcaggtccataaaacccggccgctgctgagcatcaggtctgacaaaacacttcaagacattgtctacaaattggtccctgggctttttaaagatgagatgaaacggcggcgggatttctatgcagcgtaccccctgacggaggtccccaacggctccaatgaggaccgcggcgaggtcttggagcaggagaagggggctctgagtgatgatgagattgtcagcctctccatcgaattctacgaaggtgccaggggacccgggacgagaagaagggccccctggagaaatggggatgggngacaaagagaaaaacaggggtgcgcttccctggcgatgcccangcaagccatggaccgtcatggcatctttgccaagttttctcccgcaacaaagatgggatggtgcccagcaagtacccaaaggggggaagggtttctggaaccaagggaccaaagcccacctggaaagggaattcctttaca

SEQ ID NO: 263038 - DNA, 932 bp, Homo Sapiens
  misc_feature (624)..(687): n is a, c, g, or t
  misc_feature (704)..(718): n is a, c, g, or t
  misc_feature (749)..(865): n is a, c, g, or t
ggcctgggtggcgaattcggcacgaggtgcagtggcagttaggcctggaaatctgggacaggaaatcataaataccagttactgtgttggacaggtcaaatgattgctgacaaggtaaaaacctcccctccctgtgccacatcccgattcttgctcctggggtacagccaccaggaccaagtcaaacctgcactctgagaatgggaagggatgctgaactctcactttctaagaaccctgagccccactctaggtctgggaatggaaaacccatcgaatggagttctgagcagggatacgggctctaactctggactttccatcgtatctctatgtgactgcacgcaagttactctatccaggcttattagctggatgtaataagcccaaggaaggcccaaggcctgatgctggatactatgtgtgatactatgtgtctggccgagtctggggacacaatgtagcttattactacgttttacatcttagtaataagaaaaaaaacgaaatttctatgtgtcctcctttgttctaatctatgtagccaagaaaggattaggatgatcctttctttgatctggcttgtggcagagataagagaacaggggcgagaatcaaaaactnnnnnnnnnnnnnnnnnnnnnnnnnnnnnnnnnnnnnnnnnnnnnnnnnnnnnnnnnnnnnnnngaggctaaacttcatcnnnnnnnnnnnnnnnaagagacagagtctcgctctagagccctgcnnnnnnnnnnnnnnnnnnnnnnnnnnnnnnnnnnnnnnnnnnnnnnnnnnnnnnnnnnnnnnnnnnnnnnnnnnnnnnnnnnnnnnnnnnnnnnnnnnnnnnnnnnnnnnnnnnnnnggctaatctttggatttttttaattgagaatggagtttttgccattggtaaccaaggcttgggtctc

SEQ ID NO: 263039 - DNA, 601 bp, Homo Sapiens
ggcctgggtggcgaattcggcacgagggtacgaatgtatatagcgaccagagcattcttaattcccgccgcagacctggcgcccccgccttggctcctgggggcagccagccctggctgggagagcgggagctggcagaggagccactgccaaactcaaggctcctctggcccagcttggatggctgagggtggtcacacccctgagccttcagcactgtgctggccaccccggcctctgagtaagactcgtgcctccccctgctgccctgggctcaggctgctaccctctggggccaaaagctgtcccttctcagtgcttgtcagcgctgggtctggggcctctgtatgccctaggcctgtgccaaagtggccagagattgggctgcctgtgatacccatcagcccactgccccggccggcccagataggtctgcctctgccttccagctcccacagcctggtccctgatactgggctctgtcctgcagacacctctttcagaaacgcccaagcccagcccctaggagggggtggggcatccctggtcaaccctcaaacattccggactcccctcataacaatagacacatgtgcccagc

SEQ ID NO: 263040 - DNA, 1025 bp, Homo Sapiens
gtagcgaggcctgggtggcgaattcggcacgaggggtccttgctgccctgcttgggcccgaccctggacagaagatgcgtggaccaggccagcagcaggaagtgagagcccactgctccaggacaccctgtcctggctagagacccagccccagaggcctgagccgccgctgtttcctaaagatgcccccaggggaactgggctccaggcatggatgattgtgaggacatggggggctttggggacagataatgtctccaggggcagggtctggaggggccaacaccctcatcagagccctcctctggcctgtcccctcccctacccccactcccggctggagacggggtctgggtgggctgggtgctgggaatgagaataatcctaatacccatcatttattgagtccctgctgtaactggccctgtccagggaactttcgttacgctgactcattatttaaccctgtaagaggcaaacttattatccccacttcgcgatgcgaccgaggatctgacggaacacatatgcctctcttgatcaccagatcacggacggcaccgctcaggatgtctggttgacagacgtcaggaactcgcaccaatgcaaatacggcaatgattctcttaccgactaaagcagattttcaggcacggagaggagctgcctatgaagaagcccaacaggttgctggagaaaatggggttattgttcctccaagcgagtgccaaaaacggcagaagaatggagaaagaggccttcccttgagggttgccacccaacatcccactccgaacctttcggggatgggacccttgccattcggaacggctccctgcacccccgggcccacacccccgtccctttggcctccccgtcccggtcccggttgcgcatcacccggtggcataccccctcctcgcgagggaccgagcccttcgggccgcgccgcattcggcgtatatctcgcctgggccccctcccgttccggaaacctgtgcgacctgggaagggcgcgggggcgg

SEQ ID NO: 263041 - DNA, 1013 bp, Homo Sapiens
tttttttgcttcacagtggtttaatatgaacagagttgaatatgacattgtctgacagaagaatgaacagtttgctgaataaaagccccgagtcaggatatatatacacagcagaaatggggcctcagactctcagcacttgtgcacaatgaaagaggaaatcgtttttaaaaaatgtctataacagaggatacaaatcaaaaaggcagcaacaacaacattggcgaggtgggaaagggagcagagcctctcattaggggctgcttagccctgggcgcaggctcagcagctggagagctgtctcagggaacttcaacatttagatggggttccaaatcctatgtcaaaatacaatcctaatctctctgatcagggtcagtcagaatcagcaatccttttccccagtgccctgcatagaaaactccaatctttccatgatagggagtctaagcaaagagcccccacctctcacctggcaccaaagttaacttactctcaccccaccacttgggacagacgttgggccccagcaaacaaaccaccccctccaagacagaaaccaggatagttgccagcctcaagaagctgcttcaaatgttaagatttaggaaatccataccaagctgctatccatagttcaacttctggggaaaatgctggagttgcatgagaaacaagtgcaggcagttcaataaccctgtgaccacgctggggagggcagcaaaaactcttgcccctgagccccattcaacaactcaaagtgcttaggagaagtcagagactgtgtggttggtttgtgtgcgtctgccctgtggcagcactaaatgggatgggggaaaggagaatggaaggaagacagtgttgatgcccttccctaccgcgggtaagagcctagaagataatccactcccacccttcagggagttacctggcagtggtgagttgcccccacccctcaagccaccaaacctgcaaagcctcgtgccgaattcgccacccaggcctcgctcctt

SEQ ID NO: 263042 - DNA, 1059 bp, Homo Sapiens; identical to SEQ ID NO: 171006
  misc_feature (47)..(50): n is a, c, g, or t
  misc_feature (56)..(58): n is a, c, g, or t
  misc_feature (62)..(62): n is a, c, g, or t
  misc_feature (64)..(65): n is a, c, g, or t
  misc_feature (67)..(74): n is a, c, g, or t
  misc_feature (238)..(238): n is a, c, g, or t
  misc_feature (240)..(249): n is a, c, g, or t

SEQ ID NO: 263043 - DNA, 1027 bp, Homo Sapiens
  misc_feature (24)..(24): n is a, c, g, or t
  misc_feature (33)..(33): n is a, c, g, or t
  misc_feature (579)..(727): n is a, c, g, or t
  misc_feature (881)..(890): n is a, c, g, or t
tccctcggcgggcctgaccccgcnccctacccncccaccgaacgaggcctgagtggcgaatccggcacgaggccgacttcgcagccttacactcttcgtgggcggcgaccgcggccccactgacatcattcctcatgagggaggaggcacaaacagttctgggccgaccagaaaaaggacgactgggacttgactctgaatcgcaggatttgaagagatttctcctggcttcccaacgaggctggtgggaagcggtcctcctcccatacacgacctcccaccctcgcgaggcgtagaaaccagttctgactgtacagtaaagcgagggccagggctgaggtctggaagctaatgaaagcacagaaagtgtcgaaactggatgagcaggaagcgagtggcctcccctgtcatctgacgttttcccaggatgtaatttgcctgactgaaacagatcaggaccaacagggagagttttcgatttagtgtgaggaaaagagcactaaattgtagcaaaagaccttattgctcaaggcccagtcagaagatttcataaggaagctgtacaaagtcttaacaggnnnnnnnnnnnnnnnnnnnnnnnnnnnnnnnnnnnnnnnnnnnnnnnnnnnnnnnnnnnnnnnnnnnnnnnnnnnnnnnnnnnnnnnnnnnnnnnnnnnnnnnnnnnnnnnnnnnnnnnnnnnnnnnnnnnnnnnnnnnnnnnnnnnnngcgcccgatgccgacccggggcggccgcgcggcctctttgcccgggggcagggacaccgggcctctcaccgcggcacatggtgggtgcgcggactcgcgggcgcccccctggcttggaataagcaggagacacagtcgcgcggtacgcaatgtnnnnnnnnnncgccgccgcggcgcggcggcgggggccggagcagaagggcgcgggcagtagagcggcggccaccagggcgatcgtgccctgcccccggcttggccggcgcccccactccgcgcgccgccgtggggttgtcctacaac

SEQ ID NO: 263044 - DNA, 1138 bp, Homo Sapiens
ggcgaattcggcacgaggcagagaagaagatggtagagatcaacttcctgtgtgtccacaagaagctgcgttccaagagggttgctccagttctgatccgagagatcaccaggcgggttcacctggagggcatcttccaagcagtttacactgccggggtggtactaccaaagcccgttggcacctgcaggtattggcatcggtccctaaacccacggaagctgattgaagtgaagttctcccacctgagcagaaatatgaccatgcagcgcaccatgaagctctaccgactgccagagactcccaagacagctgggctgcgaccaatggaaacaaaggacattccagtagtgcaccagctcctcaccaggtacttgaagcaatttcaccttacgcccgtcatgagccaggaggaggtggagcactggttctacccccaggagaatatcatcgacactttcgtggtggagaacgcaaacggagaggtgacagatttcctgagcttttatacgctgccctccaccatcatgaaccatccaacccacaagagtctcaaagctgcttattctttctacaacgttcacacccagacccctcttctagacctcatgagcgacgcccttgtcctcgccaaaatgaaagggtttgatgtgttcaatgcactggatctcatggagaacaaaaccttcctggagaagctcaagtttggcataggggacggcaacctgcagtattacctttacaattggaaatgccccagcatgggggcagaagaaggttggactggtgctacaataaccagtcaccagtgcgattctagataaagccactgaaaattcgaaccaggaaatggaaccccaccactgttggtccaattttcacacacgtgagaatccctggcaaagggagcagaactgaaccggctttaccaaaccgccagcgaacttgacaattgtattgcgatggcgtgggctgcgtgacgtcacctccggtcgtgtctctggtctccgtgttttccagttaattacatcctcatgcagccgtgatcaagggaatgtaactgctgaaaactagctcgtgattggcatataatggagttaacgggtgaataataaaagtatatatatatattatatat

SEQ ID NO: 263045 - DNA, 999 bp, Homo Sapiens
  misc_feature (982)..(982): n is a, c, g, or t
ggcgaattcggcacgagggcgcgtcgggaaggcggcgggctatccggtcctcggctgcggcgggcaccatggtcggtggcgaggcggctgccgcagtggaggagctggtttcgggggtgcggcaggcggccgacttcgcggagcagttccgctcctactcagagagcgagaagcaatggaaggcccgcatggaattcatcctgcgccacctgcccgactaccgcgacccgcccgacggcagtggccgcctggaccagctgctctccctctccatggtctgggccaaccatctcttcctaggctgcaggtgcggacccctgccggccggctgatcctgtcccctatcttccgaccctcaaggcctctcccagggctcacccctgacccgaacctctgccccagactgaacccgggcccaacctccatccgcattggtcggcccgaagactgattcccaccctggaggccccttggaaagatccttatctttgagcctcagttttctcttctggtaaaagggtggttatgatggctgtaataattaaagggtgaagagctaaatacatggcgggttcaaaggttgctattgttatttgtattactattattattagctcaaaccatcaccctttgcagtatgcattcgaagtccgttagccccctgtcacctacatgggcaaacgtgcagagagagaaacggagatccccattttacagatgaaaaaagcttagggagagaagtgatatacctggggccatgcagcttctggcagggatgatggattttatcactaatgagaggatgtaatctggatcctatggctttttctcctcactccacaggccacgggggtcctaagtaggaaaccaggcttcacctctctgcgtttccctcttatggaaaaggggccgatggccttttttggggaagaggctccaaagcccactttcatccttgggctgcggccaaccaaaagggacnaaggggccggccttttc

SEQ ID NO: 263046 - DNA, 974 bp, Homo Sapiens
  misc_feature (780)..(780): n is a, c, g, or t
ggcctgggtggcgaattcggcacgaggatggcattgggtactgctgcctactgggcattggcgtcgggggcagatgaggctcccccccgtctccgggtcctggtctctggggcatccatggtgctgcctcgggctgtagcagggctggctgcttcagggctcgcgctgctgctctggaagcctgtgacagtgctggtgaaggctggggcaggcgctccaaggaccaggactgtcctcactcccttctcaggcccccccacttctcaagctgacttggattatgtggtccctcaaatctaccgacacatgcaggaggagttccggggccggttagagaggaccaaatctcagggtcccctgactgtggctgcttatcagttggggagtgtctactcagctgctatggtcacagccctcaccctgttggccttcccacttctgctgttgcatgcggagcgcatcagccttgtgttcctgcttctgtttctgcagagcttccttctcctacatctgcttgctgctgggatacccgtcaccacccctggtccttttactgtgccatggcaggcagtctcggcttgggccctcatggccacacagaccttctactccacaggccaccagcctgtctttccagccatccattggcatgcagccttcgtgggattcccagaggggcatggctcctgtacttggctgcctgcttttgctagtgggaaacaacacctttgccctccacctcctcctttgcagtaggttgcccactgctcctgctctggncttttcctgggtgaagaatcaaggggcttgccgaaagaaaccgccgccccccagggaaagaagcttgaagccagaacgtcaacccggaggagggaaaaggcacccccggatggcaaatggcggctcccgggatgcgccctccaggccttcttaagacacccttgcgtgcacatgggtcccctcaaaaacctcct

SEQ ID NO: 263047 - DNA, 1167 bp, Homo Sapiens
  misc_feature (785)..(799): n is a, c, g, or t
  misc_feature (889)..(889): n is a, c, g, or t
  misc_feature (988)..(988): n is a, c, g, or t
gggtggcgaattccgcacgaggatggcattgggtactgctgcctactgggcattggcgtcgggggcagatgaggctcccccccgtctccgggtcctggtctctggggcatccatggtgctgcctcgggctgtagcagggctggctgcttcagggctcgcgctgctgctctggaagcctgtgacagtgctggtgaaggctggggcaggcgctccaaggaccaggactggcctcactcccttctcaggcccccccacttctcaagctgacttggattatgtggtccctcaaatctaccgacacatgcaggaggagttccggggccggttagagaggaccaaatctcagggtcccctgactgtggctgcttatcagttggggagtgtctactcagctgctatggtcacagccctcaccctggtggccttcccacttctgctgttgcatgcggaacgcatcagccttgggttcctgcttctggttctgcaaagcttccttctcctacatctgcttgctggctgggatacccctcaccacccctggtcctttttactgggccatggcaggcaaccctccggcttgggcccctcaggcccacccaagacctttctacctccaccgggccacccagggcctggtctttcccagcccatcccctttggcatggccaccccttccgcgggggatttcccccgcaggggccctgggggttcctcgggaccttggggcccggcccggcgctatcgcctagagggggggaggccccaaaagcccttgtgggagcttnnnnnnnnnnnnnnntcttttaggcagggaaagggtttgggcgcccacaggagcgcccctcgggcccctcggggactcctttttcccggcggggcgggaaaaagnaccacgagggcgctggggtgcagaaacgcaaaaataataacaagctccccccccacggcgaaatatggaaagccgcgccgcgggccgacggaccgcgcncacaccctcccagggtgggcggtagaagcgcgcgcgctctcttgatataggacgcgaataccatcgtatcgcctcgcacgacgagaggagacacttctcgaacacactcctccatagcgacggatactcaaccctggcccgacaccccacgtgggcggcctcccacaaggtccacgccc

SEQ ID NO: 263048 - DNA, 1031 bp, Homo Sapiens
ggcctgggtggcgaattcggcacgaggctcggctgctgggccccatggccggatggcggggcccagcactacccgggccaagaagaggaagcccaacttctgcccgcaggagaccgaggtgctggtgtccaaggtgagcaagcaccaccagctgctgtttggcacggggctgctgaaggccgagcccactcgcaggtaccgcgtgtggagccgcatcctgcaggccgtgaatgcgctgggctactgtcgccgcgacgttgtggacctgaagcacaagtggcgggacctacgagccgtcgtgcggcgcaagctgggcgacctccggaaggcggcccatggccccagccctggttccggcaagccccaggccctggctctcacgcccgtggagcaggtggtggccaagaccttctcttgccaggccctgccctccgagggcttcagtctggagccgcccagagccacccaggtcgatccgtgcaacctccaggagctgttcccaggagatgtcggccaacgtcttccgaatcaactccagtgtgacctccttggagcggagccttcagtccttaaggacacccgagtgacacgcaggagcttccggacagcctgcacacggcacagcagggagacccaacaagaccattgcagccagcgccagcttccgtgaagcacaaggccgagctgctgcccaactcctggccccaagagcccctagcgccccgagctgccctcaccccggacaagcgcaaacattggccctctcgcaggccacttccgtgcccacgcagcagccgcgccaccgtcccttctccgcacatccccaatcgacccctatcgacctacacgagccgacccatggatacctgcacaccgccaccgccaattccatacccgacagccgaaacccgactcaatagtcacaccaactcttaccggaggtcctctatatggcagatctcacacataccaaccatcctgacatcgaaaccccgccccgactgcgtcggcggctacccacaggatacgct

SEQ ID NO: 263049 - DNA, 1026 bp, Homo Sapiens
  misc_feature (15)..(15): n is a, c, g, or t
  misc_feature (25)..(25): n is a, c, g, or t
  misc_feature (34)..(34): n is a, c, g, or t
tctccaccctcatcntccctccacncccacagtntggtaaccggcccaaccccccaggcctgggtggcgaattcggcacgaggcagaaacattgcaacatattatggtgctttcatcaaaaagagccctccaggacatgatgaccaactctggcttgttatggagttctgtggggctgggtccattacagaccttgtgaagaacaccaaagggaacacactcaaagaagactggatcgcttacatctccagagaaatcctgaggggactggcacatcttcacattcatcatgtgattcaccgggatatcaagggccagaatgtgttgctgactgagaatgcagaggtgaaacttgttgactttggtgtgagtgctcagctggacaggactgtggggcggagaaatacgttcataggcactccctactggatggctcctgaggtcatcgcctgtgatgagaacccagatgccacctatgattacagaagtgatctttggtcttgtggcattacagccattgagatggcagaaggtgctccccctctctgtgacatgcatccaatgagagcactgtttctcattcccagaaaccctcctccccggctgaagtcaaaaaaatggtcgaagaagttttttagttttatagaagggtgcctggtgaagaattacatgcagcggccctctacagagcagcttttgaaacatccttttataagggatcagccaaatgaaagatgaaactgagtatgagtacagtgggagtgaggaagaagaaggaggaagtgcctgaacaggaaggagagccaagttccattgtgaacgtgcctgggtgagtctactcttcgccgagattttcctgagactgcagcaggagaacaaagaacgtttccgaaggctcttccggagacaacagttactacaggaacaacagctcccgggagcaggaagaatataaaaggcaactgctgggcaaaaaaaccaaaacggattggagccacccaaaagaaccgaaggcgaccgcttaaa

SEQ ID NO: 263050 - DNA, 959 bp, Homo Sapiens
  misc_feature (634)..(634): n is a, c, g, or t
ggcctgggtggcgctggcatgtttgccctgctctgcctgggactgagcgagtggacttagggctgggcaggcagtagccaccagagggcagcagcgaactaggccaggcctgactggggtctgaagatcagggtcagtgtggctatgcctgggaattccagacctgaggttgggaaaagaggtttttctcctgcagggtactgggccaggccctcagcctcagagagcctgcagaagggcttgggagtgccacaccccatctctgctgattgaatgtccctccaggcaccaggatctcatcatttccccatcagagggtgtggccaggcctaacaagaccatgggtgcttctagaaacagggttgaagttcccagattccctgagaggagaatgtgtataggagggtttggctgagtccttcagcgttaagtggaggaaagcttggggaagccccaatagctggacagacctcagcctcccctcgaagacacctcaattcacagactctcagcccacacaatgccccagtgtccccagctccgctgaagcagcttgcagggcacttggatcacaacttctgcaccctcttgtccagagtctagggcagtcctccactggcccagcactccagtnttccctttccctgcctcttgtccaatgggagtgggaggccacgtgagttggatcagaggtcctgaagcccttgacccctggggggcccggggagcggaagcaatctccctgggcttaggcccccggattttacccgcttttttcttggaatgaccccctccccccttgttttcccggtttcctttccgcccctccgccgttctttttccccacgccgccttttgttatctaccgccgctcgcccttttgggtccccctatccgcgtatttcacccttcacacaaataaaatatatataacccccggtcgcgcccccctctttatc

SEQ ID NO: 263051 - DNA, 1076 bp, Homo Sapiens
  misc_feature (74)..(93): n is a, c, g, or t
  misc_feature (369)..(377): n is a, c, g, or t
gtggcatcttacgtggggtggcgggtggtgtatgaagatgagtccgcccagcgtgttgccgaaatacgccggtnnnnnnnnnnnnnnnnnnnnccggcgcaacaactgcgcgcgctggtaggggtggctcgcggcccgcgatgcctctatccccggggcgggaggcaagggttggggtctaggtacaacggggcgatgactggggtgccggctttgataagggccaggaggggcgagactcggggcggtgtatatctgtgggttggggcaccctatgggggggcgaaccggcgggcgtgataaaggggcgcttgctttccatccttagaacctctggggaaggggtcccatttgtgggtgctccctaannnnnnnnntttttggagggaccgcccgccccatttggctgaacagttccctgtcccaggcccctttgctctttgctgcggtgggaaacggattcggggcccaggcgggggctccttgctgtctcagggccttgttgtggaggggaggggcagcggcgagcccctggggtcagctgcagtttaaggtcaaggtcggaggccgaatctggccaccaggagtcctggacagacagacgggccttgcaggaagccccgattgtcaactatcatggggacaaggcaggcgcgggtgaagggctgggggatcccatggggtgggtgggtgagctgcctgccacctgcctgcctgacacctccagagacaggcagcccctcccttccccaaccaagccaccaggggtgctctcagggtgagggatagaggggaagagcctgtccctgaaatactgcgggctgggagggaacacgagggcagggtcctgtgcccctccccagctctgcaagatggcaaacgctgtgggcctgctctcctgagtcactgcaagccacgtgggcagatggcgggcagcacaggtgacctgggggcaccttcatagtagaggtgagcagggcgggggaccggggaggggacaagcccacccacctaccctctgctcaccttcccgggtgcctgcaatgcttcctcgtgccgaattcgccacccaggcc

SEQ ID NO: 263052 - DNA, 988 bp, Homo Sapiens
  misc_feature (53)..(109): n is a, c, g, or t
gctgggacgtagcggcttaacggtcgattggtctccggtaggggtgtggtgannnnnnnnnnnnnnnnnnnnnnnnnnnnnnnnnnnnnnnnnnnnnnnnnnnnnnnnnggcccgtggggcgcggtttcagggcgcgggtcgggggctgagggctggctttgcgcggggcgtggggggtgttgttttttgggtgcccacaagcccgacgggggcgggttccgggaggcggggcaatggtggtcattggaacttccgggggagggcagggggagggtgccattgggcaccccctttgagatgctcaaattcacagggtgacaccaggcacaggtccacatcgtgtggggaagccgagcgccgcgcccgggggccacgcagcgggaggctcagcccagcctcactggtgggggcggatggcggcagcacctgctcaaaggacaccgacagggactcgtccacctcggtcgagtgcggggagcccacctctgcgggtagtgagggcgtggtcaccgtgggtgtggtcactgtgggtgaggcgtctggcccggcctccccgccccgcagtgggctcagcgacagccgctcgctgccctctgcggggctccggtgggactcaggggagggtgtgcgtggccttgggattgagctggcggccaaaggcagctccagtgccttctcctccccggctgggatcggccccagctccaggctgggcgtggccaccagctgggaggccggagagccgcaggccgcactgggggggctggcttctccacatcggaggctgggcgggctgcggggtccatttgccaccggcgggaagccagagtgggacgtgctgggcgctttgcggggcttgggtgccgcctgggcattcgtcttcttgaggttgggcacagaagaggctgcccggcgcacctcccgcggctgggtccgggagacactcggttcctcgtgccgaattcgccacccaggcctcgctacgtt

SEQ ID NO: 263053 - DNA, 932 bp, Homo Sapiens
  misc_feature (856)..(856): n is a, c, g, or t
aggtagcgaggcctgggtggcgaattcggcacgagggcggctcagccgctgcggcatcgctcacgttgtgcaacgccgccccggggggacttttgtggtggcactgagagggcgattgaccaagcttcttttacgacctccatggagtgggatacgcaggtggtgaaggggtcctcgccgctcggccccgcagggctgggggctgaggagccagccgccggcccgcagctgccgtcttggctgcagcctgagaggtgcgctgtgttccagtgcgcacagtgtcacgcagtgctcgccgactcggtgcacctcgcctgggacctgtcgcggtccctcggggccgtggtcttctccagagttacaaataacgtcgttttggaagcgcccttcctagttggcattgaaggttcactcaaaggcagtacttacaaccttttattctgtggttcttgtgggattcccgttggtttccatctgtattctacccatgctgccctggctgccttgagaggtcacttctgcctttccagtgacaaaatggtgtgctatctcttaaaaacaaaagccatagtaaatgcatcagagatggatattcaaaatgttcctctatcagaaaagattgcagagctgaaagagaagatagtgctaacgcaccatcgcttaaaatcactaatgaagattctgagtgaagtgactccctgaccagtccaagccagaaaactgatcctgtaccaaagccttgagtgtcaagttcagggctttattgctgtcctcaacaacaggtgctgcttagtcatttcttgaaaaagattggcttcaagaatggaggggaaatgcagtttctatttacctttangctgatttttccaaatattttgggaagctgtttttaagaagatgagagactaaggattcctctccttttatagcct

SEQ ID NO: 263054 - DNA, 696 bp, Homo Sapiens
aggtagcgaggcctgggtggcgaattcggcacgaggatgcaattgagtttttactgctgcaggcatcagatggcattcatcactggactcctcccaaaggccatgtggaaccaggagaggatgacttggaaacagccctgagggagacccaagaggaagcaggcatagaagcaggccagctgaccattattgaggggttcaaaagggaactcaattatgtggccaggaacaagcctaaaacagtcatttactggctggcggaggtgaaggactatgacgtggagatccgcctctcccatgagcaccaagcctaccgctggctggggctggaggaggcctgccagttggctcagttcaaggagatgaaggcagcgctccaagaaggacaccagtttctttgctccatagaggcctgagctgactggagcagagtcatttgcttcagcaggatccttgtgggccttctaagatgaagccaccctcaggtccagggaaggttgtgctggtatttggctcatgacagccaagagcagatttgtgaaatcggctcaactcccaggtgagagcaagcaaaaatcttggctgggtggaaaggaaggcaaaagagtaaaaattaaaaaggccaggcccagtaagtgtaccttgtactttataaataaacctcaagcagctcaaggttgtccttctaaaaaaaat

SEQ ID NO: 263055 - DNA, 768 bp, Homo Sapiens
  misc_feature (683)..(683): n is a, c, g, or t
  misc_feature (702)..(702): n is a, c, g, or t
gggccttctgcttcggtgcgtttgcttctgaggatctccagtgtcacaacaaacacatgccagccctgttttacaggaagccctggaggagttgggatagaggccacattgactgagggtagttgccagggtcctgcagttatacacaaagtccttaggataagaccatggccttgagagcatgtggcttgatcatcttccgaagatgcctcattcccaaagtggacaacaatgcaattgagtttttactgctgcaggcatcagatggcattcatcactggactcctcccaaaggccatgtgggaaccagggagaggatgacttgggaaacagccctgagggagacccaagaggaagcaggcatagaagcaggccagctgaccattattgaggggttcaaaagggaactcaattatgtggccaggaacaagcctaaaacagtcatttactggctggcggaggtgaaggactatgacgtggagatccgcctctcccatgagcaccaagcctaccgctggctggggctggaggaggcctgccagttggctcagttcaaggagatgaaggcagcgctccaagaaggacaccagtttctttgctccatagaggcctgagctgactggagcagagtcatttgcttcagcaggatccttgtgggccttctaagatgaagccaccctcangtccaggaaaggttgtgcntggtatttggctcatgacagccaagagcagatttgtgaaatcggcttcactcccaggtgagagcaa

SEQ ID NO: 263056 - DNA, 904 bp, Homo Sapiens
  misc_feature (732)..(741): n is a, c, g, or t
  misc_feature (752)..(760): n is a, c, g, or t
cccccgcggcggtcgatgtatgtacttggccacaaggagagctagcttccttctgatgtgtcgtggctttctataatcctactgcacacaaagcacagtgaccatctatttttggctagactgagctaattccatgagtttggttctcaaaatcacctgacctctgtggagagtggagcgtaaggagaggtgactggggcacccgtgccttgacaccccactttcttctcctgctcccctataatgtcctcgctatggaagcaccttcctgggacttcagaatggaaactgctgcagggcccttctcatgcatcccagtgggcagcacgagcatggaccgccagtgatgcactccaagccacttcacctcaagcatcctatgcatctgccagacacgagtggggcctcaacactgcttgacagtttgtgaagtgctctaacattctggacatgaagctttcatggactgcactagtgtgctgtcctgccctgtctgaacacacgttttttgctcctacagctgatggggacccacgcatagggcagatgtcagcccctgttgtaggctatggaagcttggacagtcccacaaagacatcactttcccccagcaagtccagcatgggtcccccgccagggcttcctcagaaaaaacgtctcttggcttccatttacagccgacacacccaacactaaaaaacttccgaaggggccaattcctaattggtttcnnnnnnnnnncaggggaaagnnnnnnnnncaccggcttaaaatggggaaacaattttgggacgcaacacattcggggggcttcacatataacccccgcgggttctctgccccctgggaacccccccacagggcttttatattctttaggctacaccaacaaggacgggggcgt

SEQ ID NO: 263057 - DNA, 1274 bp, Homo Sapiens
  misc_feature (124)..(151): n is a, c, g, or t
  misc_feature (153)..(172): n is a, c, g, or t
  misc_feature (174)..(203): n is a, c, g, or t
  misc_feature (205)..(214): n is a, c, g, or t
  misc_feature (216)..(222): n is a, c, g, or t
  misc_feature (224)..(228): n is a, c, g, or t
  misc_feature (230)..(236): n is a, c, g, or t
  misc_feature (242)..(242): n is a, c, g, or t
  misc_feature (254)..(254): n is a, c, g, or t
  misc_feature (259)..(449): n is a, c, g, or t
  misc_feature (451)..(451): n is a, c, g, or t
  misc_feature (455)..(503): n is a, c, g, or t
  misc_feature (699)..(699): n is a, c, g, or t
  misc_feature (970)..(970): n is a, c, g, or t
ggctgggtggcgattcggacgaggacctcccagcccaccctggccatgggtacctcggggaacatagctccgtcttccagcagcccctggacatttgccactccttcacatctcagggaggggnnnnnnnnnnnnnnnnnnnnnnnnnnnngnnnnnnnnnnnnnnnnnnnncnnnnnnnnnnnnnnnnnnnnnnnnnnnnnncnnnnnnnnnncnnnnnnncnnnnncnnnnnnncccccncgcgccccacgncgcgnnnnnnnnnnnnnnnnnnnnnnnnnnnnnnnnnnnnnnnnnnnnnnnnnnnnnnnnnnnnnnnnnnnnnnnnnnnnnnnnnnnnnnnnnnnnnnnnnnnnnnnnnnnnnnnnnnnnnnnnnnnnnnnnnnnnnnnnnnnnnnnnnnnnnnnnnnnnnnnnnnnnnnnnnnnnnnnnnnnnnnnnnnnnnnncngggnnnnnnnnnnnnnnnnnnnnnnnnnnnnnnnnnnnnnnnnnnnnnnnnncggcaccgcacgagcccggggggacgggcacgccacagcccacccgcccagaaggcgcgggacgcacgccgcaccgcgacggccccgcgcagcggcgaggcgccgaaacggacaaagacgcgaaacaggggccgggacgacccggattgagccgcgcccgacccgcgtacggcgccgcgcccatcaacgccccacnaacgacgcgcgccggacccccagcgccctcccgaccggcgccggcctccacacattcccgatggccgcgctgcttcgaccggcgggtcacccggtattacgcttccgcgcgcagttctcatagacgtccacaccgcccgccataaacgccggtccgcattacgcacacaagaacgcaggcgcgctacgccgccgcgcgcaagtctctcgaacgtgacccccgacgaattcctgtcaggacccgatctgaactcgcccacgcgggtcccgcncgcgcgccgccgaatgcgtgacaataacacccctggtgttctcccactagccctagtgacaagcccgctaatatcatccgtcgtgacggacccccgcacgcgcgtagacgggatacagtggcggtctccgcgcctataccacccgccgctggtaatgtaccaccgccgagcgacgtaatcgcgcgctaagcgacgtggtgtcccaagatacgctcatcccgccggcaatatgctcgcacgcttatcatcacgatcccgtatcatcgccacaaaccgtctgacccgcacccacgtggacaccgtg

SEQ ID NO: 263058 - DNA, 1190 bp, Homo Sapiens
  misc_feature (418)..(477): n is a, c, g, or t
  misc_feature (682)..(692): n is a, c, g, or t
cttatggagtctgtccgccaccgtgtagcctctggtgtgagggtgctgatgacgttcgcgccgggcgccctcgctgcgtgagtctattggaagaccggcgaggtcgccccgttgagggggacccatcataaattgacgatagatggtgcggggtgtgtgccgatgttgagtgcgtcccggggcgggtagtgtatcgagtcaatgagtggtagcgtggtgccgcgagaaaccgcgccccccgcagttaatggtcgccttcgcctcgcgccggcgggcgggtggcgtagactgtgaccggggagacaagatggcaacagactgggagggtaggcgaacggctgggcggcgtgcgcgcgtaagaggcgaggagtggcgggtttcactgttccgctgacgcgaacgggggcccgtcgggcgnnnnnnnnnnnnnnnnnnnnnnnnnnnnnnnnnnnnnnnnnnnnnnnnnnnnnnnnnnnncaagggcaataaccgggggcgtgagtcccgttgggtcccctgggcgccggaagggtgtggttcgaagggcaacgttttgttaaaagccagcgcttaggtaatgcggggcccgcggagggcaagttggggggtatccgaggccggtggggattcctcccccggggaggtcattccctgccctttccggggtcaagagggaagggcnnnnnnnnnnnatgttggggaagcggcctgggagacggctgtcagggttgcagcagggacgctctgggatgagctgggggcaggcggtccctttgggaggtgagacaatggccctgtgtggtacactccctgccccccatcccccacgggccgcttggtctggcacaaaggacacactgtgaggctgggtcctccagctggtgggggtggcatggagtggggcctaaggaacagctattaggtccagagtggcagtcgggggaggtggtcagtttggcagggcctctgggagcataaaagtcccagagcaagcctggccttccctgtcctccctcccatgtctgtcctgcagaggtggggaggggtttaggggcaacatgacttctcccctctccggtctggtaggaaccagctgttaggtgaggggccggctctgcacctaggtggggccctgggaccttcctcgtgccgaattcgccacccaggcctcgctacttgttattgtgatt

SEQ ID NO: 263059 - DNA, 1005 bp, Homo Sapiens
gccagggggcttgggggaagggagccccccccgtgaagaagggttcccatttcggcccacgtggggttgttgcaggccacccggggagtcaggggtcgccccaaacccggggtgccctggaaggagagcagtgccggcctggtgtctccgggccccagctgccactgccacaggcctccgaaggggccaggagcaggagcaggagcagaaagcgcacatcaagggctcatgctgtgccttcatctctcagctctgtttagctgcaccggcagacaggccgtttcaaggggggagccaggtggctactggccatcgtgagctagtgccgtgcttaccgtcccagacagtgggtttattgcacaggaactctggcaagaccccaggaggactcagtatggctgggtctgggtcacatgcccagccctgagccaatcaccctgcctagggggtggggctattctaattggtcatcctcatcacattcacccaggaagaaggggaaggaggggctgtttctcttgcccaggaagactgggcgtgactactttgacctgaagagttattctcaaaaaggaaaggaatgctgggtagacaaaatatatgcccattgcagaaggccagcaggggcccctggccttcgctttgctaaaggtggcaggtgcacagctgtccggaccctggagctcagtgtgaggagtgtaaaggtgtagaaggtgccgtctgtgcagcagtgtggcggtgttctgcctttctcagctgaatggaagacaaacactcaggcctcttcacaccttcgtgactggtcccccctggacctttgcgcagagctggcctttccatgaagcaaactctgggcacatgtggaaaccagcctcttgctgccatgcctgccccagggactgaccagggtcggctccagtcactgacatagtttatcacatctctttggcctctggtctctggatccaccctcgtgccgaattcgccacccaggcctcgctcctt

SEQ ID NO: 263060 - DNA, 1054 bp, Homo Sapiens
gtgtttgtccctaatgttcagtaatggtagaaaataaatcagtttattcatcatagcatgtggcttaaaaaatcaacagaaggtgccagcgtcaacggaaccggcgggggctgcacccaccaagccacttcctcgaaaagaaacgtcagttagaggtttgatatataggactagatataggattcctttaaaaagcaaacccacattttctccaaagttagtggtaaggacggtctcctgacctctccaagcctgacaggagactgtccctccgtgcggcccctgggactcgccccagccacgcagccgtgggcaggacgaacggaagcatcgcgctaacggtggcttcgcggcgccacacagaagagtctgggccggacaggagaacagagcaaccccgtggtgcagcggggacctcggaggtcagaggaagaaacgagaaacttcgcaacgacaaatcagcatcagaaactcagaaggtgatgccagtgcggactcccagcgtctctggcgcgcggaccaaagtgtgcgctccagcctgggcactgggcccgcggtgaggccgcaggtctgggaaggtggctgggaggcatccacacccgcccgcaggggctgcagcctcacctccgacccctccaggaagccggcggcgcagccccgaaggaccctttcggttgcgtgcggaatctctcctcctcgtcctctaatcggcgacgcggcggtccctggctcccgagcgccccgctggccggcggcgtctcatagggggtcggcggcagccgcggagctggtgtcgggcaagccgtcctcctgggcctcctgggccgcgctggcctgacgctgggccagggccgcgctcgagtgccggcacttgggggagccgcagcggcagctgaagagcttgcctttgatgtcccagaagcgctctccatagtcaaacccgagctgctcgccggcctcgatcaggcgggtgctgaagaaggcgatccgggggaaccgcaggtcctggtgggccatgaacacgcgcacctcgtgccgaattcgccacccaggc

SEQ ID NO: 263061 - DNA, 989 bp, Homo Sapiens
tgggtggcgaattcggcacgaggctcaagtgcgcacatcctcatcttgcatatagattgcttctagctgtcctcaatccagggaaactccaaattacatatgccctgtgcttggggcaaattagaaacactacagtcttacgcaggaagagccttcatgaaaacagccactggcctctgcagagatgactgggagcagcataccactgcccacctctatggcctccttcacacaccttcacggagcacaaactctgtcctgttttcccaggagaaagacgggatgcactgaacccctagcttctctctcgcctggtcccctctgcaataaaaggcccaggtctacaagatggcaaagaaggggaggaagaacagtatgtacctgcagaatttaaatttttctctgcatcaaagctctaacgttggtcccatcagcataggctccagccaaagaagctcctccacccaaaataagggagagatccaaagggaggcgatacaatgacgtgaaaccatagaggtaagaagcaaggcctcctaatacttgactctatgctaaactgttctgaacttgtgggtagatcttctttggttacaagatgatgcacgatcttggagagcctctgttgtaccaggaatacaatgctggtgggaggattcgtgctcctcatctgcttatttgctctcagatccattcttcactcttcctctccctactctgtctcacaggagctactccggtaaattacatttctcagctcccatgcctgttggtttccagttagatttggtcagtgggaggctctggtgggagactggaggtgagaagagggcagagaagtcagggttttttctctccctacctcctccgggcacaagccggaaggggaagggacctattctggggggttcaaccttttgcagggtgggccccagcttccgtggaccccccccggcctcccttgggcctcccctaatccctaaaagggg

SEQ ID NO: 263062 - DNA, 1391 bp, Homo Sapiens
tggtactggccggaatttcgggatatcgtcgacccacgcgtccgctactgcagacgttatcggatgaatcggatgaggtgatcctgaaggacctggaggtgctggcagaaatcgcttcctcccccgcaggccagacggatgacccaggccccctcgatggccctgacctccaggccagccactcagagctccaggtgcccacccctggcagagccggcctactgaacacctctggtaccaaaggcttagaatgttctccttcaactcccaccatgaattcttacttttataagttcatgatcaaccttctcaagagattcagcagcgaacggaagctcctggaggtcagaggccctttcatcatcaggcagctgtgcctcctgctgaatgcggagaacatcttccactcaatggcagacatcctgctgcgggaggaggacctcaagttcgcctcgaccatggtccacgccctcaacaccatcctgctgacctccacagagctcttccagctaaggaaccagctgaaggacctgaagaccctggagagccagaacctgttctgctgcctgtaccgctcctggtgccacaacccagtcaccacggtgtccctctgcttcctcacccagaactaccggcacgcctatgacctcatccagaagtttggggacctggaggtcaccgtggacttcctcgcagaggtggacaagctggtgcagctgattgagtgccccatcttcacatatctgcgcctgcagctgctggacgtgaaaaacaacccctacctgatcaagggccctctacggcctgctcatgctcctgccgcagagcagcgccttccagctgctctcgcaccggcttccagggcgtgcccaaccctgagctgctgcagaccgaagaacagtctaaagggcagccccccaagtcccaaaaagctgactcccctagcatcgacctacgcagagctgctgcagcactttgagaaggtccagaacaagcacctggaagtgcggcaccagcggagcgggcgtggggaccacctgggaccggaggttgtcctctgacaggcctggcacggaggagggcccaccgagtggtcccatgaaacactaagggtcgtcacgccctcccgaggagctcaaggacctgcctgtcaggaccagggctggggcctgccaacccagggcaatgttgggggccggaggctgctgtgtctgcccaaactcctctcagagtccaagtccccaggcctccagcgttgttcacctgcacctgggaattttcacagagctgggctgccccccccagggggggtgctatagcctcagaagaccctcatccccctggaatcaccctcttcccaataccccctggggaaaagagcttgcccctcc

SEQ ID NO: 263063 - DNA, 942 bp, Homo Sapiens
  misc_feature (777)..(777): n is a, c, g, or t
  misc_feature (779)..(779): n is a, c, g, or t
cctgggtggcgaattcggcacgagggcggatttgaggacgtccatctagagccccacctccttattaaacctgacccaggcgagcctccccaggcagcctcattactggcagcagcactgaaagaagctgagagcctacaagttgcagtgaaggcctcacagatgggcgccgtgagtcaatcatgtgaggacagttgtggagactctgtcttggcggacacactcagttctcatgatgtaccaggatcaccgactgcctcattagtcacaggagggagagaaggaagaggctgttcggatgtggatcccgggatccagggtgtggtaaccgacttggccgtctctgatgcaggggagaaggtggaatgtagaaattttccaggttcttcacaatcagagattatacaagccatacagaatttaacccgtctcttatacagccttcaggccgccttgaccattcaggacagccacattgagatccacaggctggttctccagcagcaggagggcctgtctctcggccactctatcctccgaggcggccccttgcaggaccagaagtctcgcgacgcggacaggcagcatgaggagctggccaatgtgcaccagcttcagcaccagctccagcaggagcagcggcgctggctgtgcaggtgtgagcagcagcagcgggcgcaggcgaccagggagagctggctgcaggagcgggagcgggagtgccagtcgcaggaggagctgctgctgcggagccagcgcctggtggagagggacagncnaaagaatgccggccccacaagagcctgctgggccactggaaacccgggccggcagaagaaccctgcccgcggtgctcccttccgggggggcccccaaggaaatggaaacttattccatcctgagaatttattggcttgaaaactcctttcttcctcaaggaac

SEQ ID NO: 263064 - DNA, 1290 bp, Homo Sapiens
  misc_feature (948)..(971): n is a, c, g, or t
  misc_feature (991)..(991): n is a, c, g, or t
  misc_feature (1020)..(1020): n is a, c, g, or t
  misc_feature (1111)..(1129): n is a, c, g, or t
  misc_feature (1161)..(1172): n is a, c, g, or t
tgggtggcgaattcggcacgaggctggatcttcccacgagtgggattctggccttcagagaccaggagggagtgtctgggccgcaggtgtggcactgtggtgagagtgtgtgtctttgcacacacagtgcagcgggaacggtggggctggctggtgctgaagacagacacactcctgagccaaggccttgtcttcaacctccccgtcccgttgtcccattttgctctgtgaaggtgcaaatccctttcttcccttcccatctcaggctctcctgttttccctcagggtccagtatgcctttgagctttagctgttagaaaggaacccccgtgacttgacacagctttcacagctggctgctaggaccggcgggctgggtgttcacgtgtgtctgtgtcatggatgcaatgcaggccctgggaggactgtgcgtcacccgtcaaccagagcgtgcctccgggccagcttccctccaaggaatggagtggatttcatacaggatctctttattgcacagactgaatggctttacatgtttctaatgcgaattacgcatgtgaagcagtgggcgtccacccgcgtccctcatgggtgagccctcccagctgtgagccccaggcagtgtggtcaccgagtgaggaccctcctcaccaggaaccgcatccctgtgctgcctccacctgagagttgctagggggttcttgtcgagatcatgtcatcagcacccctaagtcaagtcacgggtttccatagccaggcagttggtatgtacaattcagttcagcgtatgaacttgtatctctaatctgatgtccatttttatattttttgaaactgagcacaatgaaatcctttcttgaatcattttccttttggattataaaaatatgggggaaagtgctatgatgaattttatgcaataaatgtatacatgtgtgcacatgcaannnnnnnnnnnnnnnnnnnnnnnncaagggacaacaacacgcanacgaaggccgcgaccgacacagaaaaaanagagaacaaccaccccaaaaaaacaagagaggcacgccagggcaccgaacaaaggacgaacaagaaagagaggaaagaaaattgtcgcggnnnnnnnnnnnnnnnnnnnaagaaattcttttcgtaacaacattatttttnnnnnnnnnnnncgggccccgtgtacgagaaaaaagaaaagaactcggacacctatgcgttggtctccccaccaaagaaacaccctcggcggtaagaaataaagagagggcttcgtaaccctcaccgccc

SEQ ID NO: 263065 - DNA, 902 bp, Homo Sapiens
  misc_feature (91)..(99): n is a, c, g, or t
cccaatcccctttctttttgagaaagggggcccgagggggggccccttttaggccctttccccggttaggtttttttaattccacctgttnnnnnnnnntttttccttcaatttcttggggtagcccattcctccttttggggtaaagctacagaagaagtcgtggaccaaaattatccggaggcttttttggtttggtttaaacttttatcaaactccccagcaaacttgctgactgcatttccacacattaccaacacctgccaggacttcacagcagggtgacccgctaagcaagctggcctaggttcagcccacactgctgctacctactcttcaagacattaggtgtgaacagagaaggggaatgaggtgacctgggtttgaatgacccagggcccaatgcacaagagagaattttgatgtcaaattagggtggcaaggagaaaacaaaaaagatccaacttagaaacagaaccatgattcaacatttgcaaaaagcatcatcaataagcctgaagaaggccacggactgtgcatccgctggctcagagaaaggctgggcagccggaacagcagcttcctgggtaaccaggcaacaatctcagcgcctgggagtcagggctgcgcactccactctggccagaacacaaacggcattggcactgtaagctctcagttacgtggccctcttttctctcctctatttctccaaacatatgtgcacacccagaggaactgagtggcaattccagggtgcgggcgggcaggaggggagagaggacaaagagagaataagatgagctaaatgttttgtgaaaagccaccgcccatccgaaagcttgtgacttcccttgccccaacaatctttgtaggttgccccttttcccattcctaccccc

SEQ ID NO: 263066 - DNA, 853 bp, Homo Sapiens
acggagcgaggcctgggtggcgaattcggcacgaggggcccaggcggcgcccgccatgaacgggctgtcgttgagtgagctctgctgcctcttctgctgcccgccctgccccggccgcatcgctgccaagctcgccttcctgccgccggaggccacctactccctggtgcctgagcccgagccggggcctggtggggccgggaccgcccccttggggaccctgcgggcctcctcgggcgcacccgggcgcaggaagctgcacctgacggagcataccgacttccagtacagtcagcgcgagctggacaccatcgaggtcttccccaccaagagcgcccgcggcaaccgcgtctcctgcatgtatgttcgctgcgtgcctggtgccagcttctacattggcctgggctcccgcctccactgcaacatcttctcctacgactactccggctacgatgccagctcgggcaggccttccgagaggaacctctatgccgacatcgacgccgcctggcaggccctgcgcaccagagcatcggcacggtgcccaccgtggacctggcctcccgctaccagtgtgccgcggtggtgctgcactcgccgctcacctcgggcatgcgcgtcgccctccctgacaccaagaagacctactgcttccaccccttccctaacatcgagaaggtgtccaagatcacgtcgccccggctcatcatccaagggaagggaggaccaaggggatcgacttctcgcccggggtgggggctctacaaggcgttccccaaggaggtgaacccccttgtggggtgcgggaaccgggaaacaggaccctctcgcgcccatgacacatacctggagg

SEQ ID NO: 263067 - DNA, 950 bp, Homo Sapiens
ctcgatgtcgttgtgcccggcgccctccacccacagcggctccaccgccttggcggtgcgctcgtagagcgccagcccgtgcgagaagtcgatcacctcgtcctccgtgccgtggatgatgagcacgggagacgtgatcttggacaccttctcgatgttagggaaggcgtcgaagcagtaggtcttcttggtgtcggggaaggcgacgcgcatgcccgaggtgagcggcgagtgcagcaccaccgcggcacactcgtagcgcgaggccaggtccacggtgggcaccgtgccgatgctctgcccgtacaggatgatgctgtccgggctgatgccgtacctggcggcgccggagcagggtcagccgcggcctccgacgctcgcgcacccttcccaccagcgggcgtccccgggcccagctccggatgcgaccctccagtctccccactcagccaagtcagtgggtcaggctcaggctccacaccagtcccgagggccacccccagcccccaacaccgtggcggtgggcgaagccagcggccccgccccgttccctgcgctgccgttcactggcgtttcctagctaggatctgcagggatcctgcctacggagtgcccctggggcgggggtaagggaggccctggcgcctctcctcctcctggtcacccctaggtgcacactgggaactgtgtggcccccacatcctgaatgcttcacaccttcctgccagggttagaaaaccgttcctggtgcactggccaggacagcggacactattcctccctgcagcccttgcccacccccttggccatgaggaattcaggcagctgtgtccccaaatgtctccacccaattttggactctcggagtccccacgcccaatgagatgccagtgcaacccaggtcagcatcgagaggtggtggctgcggagagtggcaccccctcccacca

SEQ ID NO: 263068 - DNA, 775 bp, Homo Sapiens
  misc_feature (506)..(506): n is a, c, g, or t
  misc_feature (615)..(615): n is a, c, g, or t
  misc_feature (665)..(665): n is a, c, g, or t
  misc_feature (701)..(701): n is a, c, g, or t
  misc_feature (759)..(759): n is a, c, g, or t
atgagcagcttctacattggcctgggctcccgcctccactgcaacatcttctcctacgactactccggctacggtgccagctcgggcaggccttccgagaggaacctctatgccgacatcgacgccgcctggcaggccctgcgcaccaggtacggcatcagcccggacagcatcatcctgtacgggcagagcatcggcacggtgcccaccgtggacctggcctcgcgctacgagtgtgccgcggtggtgctgcactcgccgctcacctcgggcatgcgcgtcgccttccccgacaccaagaagacctactgcttcgacgccttccctaacatcgagaaggtgtccaagatcacgtctcccgtgctcatcatccacggcacggaggacgaggtgatcgacttctcgcacgggctggcgctctacgagcgctgccccaaggcggtggagccgctgtgggtggagggcgccgggcacaacgacatcgagatctacagccagtaccatgngagcctgcgtcgcttcatctcccaggagctgcccagccaagcgctagcggcgccccaaccggccggacctcagcaataaggcggcccccggacctcaccccgcgccagnccccacccaggggctgcatgtggaccccccgggcggcccagggaccaccncccgacccaggggctgtggacgatgtacaggcaacnagagtacgcactcctttccttttggaagcaagaagaaaatacgtgaaaacggaaattnaagatttaaaatttta

SEQ ID NO: 263069 - DNA, 1281 bp, Homo Sapiens
  misc_feature (77)..(119): n is a, c, g, or t
  misc_feature (813)..(813): n is a, c, g, or t
aggagggaaggggcaatatagtgggagggggagcggaaagagggggagctgcgggcggactggcctccgggagagannnnnnnnnnnnnnnnnnnnnnnnnnnnnnnnnnnnnnnnnnncaggaaaggcgtggtgtagggatcgggtgttggcggggggaaggcatagggtggaggtacagcgggtgccgggggtggcccctggacggaaggggggtttcggcggaggagggcggcgccccggaaggcttggcccccttcccctgccaggatgcgggggggcacccaccttcaccagccccttgcagccacgcttcttggagggtcagcctccacaggtcagagagctccaggatctgctggacggaggacaaccgccccggccacaggttctcggcgtgcatggtggcgtgcccgctgaagcagtgatcttcatagttgagcgtcgactccatctggtctcgctccctgtggctcagggaggggctgagcagtggggctggcgagcaggagagcatgtaatagagcgtcaggttcacggtgaggccagaacggcgtgtgggtgtcagtgatcttcttcatttccactcctgggctgaagagctgagcccagaggagctggtggtcttgaaagcagctcccccgctggcatgtccaagagctccagcatttccttccgtgccaagtcctgcagcgccttgagctcccttggctgctttgcttttgagcacctgggggttaatggggccagagacgtgcaccacccacagcaccgtctcatccagctgcgtcttgggagccacttggaggcggnttcaccagcttcttggcggccaccaccaccaggtgcaccaaccacgtgggcgtaggcggggaccggcctgagtagaggaggaactgatggtctccgaccttctccagggtactggtgaaggccttgggggctgggccggcagtgggccccacagtctgcagcgcggccacgcgctccgtggggttgttgagctggatgcgtctgcaggtagacgtggggtcggcccctgtgcgccagaaagtcctcttgcagcagcacgcagtcgcggccggaccccgcggcaaggccagagacggaggcgggcccggggccggcggccacggggccaggacctggggaccccagctgcaggcaacgcacgcggcgcagaagcccctcccgcagcagcagcaccgcctctccagcttcagccagacgcgaacgcgtgggtcgacgatatcccgggattccgaccggaccagcctgctt

SEQ ID NO: 263070 - DNA, 665 bp, Homo Sapiens
aaagaattcagaaggcctgtcaggtgggtccggccggagaggcctcgccgcggacgccgtctctccagaactccgcttccaagagggagcctttggctgctttctctccttaaacttagatcaaattttttggtttttaatcagttatcttgggaacttaacctgggcccctcacctcttctgcaccccccgcccccgaaactgtctcgtaatgaatttctgctgtcctcctggggagtgggacggccgggtcccgtcccccgggagcatcgctcggctcagcaccttggctcccagtgggggccccgtggagggcgcccgtagtgataagcacaccggcatgaacatcaggtccattcctcgaagtcggagccctcactctgccctgtcctggggctggcttgagggcgaacgccccacctcactttctagagccctgtctgtcctagctcctatctgaccttgtgtgtaaatacgtacatctgtttttaaagtggatgggcccctgagaactcagtgaaatgcagagttctccatgcacctaaagctcctttgtcgctctcatggctgtcagatcctggtccctccacactgggtgctggggagggaggaccctcggggctaccgcgcgcccccccatcccacgccgagccctatgcagtctc

SEQ ID NO: 263071 - DNA, 435 bp, Homo Sapiens
aaaggcgggtgctggaaagcccagacggaacagtgttgggccaggaaggtggatgctgttgtccatggaagctgtggggagttggcactctgtctgctggtggccctctcggctcacatgttcacagtgcagctcctggcagacttgggttttctctttggtggtttctaaagtgccttatctgcaaacaacttcttttctccttcaggaactgtgaatggctagaagaaggagctcagtaaactagaagtccagggttgcttggtttactggtttataagaaatctgaaagcacctctgacattccttttattaactcacctctcagttgaaagatttcttctttgaaaggtcaagaccgtgaactgaaaaaagtgttggcctttttgtgggaccagatttttaagataaaataaatatttttacttctgtcaa

SEQ ID NO: 263072 - DNA, 640 bp, Homo Sapiens
tgggtggcgaattcggcacgaggtgaagctttcctcaaatctacttgtgattcctgatagctcactggcaactgtaccaaggtggccactgtatcatctactgatccttctgcacctagcactcttggctccagataacgcacagaaacctattttctcaccagctgtcatttcttctagggcatgcagttctatgttcacagttcatgtgtaaaaataaaaccaaattcctggattatcaatatcagttctttacctgtgcataaaagaatatcatgaagtaattgaacttatctgttgatataaaaacacagatccaattcgtgtctgtggatgctgcaaggactggctcattggagccaaaccatgtggcggaaactcctgaaattggtggaaaaagtggaatatggcagattgggtaggtaggagaacaattttggagattttgtttcttatgttaaagtgtctgcattttatttgctgtaccctgcctactctggttttaaggattttttgacttcttcgaaaagcactgaataatctcttttccggggcctagattttttgatgagtactggggaaaaatggcccatattccattggattattttaataataaaattaagaaaataccctccct

SEQ ID NO: 263073 - DNA, 951 bp, Homo Sapiens
  misc_feature (125)..(125): n is a, c, g, or t
  misc_feature (137)..(137): n is a, c, g, or t
  misc_feature (182)..(182): n is a, c, g, or t
  misc_feature (204)..(204): n is a, c, g, or t
  misc_feature (686)..(738): n is a, c, g, or t
aggggtccccctggccctgccaggggttaggccagagccaactgggttccccccacccggggaaggaaaccaggaagggggaattccaaggagaaataccatggtgagtagggaggggggctgtntactctaccctnttacaaagcatcatgcccgaatagcagctgagatagggtgttcangcctttcccacccaccacaggnccgggagggaaagggggacccagaagccccactgaccaaagcgagtgggaccacccaccattcccaacaccattctttgggtccattcctgtccaaccagggacctcaggcccagggactgacaacagtggcagcaccaggtcagaaacgtgggcacagagaagcgtgacaggggcctgagccagtgggggcagagtgactacacacctccaggggcctgctgggtaaacgaagcctctgggaagtcaggaactgggtgcctggcccagcagagggtgagcagggagaaggagcaggtctggaggggaggccctagccactcaaggggtgcagatctactttgactttctccccgcagctcagcattccaatggtggggaagaagcctccagaaggaacaacagcatccttcttcccaatgatcttgccattccgagtgaagaaaaccaccaccttcctgccctcatgctccggctctatcnnnnnnnnnnnnnnnnnnnnnnnnnnnnnnnnnnnnnnnnnnnnnnnnnnnnngtgcaggtacatgacattccgcacgttccggacggcccgggcagtcggagacaggatcactgtgtcacaactgtcatcactgtccccctcactgtccaaaatgtagtcccgggggaacatgattccacagcccatgatgtcccctttgtaacagcgtggcccaaaggggtcccccacaccactgccatggaagatcttcccgccacccaggcc

SEQ ID NO: 263074 - DNA, 1305 bp, Homo Sapiens
  misc_feature (102)..(158): n is a, c, g, or t
  misc_feature (370)..(416): n is a, c, g, or t
gggggcttcacggggttcggtaaaaaagctcgcacatttgacttggaagcaatgtttgaacaaactcgaaggacagctgtggaaagaagtcgcaaaacactnnnnnnnnnnnnnnnnnnnnnnnnnnnnnnnnnnnnnnnnnnnnnnnnnnnnnnnnntgaagatattgagccaacatcctcaagatcaaatgtggtcagagattgctccaaatcatcttccagggatacgagcagcagtgaaagtgaacagagttctgactcttctgatgatgagttaattggccctcctttaccccctaaaatggtaggaaaaccagttaattttatggaggaagatatcctcggtcctttacctccacctcttaatnnnnnnnnnnnnnnnnnnnnnnnnnnnnnnnnnnnnnnnnnnnnnnnggaaaatcctgttcacaagattcctgactcgcatgagataacgctgaagcatggcactaaaacagtgtctgctttgggtctggatccctcaggtgcccgtttggtgacaggaggatatgactatgatgttaagttttgggattttgctggaatggatgcttcttttaaggcatttcgatcccttcagccctgtgagtgccatcagatcaagtcattacagtatagtaacacaggagacatgattcttgttgtatctggaagctctcaggccaaggtgattgacagagatggttttgaagtaatggaatgtataaaaggagaccagtatattgtggacatggccaacaccaagggtcatacagcaatgcttcatactggctcatggcatcccaaaataaagggagaatttatgacttgctcaaatgatgcgactgtgaggacgtgggaagttgaaaatccaaagaagcaaaaaagtgtgtttaaaccacggacgatgcaaggcaaaaaagtcattcccactacgtgcacatatagtagagatggaaacctcatagcagctgcctgccagaatggaagcatacagatctgggaccgaaatttgactgttcatcctaagttccactataaacaggctcatgactcgggcacagacacttcttgcgtgactttttcctatgatgggaatgtccttgcctctcgtgggaggggacgattcattaaaattatggggacatccgacaatttaataaaccactttttttcagcctcgggtcttcccaccatgtttccaatgactgactgctgtttcagtccagatgataagctcctagtcactggtacatctatttcaaagaggatgtgggccaccggccaacctggttttccttta

SEQ ID NO: 263075 - DNA, 684 bp, Homo Sapiens
  misc_feature (619)..(619): n is a, c, g, or t
aaggtagcgaggcctgggtggcgaattcggcacgagggaacgccctgtcggacatggctccccacaacccccacactctactctttgagatcctgtccctgctggtagagatgctggccttaccagaggcagtcttagaggaaatcacaaactactaccagaaaaagctgaaggaaggcacctgcaaggcccaggagatggaagcggccgtaggccggctgcggttgcagaagcttccctacaacccccagcaagaagagagctcagaagttccagaacgaaaggtcctcagtatcctgagccggctgaagcagcagaactatgctcccaacctgcagagcccctatgcccaggtgccctgcatcctgctctgcccaaagctggacaagaagatggtccgtaggaagccgagaaaccactatgcactagaccagtgcacaccccctggcctggatcctgacatccgcagccccttcttccagtcaggatctcaaggaaacagggaacacaactctgacagcagaaagtggctcagctctgtgccagctcgaacccactgaccctctggaggcctgactctaggcagctgctcaaggcctgtagacagatgggccaccanggaaggagctgctgctgggatttgcttttgtggcctggtgagctaataaacaccaataacttcaa

SEQ ID NO: 263076 - DNA, 783 bp, Homo Sapiens
gctgggtggcgaattcggcacgaggccttgaactaacccagtgttggggacatcgtgggaccgaggagaacaggaggggtgcagggggtggtgaggctagggccaggctaacgggttaaagaactctcagggtggggatgccacccggaaggggtgcttcgtaggctgcacgtcggggccgcgaactagagaaggctggatgtgcctccatcgccactaggtaaacgcagcaaggaatttggcagcttgagttctccaaggtgggagtgagagcgtgggagcattactgatgagaagttgaagaaaaggggaaaggggagcggggtttccggcctacttctgagagatgattctcaacccgatcactgagagttctgaagagctttgtgaacagcagtcagttcagggtattgattcatttgccgaactcaaaccaagtgggatgagtcataaggtgatgataactttcagacctagatggtttcgttaatctcagtgcagaggtgtgctgggggtgggtaatctagcaggtgagctgctagattaacgctgtctccataaagcgtcaaagatttactatagaagattgaaaaagagtgtcagctggtcacagaaattcagcacatgttttgttgaacgttttctgtgcgttagccaagagggagacatggtgaagagaagtaattcaaaatacagtctcatcccttaggaaggcagtttaccattcaaaagaagagttatttggaagtaaccatattacaaggcagaaaggctataggtatc

SEQ ID NO: 263077 - DNA, 983 bp, Homo Sapiens
tcatcacattcccaaaacccgtaaaagcaacttacaccccacctcaccgcggccgtgtggcgaattcggcacgaggctatagctgtgtttattatttggactctactccctttgcagcttcaaatcacagtgactccctggagatctgggtgactgataagccccctaaaccctctctgtcagcctggcccagcaccatgttcaagttagggaaggacatcacccttcagtgccgaggacccctgccaggtgttgaatttgttctagaacatgatggagaagaagcacctcagcagttttcagaggatggagactttgtcatcaacaacgtagaaggaaaaggcattggaaactacagctgcagctaccgcctccaggcctaccctgatatctggtcagagcctagtgatcccctggagctggtgggggcagcagggcctgttgctcaggagtgcactgtagggaacattgtccgaagtagcctaatcgtggtggttgttgtagccttgggggtagtgctagccatagagtggaagaagtggcctcgactgcgaaccagaggctcagagacagacggaagagaccagaccattgcccttgaagagtgtaaccaagaaggagaaccagggcacccctgccaattctccttcatcaacctctcagagaatctctgtggaactgcccgttccaatataataatctcctcctttacaagagctttcctctcctctctcttgctctcagagacctataaatccaaccagttaccctgcaagtcagccccatctgctgttccttggtctctaatcacctgagctgggtaaaggggattctgggagttgagagctctgccagggtgagatgtttcctgaagagaggttccccacccctgtaactcctcactgtactgatttactggcgcatgaaattctattaaaaatgcattcttctgaataaaaagagtattcactatttaacttcaa

SEQ ID NO: 263078 - DNA, 639 bp, Homo Sapiens
  misc_feature (53)..(53): n is a, c, g, or t
aagctgtagtttccaatgccttttccttctacgttgttgatgacaaagtctcnatcctctgaaaactgctgaggtgcttcttctccatcatgttctagaacaaattcaacacctggcaggggtcctcggcactgaagggtgatgtccttccccttaaacttgaacatggtgctgggcccaggctgacagagaggggtttagggggcttatcagtcacccagatctcccagggagtcactgtgatttgaagctgcaaagggagtaaagtccaaataataaacacagctatagatcccagagtcttcacctctcactgctggcatccagaagtcagccctgtacccacttggcctctgttgctctaaagctcctgagccccctccttcaacaggacaaatgttgagtctggcagttccccttgacactgaagagtcatattttcgccaggggccaccatgggaccaggctgggctaataggctgggtttggggagtaagcctgtgactaggagttccagggtgttgctaggttgtatcttgatagaactggtccagtcagggtggtagcagcagctgtaacgccccatgctagtaccagatatattggtgatggggaatgccccgtcattactggtggatc

SEQ ID NO: 263079 - DNA, 1261 bp, Homo Sapiens
ggcctgggtggcgaattcggcacgagggtggacgctgtggatggctggatgctcaacagcagtgccatcaggaacctcggcgtagacctgctcccgggctaccaggacccttactcgggccgcactctgaccaagggcgaggtgggctgcttcctcagccattactccatctgggaagaggtggttgccaggggcctggcccgggtcctggtgtttgaggatgacgtgcgctttgagagcaacttcagggggcggctggagcggctgatggaggatgtggaggcagagaaactgtcttgggacctgatctacctcggacggaagcaggtgaaccctgagaaggagacggccgtggaggggctgccgggcctggtggtggctgggtactcctactggacgctggcctatgccctgcgtctggcgggtgcccgcaagctgctggcctcacagcctctgcgccgcatgctgcccgtggacgagttcctgcccatcatgttcgaccagcaccccaacgagcagtacaaggcacacttctggccacgggacctggtggccttctccgcccagcccctgctcgctgcccctacccactatgccggggacgccgagtggctcagtgacacggagacatcctctccatgggatgatgacagcggccgcctcatcagctggagcggctcccaaaagaccctgcgcaacccccgcctggacctgactggcagcaacgggcacaccctccaaccccagccccgagatgagctctaggtccaggtgatgactgcaaagcagcgtccaggagcaggccactactgcccagagagcagaggaggaggttgttggcagggactgcagatcctgtcagacctggccaccaccttgggcatggccactctgccctctggacctgtctttcatcgggagaaaccactcagagatggatcccattccctaaaggtctcacagcaaaggagcaggactcccaggcccctgtaccctgcctggcctgattcagagccttgtggcccccagcttctgtttcaagctgggcagaccccaggatcccttccctccctaaggactcagctgaggggcccctctgcccccttctacctccacctcagcaccctcccccagcttgatgtttgggtctccccagcaccctcctccctggccggtgcaaagtacagggaggtaaagcaggacccttgcagacctgttgcccagcacacagtaggccctcaataaaagccatttgcacttt

SEQ ID NO: 263080 - DNA, 1243 bp, Homo Sapiens
  misc_feature (119)..(119): n is a, c, g, or t
  misc_feature (220)..(220): n is a, c, g, or t
  misc_feature (587)..(662): n is a, c, g, or t
  misc_feature (695)..(728): n is a, c, g, or t
  misc_feature (848)..(857): n is a, c, g, or t
  misc_feature (909)..(909): n is a, c, g, or t
agcgagggggggaggataggagcaatggaggattgtctgggggcggctaacaggccagcagcggcggggagaggggtggaggaataggggcgggtaagcgacgcgtaatagtggggtanataatcggggtcaggggtaacagacggtagcgcggggtattcggaggagcctggacggtgggatagatgcggggagatcggaggggagggtcggagtcgtnatgagtgagcgagggttatgagtgtggcgcggcatagttgtgagggcggggtaaggttagattggggagacatgagcgtgagcgcatcggtgtcagcgtggaaactggtgagcgtggatatccgctcaatagtttatcgtgtaaggagcgtggtgatagcgggagaagtagagcgagcggcgggagacggtagtcgacacgatgagaacggtgtagaatagtgcgtaaatgtctggaggttcgagaagagaggttgccgaatcgcgacgcttggtcgagttcaatgccgggaaaacgcggcgcggagggagggggaaccggggagggtgggcgggaagaaatggggaaaagcggcgatcgggcaacnnnnnnnnnnnnnnnnnnnnnnnnnnnnnnnnnnnnnnnnnnnnnnnnnnnnnnnnnnnnnnnnnnnnnnnnnnnnacgggtaaagggagggcgggaggatataggtannnnnnnnnnnnnnnnnnnnnnnnnnnnnnnnnnacagggactaaggcgtaaggcggactgcgaaagaggaactaagggtcggtggaagggaggagggaagggagcgggttgcggatcgagtgagggggagagtgctgtgcgtgtagtcgtgtnnnnnnnnnncggcaaggccgcaccctcggtcccacggagtgaaatggacaagccccctaanagcgggcccagatgtaggagccaccgcctcctcttcctccggctcgggctcagcctcatccggctcgctctcatcgctgctggcgtaagcaaccagcgacatggcgcctcccgcgtttcgggcgcccttgccggcagatgaggcctacttgagaccggggatgcccggaggcctagtaggccccgccacctggcggggcggggaaccgaaaagtccgcctgctccgtactctagggctagccccggcagaaactcatggctacggctgatttccaccgaacaaggcgtacctcttcacttaagctcccctcgtgccgaattcgccacccaggcc

SEQ ID NO: 263081 - DNA, 1048 bp, Homo Sapiens
  misc_feature (830)..(830): n is a, c, g, or t
  misc_feature (855)..(855): n is a, c, g, or t
  misc_feature (962)..(970): n is a, c, g, or t
gctgggtggcgaattcggcacgagggcctgacggccgactccagccactacctgtgccacgaggtggctcccccacggctggtgatgagcatccgggatgggatccacggacccctgctggagccatttgtgcaggccaagctgcggcccgaggacggcctgtacctcattcactggagcaccagccacccctaccgcctgatcctcacagtggcccagcgtagccaggcaccagacggcatgcagagcttgcggctccgaaagttccccattgagcagcaggacggggccttcgtgctggagggctggggccggtccttccccagcgttcgggaacttggggctgccttgcagggctgcttgctgagggccggggatgactgcttctctctgcgtcgctgttgcctgccccaaccaggagaaacctccaatctcatcatcatgcggggggctcgggccagccccaggacactcaacctcagccagctcagcttccaccgggttgaccagaaggagatcacccagctgtcccacttgggccagggcacaaggaccaacgtgtatgagggccgcctgcgagtggagggcagcggggaccctgaggagggcaagatggatgacgaggaccccctcgtgcctggcagggaccgtgggcaggagctacgagtggtgctcaaagtgctggaccctagtcaccatgacatcgccctggccttctacgagacagccagcctcatgagccaggtctcccacacgcacctggccttcgtgcatggcgtctgtgtgcgccggccctgaaaatagcatggggacagagtacgtggagcacncacccctgggatgtgtggctgccgnagggagccggggccatgtgccccgggcttgggaaaatggtggggggccagcagcctgccagcgcccctccgctacctggaaaacaaaaaacctgggtcaggggaaannnnnnnnncccgggaactccctgttgaccccgggtgggggtttggaaaagggacccccgccctttcataagctgggagtaacccgg

SEQ ID NO: 263082 - DNA, 929 bp, Homo Sapiens
  misc_feature (875)..(875): n is a, c, g, or t
cctgggtggcgaattcggcacgaggccagcttctgtcttcaagtggctttacaggttttacaccgcaaacttccccagttttgcgctcacctctgcaatgctgtgattggctacctgagtactcgcggttcctcagtagatggcagtcccctactgctatttctccgagatcagacgagttccagactcctggagcaggtcctgctggtgttggagcccccaagactccagagcctctttgaggagcacttgcaggggcagctgcagaccctggctgcacatcccattgccaacttccctttgcagcgcttactggatgcagtcactacccctgagctgctgtcccctgtgtttgaggagctgagccctgtcttggaagctgtattggcccagggccacccaggggtagtcattgccctggtgggggcctgtcgcagagttggggcctaccaagccaaggtcctacagctcttgttggaggcattccactgtgcagagccctcatcccggcaagtggcctgtgtgcctctctttgccactttgatggcttatgaggtgtactatggactgacggaggaggagggggcagtgcctgcagagcaccaggtggcaatggccgcagccagagccttgggggatgtgacagtccttgggtctctactgctccagcatctgctgcacttctccactcctggtcttgtacttcgaagtctgggtgccttgacgggaccacagcttctgtcccttgcccaaagtcccgctggctctcatgtgctcgatgccatcctgaccagccccctctgtgacgcgcaagctgccccgcccgtgtgctgcaaaaacctaaaaggggacatattgtggctctgggcctgtantccgccatggcagcccgtgtggctaaatgcccttctggaagtgggagcaaccct

SEQ ID NO: 263083 - DNA, 1602 bp, Homo Sapiens
  misc_feature (1443)..(1443): n is a, c, g, or t
ggcctgggtggcgaattcggcacgaggcctgctgctgccccagctagagcaaggcctctttgatgacctttggagaatcaggttcagctctgttcagctccttggggatctcctgtttcacatctcaggagtcactgggaagatgaccacagaaactgcctctgaggatgataactttggaactgcccagtccaacaaggcgatcatcactgccctgggggtagagcggcggaaccgggtgttggcagggctgtacatgggccgctcagacacccagctggtggtgcggcaggcgtccctgcatgtctggaagattgttgtctccaataccccccgcaccttgcgtgagatcctacccactctctttgggctcctgctgggtttcctggccagcacgtgtgcagataagagaacgattgcagcgagaacattgggagatcttgtgcggaagttaggggagaaaatcctccccgagatcatccccatccttgaggaaggcctgaggtctcagaagagcgatgagaggcagggtgtgtgcattggcctaagtgagatcatgaagtccaccagccgggatgccgtgctgtatttctctgaatccctcgtgcccacggcaaggaaggctttgtgtgacccactggaggaggtcagagaggcggcagccaagactttcgagcagctgcattccaccatcggccaccaggctctggaggacattctcccatttttactaaagcagctggatgacgaggaggtgtcagagtttgccttggatggtctgaagcaagtcatggctattaagagtcgtgtggtgctgccctaccttgtgcccaagctgacaacgccacctgtcaacacccgggtgctggctttcctttcgtcagtggctggtgatgccctcacccgtcatcttggcgtgatcctcccagcggtcatgctggccctgaaggaaaagcttgggaccccagatgagcagctggagatggccaattgtcaggctgtgatcctctccgtagaggatgacacagggcaccggatcatcatcgaggatctgctggaggccacccgcagccctgaggtgggcatgaggcaagctgctgccatcattcctcaacatctactgttcccgctcaaaggctgactacaccagccacctgcgggagcctggtcctcgggcctgatccgcctcttcaatgactccagccctgtggttctggaggagagctgggatgccctaaatgccatccctacgaagctggatgctggcaaccagttggcactcattgaaaaactgcacaaggaaatcccggctcatagggaccgagaccaaggcccagcatgggcccaggattctgcccccccaagaaagggagtgacctcccatccttcccgctgttggcgggaagggagtcctgacctggcaccccctggccgcaaggaagngaggccgccaaagcccgagggcgtggaaatcccgcctgaactccggccgaccgccctaggcccatccctgaggaaggattactgggccgcccagaatcgcattcccgagggtaacgggtcccctcccaacacacacacggcggcccgccgtcccaaaca

SEQ ID NO: 263084 - DNA, 886 bp, Homo Sapiens
tttgcttttcccctagatttgactacatggatagttttagaagcttgagttcctaagataattccatagctacactggctcctacaatgtgactgagtgaggttagggaaatatccttggggattctgaacaactagacccttagaaacttaaaaataacaggtgctttcattaggatccttctaacatggaaaaaatacagccattgtccattaaaatacaatccaatttgggtactcttcaggttttctaagttctccatctgaataataagactaggccaccatcttttctggcaacccagcctacagccactgccatcttcctaactagcagcctcctaagctgcactaaaactgggattaacacaactgaagataacatttttgacctttcttcctagaagtcaaagggctcttcagggtaggaaaggtcaggaggttttgcatcaagcttgccttcacactcactattagtagaagggcggggaaatctacccatcacacacctgtattcagtgtttgagtgtacttacccatcaacacacaaggaagttagaggtaaattaacaagtcactctggaccaagcccctcaaaacagaggcaaatttggtgaaccaaggtcattcactgcctgtggtaaaaacctcagttcacctaagtcctttcctgaaaaaccacattaatctgattcaagaggcacctctggccagcacagagcacagaaggaaagcataacttcagggtaggggaatgccacatggaatttagaagttgcagtttagtctacagcaaaagatggcaccatcgctaatatttacagctggaaagagcgctggctggaccacactcctggagcatctttactaatgcagcttaacagccc

SEQ ID NO: 263085 - DNA, 708 bp, Homo Sapiens
gctgggtggcgatggccccagcgtcagccccgaccctagacccctcagttgcagctcccagcagcccagacagagctgccggcgcccctgcctgccccacatcccttcctgtcagggccacgcctggcacccatcccttggagcctgtgctggttctcccagctgctgtgggtgtgctggggccagggtgcactgctgaaacctggcctctctggccctaggccccagggtgacgtcggccccccactctgcagccttggcgggtgcctgggactgggtgtggaaggaaaggagctgaggccggggtgtagcaggcaggcagggccactccagtgcttctggagccctgagcagtcagggcctgggttgtctgagcagtggtggctctgtgccctccctggaggatgggatctgggagtctgagctccccgcatctggccctgggctgtgtggcacttgctgagcccaccttctcaagtgcttgctcctgtgagatggcatcggggagccccttccccaaggtgccacagatccaccctccagggagctgccagccctgtgttctggttcccaagggcaggatggacacacgtcacatccctaccacgtggcctccaaagggagccacggaggaaaggcttctgtggttgctaggtgggggagtcctgtgtgggagggcctgaagacccctgcttgtgcctggtcagg

SEQ ID NO: 263086 - DNA, 516 bp, Homo Sapiens
  misc_feature (13)..(13): n is a, c, g, or t
  misc_feature (23)..(23): n is a, c, g, or t
  misc_feature (482)..(482): n is a, c, g, or t
gaaattaaaacgnactcactaanggaaatttggcccctcgagccccaaaaatcggccacgagggtctgccagggcaacaacccctgaaagagaaacactgggccggaaccctcaagcatttcggtcggccatgaaagtcaaatcctcagcaggactgagaagggctctgcatcctgtcatctgggtattcccacaaacactctagaatcataattctctcttcagattgtttcaagttctcataaataaaaagtagttctttcatatttcccatttatttcctgtctgtagtgttcagtacagaagtgttttgctctaatgtgccgagttgtttttaattatacgccatgctgggtttcagacggtggagaactgcgtgtgcaccctgaggaacctgtcctatcggctggagctggaggtgccccaggcccggttactgggactgaacgaattggatgacttactaggaaaagagtctcccnagcaaagactctgagccaagttgctgggggaaga

SEQ ID NO: 263087 - DNA, 1020 bp, Homo Sapiens
tttggaaatctacaaaggacatccagccaacgaagtacccttacataccaaagaaataattatgctctgaacacaacagctacctacgcggagccctacaggcctatacaataccgagtgcaagagtgcaattataacaggcttcagcatgcagtgccggctgatgatggcaccacaagatccccatcaatagacagcattcagaaggaccccagggagtttgcctggcgtgatcctgagttgcctgaggtcattcacatgcttcagcaccagttcccatctgttcaggcaaatgcagcggcctacctgcagcacctgtgctttggtgacaacaaagtgaagatggaggtgtgtaggttagggggaatcaagcatctggttgaccttctggaccacagagttttggaagttcagaagaatgcttgtggtgcccttcgaaacctcgtttttggcaagtctacagatgaaaataaaatagcaatgaagaatgttggtgggatacctgccttgttgccgactgttgagaaaatctactgatgcagaagtaagggagcttgtaacaggagttctttggaatttatcctcatgtgatgctgtaaaaatgacaatcattcgagatgctctctcaaccttaacaaacactgtgattgttccacattctggatggaataactcttcttttgatgatgatcataaaattaaatttcagacttcactagttctgcgtaacacaacaggttgcctaaggaacctcagctctgcgggggaagaagctcggaagcaaatgcggtcctgcgaggggctggtagactcactgttgtatgtgatccacacgtgtgtgaacacatccgattacgacagcaagacggtggagaactgcgtgtgcaccctgaggaacctgtctatcggctggagctggaggtccccaggcccggttactgggactgaacgaattggatgacttactaggaaaagagtctcccagcaaagactctgagccaagttgctgggggaagaaga

SEQ ID NO: 263088 - DNA, 1099 bp, Homo Sapiens
  misc_feature (39)..(39): n is a, c, g, or t
  misc_feature (77)..(85): n is a, c, g, or t
tggggggcttccccccctgtggcgcccgccaccaagggnggttcccggagcaaaggggcccctctttctttaaggtnnnnnnnnngggggaggcccattggggtgggcagggaacccgcttcgggattgttgggagaagaagggtcccagagctggcccccaccatccaggggcgtagaggctggaactgcccttggcctgggaagggggccgagtggggggccggagccgtggacgtgctccagggagaactgccggcctatacttgggcatggaatgtgctgagccactgtcgttcagcatcagggggatctttctcttcacccccaggatccggtttgactgcaccagtgagatcaggaactgaatgagcttgttgacgactttctgttgctgggcatgcttctgccgaaggctggccacctcccgccacagagcctcattctcatgcttcattggccaggagcttggagtccatccactcctgcttccccttcatcagctgcacgtccgtcagcagcttggtgacgctgtcctggcggatctttatgtcttcactcttcagggtggacacactggtcactttcctcttgatgttctcaaggagctgctcctggccacgcaggaagcatgggtgctggaactccgtgtcgtctctctctggcttgaccaggccgccctgctcgatgtggaccactttccggaagccatacatgttgagctgccgcacgaagctggccatgttgttgtgcttgaagtacttgggcagcacctccttggcaaactggccctggtcgaacacgtggaagctgttcccgctcgggctccagcagatgagcgcgtcggtgtccgggtcgctcacgagggtccacagcttggtcaggaaggccgggacgttgctgggccccgccgcgccggggcccacgggcagatccatctcgagcaaggagggaataggcggagggagcggccgcaaagaggggccgagggccgggctaacgccgtcgccgcgccagccttccgggccgcgccgccgcccgctgcgcacacacagccccggggcccagcatggccgccgccatcttgcaacgggcgcccc

SEQ ID NO: 263089 - DNA, 1243 bp, Homo Sapiens
aagcaggctggtacggtccggaagttcgggatatcgtcgacccacgcgtcggaccacgcgtcggaatcagtacatccagcaaataagcctatgctcccaatttcagtgcccccttaccattgggccctttagcacatgttgaaaacagccctacttctgctcatgccttctggggaggatctgtgtttcatctcagtcaacaccagaatctatgctatcaggaaaatcctcatattgccaaattcagatcctttacatcagtctgatacttccaaagctccaggttttagaccaccattacagagacctgctccaagtccctcaggtattgtcaatatggactcgccatatggttctgtaacaccttcttcaacacatttgggaaactttgcttcaaacatttcaggaggtcagatgtacggacctggggcaccccttggaggagcacccgcagctgctaactttaacagacaacatttttccccgcttagtttgttgactccgtgttcatcagcatcaaatgattcttctgcacagtcagtatcctcgggagttcgtgcaccatctcctggccccatcatcagtaccgttagggtcagaaaagcccagcaatgtgtctcaggacaggaaagttccagtccctattgggactgaacgttctgcacgtatcaggcaaactggaacgtcagctccatctgttattgggagcaatgtgtctacatcagtaggacatagtggcatctggtcctttgaagggattggtggcaatcaagacaaagtagactggtgtaaccctgggatgggaaatcctatgatccacagaccgatgtctgacccaggagtattttcacaacatcaagcaatggagcgagatagtacaggaattgtaactccttctggtacattccatcagcatgttcctgcaggctacatggactttcctaaagttgggggtatgcctttttctgtgtatgggaatgcaatgattcctccagtagcacctatccctgatggtgctggaggacccatatttaatggccctcatgctgcagacccttcttggaactcactgataaagatggtttccagctccacggaaaataatggccctcaaacggtgtggactggaccctgggcacctcacatgaacagtgtgcatatgaaccagcttggctgatgaggatcagcttgttagcctgcagattccttttcatttggaggaaatcacaagtggccgaaaaaa

SEQ ID NO: 263090 - DNA, 750 bp, Homo Sapiens
  misc_feature (593)..(593): n is a, c, g, or t
aggtagcgaggcctgggtggcgaattcggcacgaggcaccaggaacgcgcctatgagtacgtggagtgtcccattaggggcactgcggctgagaataaggagaacctagatccttcaaatctgatgccaccaccaaatcaaacaccagctccagatcagccatttgcattgtctactgtcagagaagagtcatccattccgagagcagattcagagaaaaagtgggtttacccttctgagcagatgttctggaatgcaatgttaaagaaagggtggaagtggaaggatgaggatatcagtcagaaggatatgtataatatcattagaattcacaatcagaataacgagcaggcttggaaggagattttgaagtgggaagcccttcatgctgcagagtgtccttgtggtccatcattgatccggtttggagggaaagcaaaagagtattcaccaagggcacgaattcgttcctggatggggtatgagttgccttttgataggcacgattggatcataaaccgttgcgggacagaagttagatatgtgattgattattatgatgggtgggtgaagtcaacaaggactaccagttncaccatcctggacgtccgtcctgccttagattcactttcggcagtatgggacagaatgaaagtcgcttggtggcgttggacctcgtaaagcactgtttcacatggaaaaatataaactattttttttctgagcgatacattaaactattttccccag

SEQ ID NO: 263091 - DNA, 1145 bp, Homo Sapiens
  misc_feature (62)..(86): n is a, c, g, or t
gggggggtgcgtgagaacgccggcggtgaccgcagccacagcggtgaccgagtgagaggaannnnnnnnnnnnnnnnnnnnnnnnntgaagtcactgctgctctgggttcgggttggcgactgaaggcggtaccggcctcccggaacagcccgggggagggcttaggtgcagaagggcaggctggccgcggccggtttggtctggggaccacgggctggagcaggtggaaatttaaaattgtttacagtcaacactgtttccagccatgggtttgtctccatctgctcctgctgttgcagttcaggcctcaaatgcttcagcgtccccaccttcaggatgcccgatgcatgaagggaaaatgaaaggctgtccagtgaatacagagccatctggcccaacctgtgagaagaaaacatactctgtgcctgcccaccaggaacgcgcctatgagtacgtggagtgtcccattaggggcactgcggctgagaataaggagaaccctagatccttcaaatctgatgccaccaccaaatcaaacaccagctccagatcagccatttgcattgtctactgtcagagaagagtcatccattccgagagcagattcagagaaaaagtgggtttacccttctgagcagatgttctggaatgcaatgttaaagaaagggtggaagtggaaggatgaggatatcagtcagaaggatatgtataatatcattagaattcacaatcagaataacgagcaggcttggaaggagattttgaagtgggaagcccttcatgctgcagagtgtccttgtggtccatcattgatccggtttggagggaaagcaaaagagtattcaccaagggcacgaattcgttcctggatggggtatgagttgccttttgataggcacgattggatcataaaccgttgcgggacagaagttagatatgtgattgattattatgatggtggtgaagtcaacaaggactaccagttcaccatcctgtgacgtccgtcctgccttagattcactttcggcagtatgggacagaatgaaagtcgcttggtggcgttggacctcgtaaagcactgtttcagatggaaaaatataaactatttttttctgagcgatacattaaactattttccccagaa

SEQ ID NO: 263092 - DNA, 1008 bp, Homo Sapiens
  misc_feature (951)..(961): n is a, c, g, or t
gctgggtggcgaattcgacacgaggctacggtgtgcacgcctgcgagggctgcaagggctttttccgtcggagcatccagcagaacatccagtacaaaaggtgtctgaagaatgagaattgctccatcgtccgcatcaatcgcaaccgctgccagcaatgtcgcttcaagaagtgtctctctgtgggcatgtctcgagacgctgtgcgttttgggcgcatccccaaacgagagaagcagcggatgcttgctgagatgcagagtgccatgaacctggccaacaaccagttgagcagccagtgcccgctggagacttcacccacccagcaccccaccccaggccccatgggcccctcgccacacccctggtctcgggcccctcacccctggtgggccttctcccagtttccacaacagctgacgcctcccagatccccaagccctgagcccacagtggaggatgtgatatcccaggtggcccgggcccatcgagagatcttcacctacgcccatgacaagctgggcagctcacctggcaacttcaatgccaaccatgcatcaggtagccctccagccaccaccccacatcgctgggaaaatcagggctgcccacctgcccccaatgacaacaacaccttggctgcccagcgtcataacgaggccctaaatggtctgcgccaggctccctcctcctaccctcccacctggcctcctggccctgcacaccacagctgccaccagtccaacagcaacgggcaccgtctatgccccacccacgtgtatgccagccccagaaggcaaggcacctgccaacagtcccccggaggggaactccaaagaatgtctgctgggatggccctaggacatggaacccgcatggacccaatgggggaaaggggccagaaaaactgggaagggtttctccctgaagcttcccgccccgctgtggccnnnnnnnnnnnaaaaattttggccaaaacacatccggggggtttcccggagccctttt

SEQ ID NO: 263093 - DNA, 1179 bp, Homo Sapiens
  misc_feature (57)..(57): n is a, c, g, or t
  misc_feature (546)..(605): n is a, c, g, or t
  misc_feature (1139)..(1139): n is a, c, g, or t
acggagcgaggcctgggtggcgaattcggcacgaggatgacacggaggtggactcgntgagtggtaccaacaaactcatgagcagcagcaacaactgaatgtcctggtcctggctagcagcagcaccgtggtgatgcaggatgagtccttccctgcctgcaagattgagttctgaaagagccgccctcccttccccaaggatccactcccccagctcctttagagaatggctactgctgagtcctttggggttgagggagatgggagctagggggaggggagggagatgtcttgttgtggggacttgggctgggctaaatgggaggggttgtccctcgccctgggcgagtcggggaggtgcggctcgagagggtaggtgagggggggccgcgcacggtgactcgaagagcgggaagcaccgtggtaagagagggaggtgcgtgcgagccccccacccgggggctgcatggagcggtgaggcccggcgagccgtcccggcgcaggagatcccgggccgtgcgtggggaaggtgcgacgcctgagcgnnnnnnnnnnnnnnnnnnnnnnnnnnnnnnnnnnnnnnnnnnnnnnnnnnnnnnnnnnnnaggagcgcgacctcaagaagggggagcgaggaataggggggcggcgatcgaggagggagggctgatcgcgtgcgccggagccgcgggtgcccactagaggtgggccagggccgtagagggcagcacggcgggcggcgcagagcgcgtgtaaaggcgctatcgacgagtggcggctgacagggctgccggtggcgcgcccgcctaaggcggggtggaacgaaggagagagtgcgcccgcggccggatgccagccgcgagatgggcgcgcgcggaacagcagagactggaggcgagagaggacgcggaaggaggcggtcgtcgcggctgggaggggagaaggtagcgagcaccggaactggcaacgaattgggtgcgccggtctggcggagtacgcgggctcggcgcacaacgcccacgacacggaagctacggcgagagcaaggccaagtagcgagacggacgccgcgtaacatacgggcagacgaccgtggcgcaaagtcagaagctcggcgaaaggcgtgagcggcgcacgcnacggtccgagagagagcaagggctgcgcccgcgacgcgag

SEQ ID NO: 263094 - DNA, 1065 bp, Homo Sapiens
  misc_feature (43)..(68): n is a, c, g, or t
  misc_feature (126)..(153): n is a, c, g, or t
  misc_feature (286)..(302): n is a, c, g, or t
  misc_feature (340)..(385): n is a, c, g, or t
  misc_feature (406)..(467): n is a, c, g, or t
ggggggaggcaaaaagaaagcccaggcgggagatgggtagcannnnnnnnnnnnnnnnnnnnnnnnnnacggtctattgcgagtggcggcggcggcggatatagtgactcaacagaaaggcgtgannnnnnnnnnnnnnnnnnnnnnnnnnnncgacgccggagaagagggtcgggtgcagagcaatgagtggcgagtgggtgacgggggggcggaggggtgcggggtgtcattgggaacaataggagtaaccggaagggagcggtgcgaggcgtggggagtgccnnnnnnnnnnnnnnnnncggacgtggcgggtcataaagggggatggtggacggcnnnnnnnnnnnnnnnnnnnnnnnnnnnnnnnnnnnnnnnnnnnnnncgagaaaagtttggtccaatnnnnnnnnnnnnnnnnnnnnnnnnnnnnnnnnnnnnnnnnnnnnnnnnnnnnnnnnnnnnnnagagaaacgtcgcgttggcccccccgggcccccgagccgcacttcagatttcgcagagcatcctccagatcagccagttcttcatcccggagccggtcgggctgctgggctaggatgcaactcaaacagcgctcctcgtccgccagcaaagcgtccagccgctcggcgccggcgcgcagctccagttgcagcggcaccgagtgctgggcgagcgcggccgccaggctcctctgcagcgcggcgcgcagcgccccctcgcggtaggcgcggaggaagcggccacagggctgccgcccgcagaatcgcagctgcacgatcagctgcgggtcgctgcggtggatcttcagcatctgcagcacgtccgggctcccgccgctctctgccaaggcagcctgcagagccctgtacactgccaccttctgctgggggtgcgcgtaggcatccgacaggaccaccttgtccagcgaggactccacaaacaggtatgcgctgcccacccactcttcgtgcccattttgcccagctgccatctcacctcctggccgcctcggcggggcctgggcctcgtgccgaattcgccacccaggcctcgctactt

SEQ ID NO: 263095 - DNA, 1061 bp, Homo Sapiens
  misc_feature (472)..(695): n is a, c, g, or t
  misc_feature (740)..(864): n is a, c, g, or t
aaggtagcgaggcctgggtggcgaattcggcacgagggggacgcgggcgagcaggccccgctgaaccctgagggcgagagccctgcaggctcggccacgtaccgggagttcgtgcaccgcggctacctggacctcatgggggccagtcagcactcgctgcgggcgctcagctggcgccgcctctacctcagccgggccaagctcaaagcttccagccgcacgtctgccttgctctcgggcttcgccatggaggccatggaggaagggttcatgcacactgtactgtaatagagctgagcaacgcgggcgagccattgtgctctgacctgcacgctcctcatctgtcacatcgttacagacaagacctccctgggaccgttctgactgtcttacaccctgaggcatccacaccaccccaaagcctcctctgtgcccccaccccgcatacaccgcctctccggggaacctggcnnnnnnnnnnnnnnnnnnnnnnnnnnnnnnnnnnnnnnnnnnnnnnnnnnnnnnnnnnnnnnnnnnnnnnnnnnnnnnnnnnnnnnnnnnnnnnnnnnnnnnnnnnnnnnnnnnnnnnnnnnnnnnnnnnnnnnnnnnnnnnnnnnnnnnnnnnnnnnnnnnnnnnnnnnnnnnnnnnnnnnnnnnnnnnnnnnnnnnnnnnnnnnnnnnnnnnnnnnnnnnnnttttttccgcccccccgcaccctctcgatcctggccacccgtccnnnnnnnnnnnnnnnnnnnnnnnnnnnnnnnnnnnnnnnnnnnnnnnnnnnnnnnnnnnnnnnnnnnnnnnnnnnnnnnnnnnnnnnnnnnnnnnnnnnnnnnnnnnnnnnnnnnnnnnnnnnnncacccacctttcttccagtttgggagatgacgcgcgcgccagccgtccccccggcaccttacgcgtctatcaccctatcacccacaccgcccataacaccccacacccctgattcgcccatcctccgcccgtcaggttaagccctgccacgtgtttcttacgcccccacgcccgcgcgcctagtaaatttcgccccc

SEQ ID NO: 263096 - DNA, 760 bp, Homo Sapiens
ttgaatcgaacccgccgcaaaaagaaagcaaatgaccacacgccagggtggcgaattcggcacgaggccctgatcagcgcactttgccctctcataacgtctatttattcgtctgtataatggaataatagtggctgctgttaaatgaattaaatacgacggcgtttggagggaaacattactactccagttttacagataaggaaactgatgatcaggtgcttgaagtgacttccgaagatcaggaagacagcatatggcagggacaggaacccacgcctacgccccagcctctttttaccgaaccttgttcttcaggaagtggttaaaacacctgggctactcccagcaaaacgccagtcacgcagtcctgaaacaggtcctctaaggtgcccagcccaacacaggctgggcgtgctgagccaacagaatgtttgttcctctgtcccttcctagaaccccaagtcacctttctccagccagttaaaaacgttacttttaactaggatgacgtttcaatttatcggccatatccaagcatttctgagaatgaactgtgagacatgctattaataaattaaccatgaacagcaggttcaaacctggatggatagtcatcctacttataactgaaagtatccttaaatatctttagaaatccggatgagccccacttactttgccaaccgaggtcaataaaactgacctgaaatatgaagtaattatgtagggctaatttcctttttttcttctacaagag

SEQ ID NO: 263097 - DNA, 1008 bp, Homo Sapiens
  misc_feature (452)..(460): n is a, c, g, or t
aaggagcgaggcctgggtggcgaattcggcacgaggcatggcctgagtcagaagagctaccccaggtgaaactggaagtgcatgaggcagagcgtctgtagcatttccagtttgttctgtataggaacagaggtgcctccgggaaggaggcagcgaggtaggtagctatgataggcacctaatgcttctcaaggacttattttttccttcttgaagactagtagtaacatcttatgatttagagtaagttgattgtaaccataggtatttattgattggaggaagggagggtcatattattttcggctttatttatgtaacatttgctagcttgtaaaaggcgaatgtgaaatattgcatctgcattttccaaggctgattcgtgtagctacccttgccacagttgtgacggatgtatggatgtccttgaacatttcagaaggagtggtagnnnnnnnnncacattcagccaaccacttatatgaattgaatgtatcagaagtgtactgaagggactggagatggttttcctcagatgagggggccccaaaattgatagtgcacatctgcacgctttctgcgaggcctcagaacttttcccagggcccctccctcaaattgtctccatgggaaacttgacccagtggcaagttgcactttgggtgatcttggtggtctacacaccccgttctgcgggagaggccatttacctaaagctgtggaatccccccgccggactacactcccgcccgcacgccctaacccacgctggccgtggcaaccggcacaaggcccctgttcctccggagtaacgggccgccctgagaccctcgcctttctaggctgcacgctctgtgcacaccggggtcttctctcggcttatccgtcaggcagaactacccataaggccccccccgaacccgtgcaccaagttggcgccgcgctggggggctgcgctaccgaaccgcgacagaaagagacggcctagccgacgtgcccccccgcaag

SEQ ID NO: 263098 - DNA, 967 bp, Homo Sapiens
  misc_feature (778)..(792): n is a, c, g, or t
tcggcacgaggccgaggcccacgtgaacacctgctacaagcacttctactatttcgtcaaggagttcggcctcatcgacaccaaggagctggagccactgaaagaaatgaccgcccggatgtgccactgagagccccgcgggtctcccggtgcccgaaccgccgctggggcctcggagacttggaggaggacgctctggaaccatcatcccgcttctctccggcctgagcatctcagggagaccaggggccgagccgctgagcaggtgttggtcctcaggagctccaaccccggacggcagatgccttcctcagtctcgagcctcagtctcccgtctgggactaaaacgtgaactctgtaattctatgtgttactagcaaccggaaaagcccactgtgtttttaaaccacttccactttccaggaggctggatggcttccagggtcactccttgccctgggtggctcccaggctcctggaacttctgcctccacctcgctggggagcccccagggctgctgtggccacagccctgcctgggcctgtctctcaagggcacccagcttgctcggcctcctacatgtctcccgttggggaggcaagaggctgaggggcttccgagcccctgagagcggacatctcctcccgcaggcctttactccgcactccccactggcaagcccgctgggtgtcttcttcacacagaaggcacaacctggaacccagggcagccctctttccccccctcccccaatctcttcccatttttctaccaaannnnnnnnnnnnnnngggccataacaaaaaaacggggggcctcccttgaaactcctggggcctccagggaaccctccaatccctcgggccctcccaaagtggctggaaatcccacggggggtggacccccgggaacccccggcccttcctttttttcctctaaaggaaacctcggttttctttccggtta

SEQ ID NO: 263099 - DNA, 1132 bp, Homo Sapiens
  misc_feature (878)..(944): n is a, c, g, or t
  misc_feature (971)..(971): n is a, c, g, or t
  misc_feature (1111)..(1111): n is a, c, g, or t
gacagcgacacagcagacaagttcctgcagctgtttggaaccaaaggtgtcaagagggtgctgtgtcctatcaactaccccttgtcgcccacccgcttcacccattgtgagcaggtgctgggcgagggtgccctggaccgaggcacctactactgggaggtggagattatcgagggctgggtcagcatgggggtcatggccgaagacttctccccacaagagccctacgaccgcggccggctgggccgcaacgcccactcctgctgcctgcagtggaatggacgcagcttctccgtctggtttcatgggctggaggctcccctgccccaccccttctcgcccacggttggggtctgcctggaatacgctgaccgtgccttggccttctatgctgtacgggacggcaagatgagcctcctgcggaggctgaaggcctcccggccccgccggggtggcatcccggcctcccccattgaccccttccagagccgcctggacagtcactttgcggggctcttcacccacagactcaagcctgccttcttcctggagagtgtggacgcccacttgcagatcgggcccctcaagaagtcctgcatatccgtgctgaagaggaggtgatgccgggcacgggcgctcctgctgccgtctctgctccaggaagctgcctcctctgggccctctccttcgtctgggaaggcaccagcatgagtcccacacacccagccttctcatttctagaggcttccacctttttatacactcagccttccctctcccaggcaggaggacccccagaccctgttcccctgcagacctcacttctgggagacagagctacagctgggacagctccaagctaccctaacccctccttnnnnnnnnnnnnnnnnnnnnnnnnnnnnnnnnnnnnnnnnnnnnnnnnnnnnnnnnnnnnnnnnnnncaaaacacgaaagaagacacggaaagnaagacaaacaagcgacggaaactctccgggcggagcggcaccaggtagctcggccgggtataggcgcggggcgcggagaaaaagacatcaagagagcgcacagggcccacaatctgttctcggagccccgctttcctcgnaagaaagaggaaaatagccgc

SEQ ID NO: 263100 - DNA, 813 bp, Homo Sapiens
ggcctgggtggcgaattcggcacgaggatgaaactgacctgtgaacgctgtagccgaaacttctgcatcaagcaccggcatccactggaccatgattgctctggggaggggcacccaaccagccgggcaggacttgctgccatctccagagcacaagctgtggcttctacaagcactgtccccagcccaagtcaaaccatgccttcctgtacctctcccagcagagccacaacccgatctccgtcctggacagcccctccagtgattgctttgcagaatggcctgagtgaggatgaagctctgcagcgggccctggaaatgtccctggcagaaaccaaaccccaggttccaagttgtcaggaggaagaagacctagctttagcacaagcactgtcagccagtgaggcagaataccagcggcagcaggcccagagccgcagctcgaagccgtccaactgcagcctgtgctagggccctgggcttggggagggaggttcacctgaggaggactgtggccctcacacctctagggtacacagggagaggaggcccggagcaccctggagggcagagacaagcgggagtgatgtggaggtcgccctgggagcctctggaaggccttgctagtgctccagctgcatggaagagagcggctagcaactgttccctggttgggccctcagtggatgctggccaggccctactcttagccccttcatcatgtcatctcccttatgctggagctgccccgatgtggagtgggcaggaaggggcctggaaaaaataaaggatcttggcagttgataaaacgta

SEQ ID NO: 263101 - DNA, 382 bp, Homo Sapiens
  misc_feature (104)..(104): n is a, c, g, or t
  misc_feature (110)..(111): n is a, c, g, or t
  misc_feature (115)..(115): n is a, c, g, or t
  misc_feature (128)..(128): n is a, c, g, or t
  misc_feature (220)..(220): n is a, c, g, or t
  misc_feature (278)..(278): n is a, c, g, or t
  misc_feature (330)..(330): n is a, c, g, or t
  misc_feature (347)..(347): n is a, c, g, or t
  misc_feature (370)..(370): n is a, c, g, or t
agaatggcctgattgaggatgaagctctgcagcgggccctggaaatgtccctggcagaaaccaaaccccaggttccaaggtaccttaccctcttatgaaagagngcgcanngtangagcaagggcttngtctggaggcaggtaggtaggaccactctgacacaatgcaagataatcgctggcaacttggtctcaaaattaagatggactatatgatcttngacaagttatttaacccatggagccttcatttcctctataaaacggggacaatactantacccaccttgtagtgttgctatgaagattgagataattcctcagacagtgntacaggcccgattgagngcccaacacacacagatcagatnttgcaaatttgc

SEQ ID NO: 263102 - DNA, 1216 bp, Homo Sapiens
  misc_feature (133)..(143): n is a, c, g, or t
  misc_feature (553)..(593): n is a, c, g, or t
  misc_feature (805)..(868): n is a, c, g, or t
  misc_feature (1032)..(1032): n is a, c, g, or t
  misc_feature (1108)..(1108): n is a, c, g, or t
  misc_feature (1151)..(1151): n is a, c, g, or t
cgaagacagaatactccgcccctggtgagagagggtggtttatttattgtttttgccaaagccaaccgaggtttttctttcccaagataaaaaaagggattctccaggaaaaagatcctgttggggatccccnnnnnnnnnnngcccccgctccatttagggccgggtgttaaattttcccgggggtacggccaggccgatttcatttaaaggcagggttaaccctgggcttattcgaaaatttatttcggactccctatatggggagaaaccgggcaagatatttcccacctttgtacaaagaaaagttggggtcaggaaaacaggctaatggaccatggtcccatttcattttcctcttttttccgcaccccgaccataagaaggcttggagtttgttgtgtgatattgggggtggtgttccagtttttgacacctttttaatagaaatcactggtttttagggaaacaaatagcacttttgtaatttttttgtacaatgtttcttaccttgatcttaatttaagtaacactaggaagaccctcaatatcnnnnnnnnnnnnnnnnnnnnnnnnnnnnnnnnnnnnnnnnnccccagatacaaagatttttgcccttgcataaaaaaacagtgcccgaacgatgacacaaggactcacaaagactcacgggacctcactgacactatgattcctactctaccatgcaaggtcttggctacccttaattggactgtcagcctgaaaaacagcttttctattccttattttagtttttgttaccaagaaagtaaaatgaacagtnnnnnnnnnnnnnnnnnnnnnnnnnnnnnnnnnnnnnnnnnnnnnnnnnnnnnnnnnnnnnnnngtctccattcaattcacacacacctgggtcgcgtgctgcttcactcaagatcttctcttcttataaatatagaaaagggatggagcttgttttcaagtaaaatcactgatccacctttttttccttcctggacacacacatccttcttccctgccttgggccanagccagtggcccgggctctgcttgttcttggagaggagacagcgggataaccacggagatgcgcgactcaccaagnagggaaggaaggagactgggcaggcttcatggagtggtggggntaccgcgcaagggagcagagtgcatggggagaagaacctactggctgttcttggtgtcagtctga

SEQ ID NO: 263103 - DNA, 1198 bp, Homo Sapiens
  misc_feature (42)..(42): n is a, c, g, or t
ggcgaattcggcacgagggtctgcaggtgggccaaggccctngggagatcccatacgacggttggataaatgagggtacctgtgcacccagataggacaatctgttgtagcattggagtaattaaagcagtatggtgctataacaagacagatgggcagagcagggtagaatgcaaggaacaaaaattttcgtatgtgaaaaaggtggcattacgattaggagggagtgagggccaagtcagcaaattattctggagcagttgattagcccttgttctctcacgccatacgtgaaaacttaattctgcatggaatcagcgtcagcgacagacatccatgggggcctgtgtgcaccatcttaggtggagaaatgagcagcaacaatggatggaatggaccctgggctagatagaatctggcagtctatgtggcagaaatcagcaaaaacacgattgtaaaagcaaacaagtaattagagaaatcacgtgctgtcaggtcttggaatcaattagaaagagatgactagccagatggaattgcagcccaatcatgtgaacaggcaaaccgcaaaaaataaataaaattaccaataaatacatgaaaaattataatgttgttagtagttaaaatgcgaattaaaatacatggctgttttccctaccagacaagcaaagagtaaattaaaatagtagcccaggcttgcctgccagctggcagggaggtgtggctgccagggccttagaggttggcatcaggctgcccaccccagtcactgccagagcctcccacctgagtgttcctcccggcactggaagccagtggccgtccagaggaacgtgattgaattgctgtatatccatctggtggagcactgctgtgtgtctgttaaaaaagaaaccataggtttttagggatatgtaatgatatttagaaagggtttaagagacagtaaagcttggcagaataaaccgtgtatacagaatggatgtttgcttgcataaataaatttatataaatatgtctgggggataaaaataagtatatcacaatgctaagacaggcatatggggaatttaagcttttctttatacttgtccatagtttccaatttttaaatttgtaattttttatcagaaaaataaatgtgtaaatatagtggaatctttattaaaacattcacttttatttgctatttcag

SEQ ID NO: 263104 - DNA, 1132 bp, Homo Sapiens
  misc_feature (1040)..(1040): n is a, c, g, or t
  misc_feature (1059)..(1059): n is a, c, g, or t
  misc_feature (1064)..(1064): n is a, c, g, or t
  misc_feature (1086)..(1086): n is a, c, g, or t
  misc_feature (1101)..(1101): n is a, c, g, or t
  misc_feature (1120)..(1120): n is a, c, g, or t
gggtggcgaattcggcacgaggctagcaccatcccctcactacttcgcggccgccatgtcgtttgcgccgcagaaaccggcagtggcaagactctcagctacctcctgccgctgcttcaacggctcttgggccagccaagcctggactcccttcctatccccgcgccccgaggcctggtccttgttccttcccgagaattggcccaacaggtgcgggctgtggcccaacccttgggccgctccttgggcctgctggtgcgggacctggagggaggccacggcatgcgtaggatcaggctgcagctgtccagacagccttcagcagatgtgcttgtggccactccaggggctctgtggaaggccctgaaaagtcgactgatcagtctggagcaactctccttcttggtgttggatgaggcagacacactgctggatgaaagcttcctggaactggtggactacatcttagagaagagccacatagcagaaggcccagctgacttggaagaccccttcaatcccaaagctcagttagtgctggtaggagccacatttcccgaaggtgtaggccagttgctgaataaagtcgccagcccagatgctgtcaccaccatcaccagctccaagctccactgtatcatgcctcatgtgaaacagacatttctgagactgaagggagcagataaggtggccgagctggtgcacatccctcagcatcgtgacagagcagaaaggactggtccctcaggaactgttctggtgttctgtaatagctccagcactgtgaactggctgggatatattctggatgaccacaaaatccaacacctaaggttgcaggggcaaatgccagccttgatgagggtaggaatcttccagtccttccagaagagctcccgagacatacttcttctgcacagacatagcctcttcggggcctgggacagcactggtgtgggagctggttgttcaattattgatttccccccaacgcttgcaagattaacattccacagagcaggggagagtggggccgtgtnggggagcgaggtgccaggnccttncattcagtttttgttgaccccntccctggggatgttngagcctgggtttcagaagnttgagcttggcg

SEQ ID NO: 263105 - DNA, 1057 bp, Homo Sapiens
  misc_feature (658)..(658): n is a, c, g, or t
  misc_feature (660)..(667): n is a, c, g, or t
  misc_feature (669)..(669): n is a, c, g, or t
  misc_feature (672)..(674): n is a, c, g, or t
  misc_feature (678)..(720): n is a, c, g, or t
  misc_feature (783)..(783): n is a, c, g, or t
gggaggtggcggaggagagcccggagctgctgaaccctgagcccaggagacttgagcccagagttgaggctactgccctatatgatcactctgggcgacgccgtgcacaacttcgccgacgggctggccgtgggcgccgccttcgcgtcctcctggaagaccgggctggccacctcgctggccgtgttctgccacgagttgccacacgagctgggggacttcgccgccttgctgcacgcggggctgtccgtgcgccaagcactgctgctgaacctggcctccgcgctcacggccttcgctggtctctacgtggcactcgcggttggagtcagcgaggagagcgaggcctggatcctggcagtggccaccggcctgttcctctacgtagcactctgcgacatgctcccggcgatgttgaaagtacgggacccgcggccctggctcctcttcctgctgcacaacgtgggcctgctgggcggctggaccgtcctgctgctgctgtccctgtacgaggatgacatcaccttctgataccctgccctagtcccccacctttgacttaagatcccacacctcacaaacctacagcccagaaaccagaagcccctatagaggccccagtcccaactccagtaaagacactcttgtccttgggaanannnnnnnnanaannnaaannnnnnnnnnnnnnnnnnnnnnnnnnnnnnnnnnnnnnnnnnncctggccggccccccccggccccccagaagcttttcaaacccttccgtttgggccgggggccncccgagggaagggagactgggctcatacctggtttctatgaaaaacccttgggtccgtactaaagcggttggaattctcccccaaaataaaaaaggcccgcgcgggaaacccgagggtttttttcaacaatttcccggctggggtgctcttaggcgtcttttcctggtactcaggagcagaagcaaatattccccctgtcatcatgtgattacttcatgacacaaggaactatcggcactgctatcgagagtctcgacgaactcaccgccagag

SEQ ID NO: 263106 - DNA, 1245 bp, Homo Sapiens
ccctatgaatgtagtgagtgtgggaaagccttcaggtacagctcggctcttgttcgccatcagagaattcacactggagagaagccttttaatgggatcggcatgagcaaaagctccctcagagttacgaccgagttaaatatcagagagtccacgtgaaagagccacacacccattttcctcactttccctgagtctcaagagctcttgccttaccctataaatctcaacagcttaggatgtgtccctttcaactcagacttttcattttagagaatggggcagatggggcaaatcgttgaattttcccagaaatcacaccagccttagaaagcgtcaaggcaagtgggatgggcgtgctggggaatagaaagcagctctgggaccagttaccccatttaggaaaggagtttgcactaaactgtttttctcacagcagaggaacctttccaaggtggggatggaagcacagtcgggacagaattcgatggattcctttagttggagtccgcgtagtcagcacagacagcagtggaaaggacgctctgggtcctgttatttgctagggagggtaaagggagactatttcaaagctactgttcctagtccagctttaagtttcggtaagaaacatgctgttttgtttcatgatttcgttaattatggaaatttggcattgagggattattttattgagggtagaagagattccagaatcatcatctgtgatgatggtgtcctttagggctcttggagcagccagaccatgtttccaagagaaacctggtgatattgccagcagaccccctgccatcccccccagttgtcctggggctgaatgggcaaatctgtccaaacagctagtaaccggctgtgagggagagggtcagaagcacttagcgttggcctctgattgctgtcctctcttgtcctcttcccactccaatgatgaaaatgattttctctaaatgcctgggtaaggatgctttcaaggagctcacttggcctgcttgccctgccctctcacctctgacacccagccccaggagccagaccactcctgcctccacctctgactcttcagcagctgaagattaatgcagagaaagagcaaagcccaaaagggagaaaacacaaacctataaaacataataaacgaagcccatagaaggcaggctgtgcctggagcctggtagccagagctcgttgcttgggtgaaggattggacctccccgaagtttccca

SEQ ID NO: 263107 - DNA, 640 bp, Homo Sapiens
tgggtggcgaattcggcacgaggcggcggcggtcatgcgggacgcggatgcagacgcaggcggaggcgctgacggcggggatggccggggtggccacagctgccgcgggggcgtggacacagccgcagctccggccggtggagctcccccagcgcacggccaggtccgggcagagacgccgcgtctgcgaccagggggtcacgaatgcggccgcacatattcaccctcagcgtgcctttcccgacccccttggaggcggaaatcgcccatgggtccctggcaccagatgccgagccccaccaaagggtggttgggaaggatctcacagtgagtggcaggatcctggtcgtccgctggaaagctgaagactgtcgcctgctccgaatttccgtcatcaactttcttgaccagctttccctggtggtgcggaccatgcagcgctttgggccccccgtttcccgctaagcctggcctgggcaaatggagcgaggtcccactttgcgtctccttgtaggcagtgcgtccatccttccctagggcaggaattcccacagttgctactttcctgggagggcctcatgttttatctggttcttaaatgtttgttactacagaaaataaaactgcgctactaaaacaa

SEQ ID NO: 263108 - DNA, 1683 bp, Homo Sapiens
  misc_feature (227)..(227): n is a, c, g, or t
  misc_feature (455)..(489): n is a, c, g, or t
tgaagtacgtgagcggatgggagagtccctacgagggtgtcggtgaggagtacgtggagcatagcgagagtggacgggccgtcggtgccgccggcgacgtgagtccctattgcgcgtagatacccggtgtaattcgcgcgagtagagtgcagcggatggcgtagcctaccgagtgagcgagccgtggcgacaggtcgtgacatgctggctgcgagagagcgagcgtngcggtgagaggtctcacagtcgcgtggcgggcgtccatgcgcgcggccgcttccgcctgagtccgtcggttgcggcgggcgggggtcggctggcatttcgcgcgtcgctcgtcattgacatgctcgttccaggtgtggcggtcgagccattcctctatatcgcgcggccgcgtgagtgcgacattcgccgcgacatgcggagcgtgataacagcacacgccgaattannnnnnnnnnnnnnnnnnnnnnnnnnnnnnnnnnntgggggtgcccggcgatgtgggggggaacctacgtgccgtacgggggccccaccactaaaccctggcgggagggcgccgcggggaagttgccgccgtgttcgcacgggcagggcccgcgggagatgcgggagcacgcgttcttggggagccggaggtgcttccgccgaggtacccccagacggggccaggcattcgggaacggtgaaaccgggaagggtctttacatgctgggttgtcggggggcaaggacccggggggaagccccagtttctgcttctccaccccaacccggtggggttgggggtgggctgagatgcagaccctctggccagcagaggggagggagggccagggctgcccctttggtctcaagggcagtgaggcggggagcccggcctcacccatgtgtccatggtagggggtggaggcaggaggagtgaggaaccagagcctcctgcacccgggcacagagctaccagagcacggccccatccatgttcccgtagcctggctcgagcacgcagccctccagtaggtatagttggtcacccaccactctttcccgctgctatctgtctgccgcctgaagaagcgagcctggtgtacgatgttgttttcctcccatgactttgcgcctgtctcgctgcagctgctcgatccttctcttctgggcctcagcggcctgtatgttcccctcctccaggtacctctggtctggccggagtctcgtgtcggtggaaggcagcgaccgtttcagctctgctgtcagctcattcagctccaaggcaaactgggtgaagccgaagtttcgctcatggtcggggggcattgagttgggtttccagatgcactggccacctggcgtgggtccccggtacagcccctcgtgccacttcccaaagagtcggtggaggacacggccactccgactgagcacagcgccctgcacctcgtggacattggaactccagtacttggccttgcagaaggtgatcttgcagtggcaggagctgtcctgtgtgtttcggatgagcacctccccatagtgctcgatccagcgctgaccactcaggacattgtgaatgcaggatgtcaccttgttccactcaaagtggtccccaaacctcgcggcaggctgacgttgactgttcccacaggcacaatctccagggatttgccccagaacttgttct

SEQ ID NO: 263109 - DNA, 940 bp, Homo Sapiens
ggcctgggtggcgaattcggcacgagggaatgtccagagaacagataaaaataagcctgtggaatgaccactttgtggaatacggcagaaccgtgtgtatgtttcgcacagagaagattcggaagctcgtagccatgggcatccctgaatctttgcgagggagactctggcttctcttctcagatgcggtgacggatcttgcctcacaccctggttactacgggaatctggtggaggagtccctggggaaatgctgcctggtaaccgaggagatagaacgagacctgcaccgctccctgccagagcaccccgccttccagaacgaaacgggaattgctgctttgaggagagtcttgacggcctatgcccaccggaaccccaagattggatactgccagtccatgaacatcctgacctccgtgctgctgctgtacaccaaggaggaggaagccttctggctgttggttgctgtgtgtgagcggatgctgcccgattacttcaaccaccgagtgatcggggcacaagttgaccagtctgtcttcgaggagctcatcaagggtcatctcccagagctggcagagcacatgaacgacctctcagccctggcgtccgtctctctctcgtggttcctgaccctgttcctcagcatcatgcctctagagagtgcggtgaaatgtggtagactgcttcttctatgatggcatcaaagccatcttccagctgggactggctgtgcttgaagcccatgctgaagacctgggcagcagcaaggatgatgggccaggccttgatgatcctcagcagggtttctagatcacattaaaaaggaggaacagccccagggcccccagttggcagccaacctgcctttttctccgaacgaccaggaggccctaccctggggagggataatttcggacctgatccgggaattcctatc

SEQ ID NO: 263110 - DNA, 1373 bp, Homo Sapiens
  misc_feature (1033)..(1033): n is a, c, g, or t
  misc_feature (1266)..(1266): n is a, c, g, or t
gggctccgatcctggaaactcattggctccgaggacttaggacctgttagcttggttgggcgactggcaaatccttccttccccggggtagaagtccagggcatttgaggagactcatctgacctcccttgacccagtgaaacagtttgctgcctggtttgaggaggctgttcagtgtcctgacataggggaagccaatgccatgtgtctggctacctgcaccagagatggaaaaccctctgctcgcatgttgctgctgaagggcttcgggaaagatggcttccgcttcttcactaacttcgagagtcgaaaaggaaaagagctggactctaatccctttgcttcccttgtcttctactgggagccacttaaccgtcaggtgcgtgtggaaggccctgtgaagaaactgcctgaggaggaggctgagtgctacttccactcccgccccaagagcagccagattggggctgtggtcagccaccagagttctgtgatccctgatcgggagtatctgagaaagaaaaatgaggaactggaacagctctaccaggatcaagaggtgcccaagccaaaatcctggggtggctatgtcctgtaccctcaggtgatggagttctggcaaggtcaaaccaaccgcctgcatgaccggatagtctttccgcggggcctacccacaggagattcccctttggggcccatgacccaccgcgggggaggaaaactgggctctatgaaagaacttgcacccttaactctggggacctgctggcccagagtggagctagggctaggtgtcaagagagggtgtgggattgggacccaggcccttctttctaaactcaacccatttccctccctaccccttatcttcaggactcttcagagctaatcctctaagttctctgtactcagttggttctcagttagctggtcaagtggagtgtaatggtggcgtaaagaatcacaaatggaaaataattccataattatttttttgaccttgcctatgattgattaggatagctccctctangggtagcagccggtgtgactccctttctggtgacagacaggggccccagcagccctgtctgttaccatgtgagtcatactggccaaagcttagtcctagcatatgcacctgaagccaacctggccaatcagattgttttgtcaataatttgaaatttgaactggagagatccagaaccttgggagtcattaaaagcaagtcattcatagcagcccaggaaacaatagggaccnaaaggcctctgcctgctgctattgcaattcccaggatctcctccttccctggattcctcccctcccaggtctggggctggggcatttcccccccctggcctaaaacc

SEQ ID NO: 263111 - DNA, 896 bp, Homo Sapiens
  misc_feature (87)..(110): n is a, c, g, or t
ggtgatagaaaaatctcacgtgtgggggggaccacgggaaattccccggagagggggaatgtccttcaaaaagaaagtttacccgtnnnnnnnnnnnnnnnnnnnnnnnngccggagaatcctttttgtccccaggaaggttttttggggtaaagaattaagaattttaaaaaaacaaaggggaggaagggggaacaattaagggattcttttaaaatggtttgggggggcttttcccaccgaactgaaaagggaggatgaagccgagggaggacaggacagtttttattgttgggcctggccccgaggggcttagctggccctccatccggagcttcttcctgcttgggggctcttcaggctcagactccgaggctggagtccggagcccccatcgaaggcagagatggtgctgcccttggcgttggtgtagaggctgttgtctgaggaggggtagttggtctgcagttgggcacttgacctcgccttctccagtgcacggacttgctgctccagaagagcattctgccgcttgaggtcgtcaatatcttgctggtgtgtgtggtttttccttcgcatatactggatatattctgtggctttgtctaggatttgggcccgggatgccttctctccttggagtgatgggactgagtcccgcaaactgtgaaagctgtctttgatgtggtccctacgttttcgttccagtgcattatgatgagcccgtttgtcagccgcagattgaaacctcggttgctcttcgtcgctctccacctcgatgtcatcgttatcgctcatttcctacggcccagggagcggccactgcagcggcggcggggaggggaagtggtgaaggggagggggaagtcaccgacaacaacaagccgagtcccccc

SEQ ID NO: 263112 - DNA, 959 bp, Homo Sapiens
  misc_feature (749)..(749): n is a, c, g, or t
ctggagtcacggaacattggccgccccatcgagatgtccagcaaagtacagaggttcaaggcaacactgtggctgagtgaagagcacccgctctccctgggtgaccaggtgacccccatcatcgacctaatggccatcagcaacgctcactttgccaagctgcgcgacttcatcactctgcgccttccacctggcttccccgtcaaaattgagattccccttttccacgtgctcaatgcccgcatcaccttcagcaacctgtgtggctgtgatgagcccctgagctccgtgtgggtgccggcccccagctctgctgtcgccgcatcagggaaccctttcccgtgcgaggtggaccccaccgtgtttgaagtgcccaacgggtacagcgtgctgggcatggagcgcaacgagcccctccgggacgaggacgatgacctcctgcagttcgccatccagcagagcctgcttgaagcgggcactgaggcggagcaggtgaccgtctgggaagccctgaccaacacccggcccggtgcccgccctcctccccaggccacggtttatgaggaacagcttcagctggaggcgggccctccaggaaaagcctgcagctgtccacagagcccaggggggcccaggatccccctcccaggacacccccagcccccggtccacccagctttgaagagcagctgcgcctggccctggagttgtcttcaccggaacaagaggaccgggagcggcgcgggcancaggagggagaggacttacaggggatcctgcagctgtcactcactgagcactgagccatagcccccgggaaggctggccagggcactcccggcccgcttttggaattttatttatttataactccctgctgctgaacttggggccctggaacccccagaaatgagcaggccgggggaaaatgaaatggaaaataagagactggccccacc

SEQ ID NO: 263113 - DNA, 377 bp, Homo Sapiens
  misc_feature (11)..(11): n is a, c, g, or t
  misc_feature (25)..(25): n is a, c, g, or t
  misc_feature (34)..(34): n is a, c, g, or t
  misc_feature (43)..(43): n is a, c, g, or t
ccttcccaagnaaaagcctgcaagnttttcccanaagaacccnaggggccccaggatcccctccccaggaaacccccagcccccggtcccacccagctttgaagaagcactgcgcctggcccctggagttgtcttcacgggagcaggaggagcgggaacggcgcgggcagcaggaggaggaggacttacagcggatcctgcagctgtcactcactgagcactgagccaataacccgggagggctgccaggccactccctgcccgcttttgtaatttatttatttataaactctctgctgctgaagcattggcctggagccccaggaatgagcaggcaggggagacgtgagatggaaataaagagactgtcgcagcaa

SEQ ID NO: 263114 - DNA, 410 bp, Homo Sapiens
  misc_feature (39)..(39): n is a, c, g, or t
  misc_feature (87)..(87): n is a, c, g, or t
  misc_feature (245)..(245): n is a, c, g, or t
ctgttaaccgttgggcaacttcaaaaacaaggtggggtncccaccctcgccaacgggaaaagggttccccctgaatgcggccgaaanacaaaagctgggggcccggcacccaacacggaacctcaggggcctcatcaacagcccacacaggttgcctgaaggtgaatgcgggcattgagcacgtggaaaaggggaatctcaattttgacggggaagcccaggtggaaggcgcagagtgatgaagntccgcagcttggcaaagtgagcgttgctgatggccattaggtcgatgatgggggtcaactggtcacccagggagagcgggtgctcttcactcagccacagtgttgccttgaacctctgtactttgctggacatctcgatggggcggccaatgttccgtgactcca

SEQ ID NO: 263115 - DNA, 421 bp, Homo Sapiens
  misc_feature (129)..(129): n is a, c, g, or t
  misc_feature (338)..(338): n is a, c, g, or t
  misc_feature (375)..(375): n is a, c, g, or t
agcaaagtacagaggttcaaggcaacactgtggctgaggtgaagagcacccgctctccctgggtgaccagttgacccccatcatcgacctaatggccatcagcaacgctcactttgccaagctgcgcancttcatcactctgcgccttccacctggcttccccgtcaaaattgagattccccttttccacgtgctcaatgcccgcatcaccttcagcaacctgtgtgggctgtgatgagcccctgagctccgtgtggggtgccggcccccagctctgctgttcgccgcatcagggaacccttttcccgtggcgaggtgggaccccaccgttgttttgnaagttgcccaacgggtaacaggcgttgttggggcatnggaagcggcaaacggagccccttccgggaacggagggaacggattg

SEQ ID NO: 263116 - DNA, 906 bp, Homo Sapiens
  misc_feature (859)..(859): n is a, c, g, or t
  misc_feature (863)..(863): n is a, c, g, or t
ggcctgggtggcgaattcggcacgaggacaaggagagagtgagtgcatcggatggcttctggaaatctgtggccactcgagtgcccaaggagccccctgagattcgaatcctcaacccatatttcatccaggaggccgccttcaccctcattggcctgcccttcaacaatggcctcatgggccgggggaacatccctacccttggcagtgtggcagtgaccatggcactacacggctgtgacgaggtggcagtcgcaggatttggctatgacatgagcacacccaacgcacccctgcactactatgagaccgttcgcatggcagccatcaaagagtcctggacgcacaatatccagcgagagaaagagtttctgcggaagctggtgaaagctcgcgtcatcactgatctaagcagtggcatctgagtgggcccagcacatggccatagaggcccaggcaccaccaggagcagcagccagcaccacctacacaggagtcttcagacccagagaaggacggtgccaagggccccaggggcagcaaggccttggtggagcagccagagctgtgcctgctcagcagccagtctcagagaccagcactcagcctcattcagcatgggtccttgatgccagagggccagcaggctcctggctgtgcccagcaggcccagcatgcaggtggtgggacactgggcagcaaggctgctgccggaatcacttctcccagtcagtggttgggggattatcattttgggaatttgggtaaggggggagggtaaggaataatttattttttaaaaaaaggtgggagatggtcaagttggggttcactttgcccatgcaggaaggaggcccanctangagggccccaatcagggcagtgtttaccctggtaacctccccc

SEQ ID NO: 263117 - DNA, 886 bp, Homo Sapiens
tgggtggcgaattcggcacgagggcttggtctcgacagccagtttgtaggtgtggagggcttcatcaccggcctcctcgacctcctcccggcctcctactacttccgtttccaaagggagatctctgtggccctctgttgtgccctctgctttgtcatcgatctctccatggtgactgatggcgggatgtacgtcttccagctgtttgactactactcggccagcggcaccaccctgctctggcaggccttttgggagtgcgtggtggtggcctgggtgtacggagctgaccgcttcatggacgacattgcctgtatgatcgggtaccaaccttgcccctggatgaaatggtgctggtccttcttcaccccgctggtctgcaatgggcatcttcatcttcaacgttgtgtactacgagccgctggtctacaacaacacctacgtgtacccgtggtggggtgaggccatgggctgggccttcgccctgtcctccatgctgtgcgtgccgctgcacctcctgggctgcctcctcagggccaagggcaccatggctgagcgctggcagcacctgacccagcccatctggggcctccaccacttggagtaccgagctcaggacgcagatgtcaggggcctgaccaccctgaccccagtgtccgagagcagcaaggtcgtcgtggtggagagtgtcatgtgacaactcagctcacatcaccagctcacctctggtagccatagcagcccctgcttcagccccaccgcacccctccagggggcctgcctttccctgacacttttggggtctgcctgggggaggaggggagaaagcaccatgagtgctcactaaaacaactttttccatttttaataaaacgccaaaaatatc

SEQ ID NO: 263118 - DNA, 896 bp, Homo Sapiens
  misc_feature (81)..(142): n is a, c, g, or t
  misc_feature (558)..(597): n is a, c, g, or t
  misc_feature (774)..(774): n is a, c, g, or t
  misc_feature (797)..(797): n is a, c, g, or t
cctgggtggcgaattcggcacgaggctcactctgtcctcgaaagcctgagctttcattcaactccctatttccatgcaaannnnnnnnnnnnnnnnnnnnnnnnnnnnnnnnnnnnnnnnnnnnnnnnnnnnnnnnnnnnnngccaggcctgcctcaaagagcattcaggaggctctgagaggacatgagagtattttgcaaagtgagggcaaggcccagtgtggagtgatattgttattccaagattccactgcaaaagtggctgctttggatgccagcccaggatgagtagttcctgttctcagggaggtcatccgctgagcatcccttctgcacagatgtctctgattcttgtccttgcaggtggaggacagggcctgctcccctaagctgggaagcctggaatgacctcttgcacaagcctaaattccaggaatcttccccaaatcccagatcctctgcaatctacctgcacccctgacccacccaggagttggaccgggagttgggaagcctaggtcttagtcctacactccttctaatttgctgtgtaaccnnnnnnnnnnnnnnnnnnnnnnnnnnnnnnnnnnnnnnnnttggaggtagcagtgctagctctgccttcaggcatgcaatatgccagaactacagacaacagcccacaggatgcaaaagtgctttgccatcttaaaaatgccagatcactcagagcctatgaatgtggatatcaacaccaggtctctagcaccgctggatgaaagggagaaggctanaggctgagggaggaaagagcagntaacaaacaaaggcagtagctcatcacttgggtagcaggtacccatttttaggaccctacactcaaatgtgcaaaataaattttctatcatttttgctt

SEQ ID NO: 263119 - DNA, 1100 bp, Homo Sapiens
  misc_feature (245)..(245): n is a, c, g, or t
ttattgaattcgggatcaagaaggggcttgataagggccccaaacaccttattaaaccaaagcttgcaggtcttctaaggtcttcagagaagctacaccaaaatactatgatttcattagcatcccacatatgtatcattttccacaacattttacaattctctgttttcacagggaaggtgaactaattataatgaaatatcagtaatgtatcttaaataagtaacatgttgctggaaaaaatntaagttaaaatgcactacataatagtgcagaaacaaagtgcaggtggcaattttaagacatgaaaacaatgctgaatcagtagtgtttggagtgatacattttgcccatttttggccagtcctagaacagtactcaccacaagctgcatgccaaatatgaactaatgaggctaaaacactgaagaccaaatagaaccactctagagtcggtttcacaatgagatactcctccccggtctgaaaacagcgatctgctgtagttcctatcctcccgtgggcacctatccctgctacagtacctataaccagatgtcctccatcatccagcctccaggacaagtggtgctcagtgagtcacaacctgagaaacagctgctggtttaccgatttgtattcctgtatatactcgacttgggtagccaggattttctcgtttgtcttgaatatatttacttctaaaaagactgttagtcttgttgggaggtgagcagaggaatgtttacttgctggagaacatagtaacaaacatcacttctcacccctcataaacagaaagcccattgtctgtgccgtgaaaagaggactaccttgtcaggaagattatacttacctctacaagaaaaaggactcgtattaaaatcgacctgtggttaccacccttagaaatgctgttttcagatattcctattcctagtcttagaggcagccatggaatatatagtctcctctgaccttggggtcaggaagaaagggaaatctattcataaaaggaatttaaattctggcctaggcctctcaaacctgcttcaagtgaaagaagatagcttaactaacaggagcctcaagttgaatgtc

SEQ ID NO: 263120 - DNA, 971 bp, Homo Sapiens
  misc_feature (643)..(643): n is a, c, g, or t
  misc_feature (664)..(664): n is a, c, g, or t
cctgggtggcgaattcggcacgaggctagggcctcagtaaactcagaccatcccaactggggctcctgggggtacaggaatccttatgaatgtatagaatgcatactgcctaggcccccagtcgtctgcagtaattcaaaagctggtatttttcttcctaaatgtcacatagcaaaggctgcccaaatccccaaacttgttcttcaaaggtttgacaggcttaatgtgggcatccagtggcctgtggacccccccctgccaccacgactgctgccacccggagttcccccattgtctttggtgcctgggcttccagagtccctcccatcaggactaccagcttgctcagttagcagcagagggcagttccccagcttgatggtttctgagctaagtctggcatggaggggcaaggggtaggggatggggtgctgtgtaggaatggcctcagctcttgttttgctgctggttttagggggccaaagtaaatggggtgggattctgggaacctcaggcctagaataggttgcctttgtgggggcgatgaagcagagtcccctggtcaagtctctcggctcctttaatgtaggattgagagctgggcaaacaggtcccactggggactgtgactcttggagattanaggacagggcattgatggaangtaagggccaggagaagaggcctttctgctgtgtcccctcacggccttgccctcgaattctgcaggccctgggctcccctgacacctggtataattatggaccagacactggggcagcatcaaggaaagtccgtccggggtgcactttcttcagctggctggccgcaccctaaaaactatttatttcccaaaaccccaagtaatttcacaaaggtggaactccgggccaccctgaaaaagccccccaagcgcccggcaattcctggaaaaaaattttgacatacctgcttcggctcggatggacaac

SEQ ID NO: 263121 - DNA, 560 bp, Homo Sapiens
acggaattacggcgtgttcaagctaaaaaagcattagagatagtactatttgcgtaatgttgtcatctcttaatttgccagagggtctctcatgcagattttctgagccccattacttgacacttgtcactcccttccctgtgcctcagatgagatattcaagacatgccagccaatttaaacattagcctcagcaaaaacataatggagaagtcaaatctataaaggaaaattaagtataaagtcaattaaaaaataatttgagttgaattaccatttttaattctctatgccactgcccctctctgcccagaattggctgtccttggggagagctatttcttgctatgtggctgacgtatttctccccaagttagaagatgcgacccgattcaagcacctccggaagtacacatacaactatgaggctgagagttccagtggagtccctgggactgctgattcaagaagtgccaccagggatcaactgcaaggtatggaggatgcaggcaggaggggacctagagcccacagcttttcccccagccctggttcccagc

SEQ ID NO: 263122 - DNA, 975 bp, Homo Sapiens
  misc_feature (794)..(818): n is a, c, g, or t
gggagaggcagcggttggaggcgcggtgggtgtctgcgggggtctcgcggggcgcctgcggtgtttcaccgggaaaggctcgaggagagcgcggctcacgagagataacccagctgtgctccctggaaccttcaatttcaaggcctccctgcctctactaggcgccttagctcactatggggaaccacttgactgagatggcgcccactgcctcctccttcttgccccacttccaagccctgcatgtcgtggtcattgggctggactctgctggaaagacctccctcctttaccgcctcaagttcaaggagtttgtccagagtgtccccaccaaaggcttcaacaccgagaagatccgggtgcccctcgggggatcgcgtggcatcaccttccaagtgtgggacgtcggggggcaggagaagctgcgaccactgtggcgctcttatacccgccggacagacggtctagtgtttgtggtggacgctgcggaggctgagcggctggaggaagccaaggtggagttgcaccgaatcagccgggcctcggacaaccagggcgtgccagtgctggtgctggccaacaagcaggaccagcccggggcactgagcgctgctgaggtggagaagaagctggcagtccgagagctagcagccgccactctcactcatgtgcaaagctgcagcgctgtggacggtctgggcctgcagcagggccttgagcgcctctatgagatgatcctccagaggaagaaaggcagctcggggggggcaaagaaaagaccgcggacccaaagnnnnnnnnnnnnnnnnnnnnnnnnnaaaaaggggcctgcacactttggcacgccgggtggggcaccaagcccgggaccccccccagtccaactgggggcggccggacctgtctccactccacggaaggaaaaacgctgcccgcccgggccccacgcctgtgggcaagaccaagcatagggcc

SEQ ID NO: 263123 - DNA, 1041 bp, Homo Sapiens
  misc_feature (999)..(999): n is a, c, g, or t
ggcctgggtggcgaattcggcacgagggttccttccgcgggacgggtgagggcgctggggccctgggcagcgcgggctcgatgtgtgtcagccaagtagctggtcccactggagcgggagaaagagagagcgcgaaagagagaggatgtctctctcagactggcacctggcggtgaagctggctgaccagccacttactccaaagtctattcttcggttgccagagacagaactgggagaatactcgctagggggctatagtatttcatttctgaagcagcttattgctggtaaactccaggagtctgttccagaccctgagctgattgatctgatctactgtggtcggaagctaaaagatgaccagacacttgacttctatggcattcaacctgggtccactgtccatgttctgcgaaagtcctggcctgaacctgatcagaaaccggaacctgtggacaaagtggctgccatgagagagttccgggtgttgcacactgccctgcacagcagctcctcttacagggaggcggtctttaagatgctcagcaataaggagtctctggatcagatcattgtggccaccccaggcctcagcagtgaccctattgctcttggggttctccaggacaaggacctcttctctgtcttcgctgatcccaatatgcttgatacgttggggcctgctcacccagccctcgtcaatgccattgtcctggttctgcactccgtaagcaggcaatgccccaatggcctgggactgactcctcctcccgggagcatgcccctccagctcataccgggaatatgcccaggggggctttcctggtttgaagggggttctccgaaggatggaggaatgaacttttccccccaaacacccagggttccaacaccccttcttagcgcagaacttcccgagtctctccccgccccagagccttcccccttggggggataaccgggggggaacacttcgcttggtgactcccccggggncccctttatttcctcacaaaagatggaacctctgggggccca

SEQ ID NO: 263124 - DNA, 1005 bp, Homo Sapiens
  misc_feature (992)..(992): n is a, c, g, or t
ctcccgttccccgcccgaattgcttctccccatggcaacccgcctacgtagcgagcctgggtggcgaattccgcacgagggcgcagatggcggcggcgcacggcgcctgagcgggccggggccatgagcgccgcccggccccagttcagcattgatgatgccttcgagctgtccctggaggacgggggccctgggcccgagtccagcggggtcgcgcgctttgggccgctgcacttcgagcgtcgggcccggttcgaggtggctgacgaggacaagcagtcccggctgcgctaccagaacctggagaacgatgaggatggagcccaggcctctccggagccggatgggggagtcggcaccagggattccagccgaacttccatccgcagctcccaagtggtccttcagcaccatcagcagcagcacccagcgctcctacaacacctgctgcagctggacccaacaccctttgatccagaagaaccgcccgagtggtgctggccccccttcctgctccctgctgactaggactggtgcctgaatccctgcaacgtcgtggtaaactgacacgttgaccccccctctcccacgcggactacggaggccataacttccgtaccgcccgggctttcctcgacttttggaacgcatttccacgttcagttccccgggtatctcaccgcttaggtcgggcgcaaacggacatatcccgccgcgcgccccacacttgcccaaccatccttcggaccaccttatgttccgatccctcccacctaacggctacccggcgaatgtgtatatcccacacacgctccccggagtatgacctgtacctgtcccttcccaccgccctctacccttcgtacgacccttttccgttagtgtacgacccggacggactcacgcttcttcttcctcacttccctttaccttactccacacgtaatctcatcgctttcaccccgcccgctcaatcttctcccgccccccgnatacccgctcacc

SEQ ID NO: 263125 - DNA, 977 bp, Homo Sapiens
  misc_feature (319)..(319): n is a, c, g, or t
  misc_feature (403)..(599): n is a, c, g, or t
ttactcggatttctttttctcctgattttcggcctcagctcctagagtggcctcagctaggtaaccaacgggagtcgacttatctatgccaggcctgcagtttcacatctgtgacgggatgggacaaatgacaccgtggtattcgatgacagctcccaggtatttcaaggttggcccttactcattcagggggtatgtttgagtgccacggtgtgcccagactctgctaggcaccagagagacaagatacgagtgacatggttctcctcccactgctgacggaggaattaacacaaaagcagacaacactctagaactnggagagaggtccagattgcgacaggagccacaccagagtgtgcaggcttcatggaggacagaagcgacttttgtgccgggactnnnnnnnnnnnnnnnnnnnnnnnnnnnnnnnnnnnnnnnnnnnnnnnnnnnnnnnnnnnnnnnnnnnnnnnnnnnnnnnnnnnnnnnnnnnnnnnnnnnnnnnnnnnnnnnnnnnnnnnnnnnnnnnnnnnnnnnnnnnnnnnnnnnnnnnnnnnnnnnnnnnnnnnnnnnnnnnnnnnnnnnnnnnnnnnnnnnnnttaaaatacaacacttcccagctgcccttatagttaaggtctggccagtgaaatgtatgtggaaatgttacatgacacttctagaaggattcttaaaagacaaatacaccctttcttcccccttcctatttcctggaatgtgggtgtgatggctggagccctggcagccatactgccacgtgtacagacgagtgccgtcctttagggatgacaggagcctggttccctgatgatggcagagccagatatcagcacaaacttatttaaatgggagagagaaggggagaaccaatctcaacttctaccttgtgtaagctgctggttttgggggttttctatgacagataccaaaataaaccctaactgaacatgtactca

SEQ ID NO: 263126 - DNA, 1413 bp, Homo Sapiens
  misc_feature (562)..(572): n is a, c, g, or t
gccaaggaaagtgccttgttctgtgcatcttcagaatcccccaggccctctcttgatccttttcatgaagtccagagcattccttctattacaggctgaagatgcattgtaaaaggtaatgctataatagtattccctcttctcaataaatgtgcaaaactggagaatctggtgctgatctgcagcatacttgacaacacagggaataccgtggatgttccacgccagccttacatccgtccccattgcctgcccatgtccagtggccctgcgcaacaaaagtaagggcttgtcttaccacactctccccagcatctagctcaaggtagatgactgactgggaaattccggttggataaaatggcttttccacattgcaactttgcatctctattaggaaaatttagattgaacctttcctctacttgatgcttagtttgagaacagttttcacaactttagagggtctctctcagagtatgttatactgtaaccttgaagtttgagatgaaacaaggtgtcagaggttttgaatctttcaaaggaattgccttttacagannnnnnnnnnnattccctaagaagggaaaaagagagggaagaactacactaatgttagagataaggtatgttttggctcaaaatgtgtcatgaacctaaaggtaacttgatgggcagaaatgtctcagccatgtgaaccaagaagtgggaccacagtgcaaggctgtgggtggcagcactagatacggtggtggcaggagtgtgacatgtaggcactccatgggggacagctggacggtgtctatcaaaagtgcaaatgcataagctctttgaactagcaatgctactccctaagaattgtacctgcgtacaaggtacttgtgtacaagaggttttgttgaaacattgtaatagcaaaaagttggagagtgccaccaatacaggggaatggttaaatacattatggccagcttaaacaatggaatagtttgtagaaatttaaaacaatggatcctgtgtgtgtgtactaccatagaatgggccccaagatgcatgattaagtgaggaaaaaagcccatggtatcctaatgtttggaatggagaaagtgtgtagatgtatgtgtgtgcatatgttttcacacagacgtatacacgtgtatatcatatgtccacctgcatatgcctaggatgtctctgggaggatatctagcagcccggcagcctgaattgcctctgggaagaggggtgggaatgacttttcaatgtacaccttttgtaccttttgaattttgtaccatgtacatgtattatctattaaaaaatagttcttaaatttgaattggtgtactttcttagtagagcaaatggagaaatctgatctctaaatctgcttcttagataagcttgtcaagt

SEQ ID NO: 263127 - DNA, 1177 bp, Homo Sapiens
  misc_feature (505)..(566): n is a, c, g, or t
  misc_feature (1091)..(1091): n is a, c, g, or t
  misc_feature (1132)..(1132): n is a, c, g, or t
gggcttttcccgggcgctgattcctgagtgctgagcgcgaacccgaggagatgaaccctttaactaaggtgaagctgatcaacgagctgaatgaacgagaggtccagcttggggtggccgataaggtgtcctggcactccgagtacaaggacagcgcctggatcttcctgggagggcttccttatgaactgactgaaggggacatcatctgtgtgttctcacaatatggggagattgttaacattaatctcgtgcgggacaagaaaactgggaaatccaaaggattctgtttcctctgctatgaagaccagaggagcacaattctggccgtcgacaattttaatgggatcaagatcaaaggaacaactatccgagtggatcatgtgtctaactatcgggctcctaaggactcagaagaaatagatgatgtgaccagacaactccaggagaagggctgtggggctcgtaccccctcaccaagtttgtctgagagctctgaagatgnnnnnnnnnnnnnnnnnnnnnnnnnnnnnnnnnnnnnnnnnnnnnnnnnnnnnnnnnnnnnngagaaagccgaccgggaggtacaggcagagcaaccatcctcttcgtcacccagacgcaagacagtaaaggaaaaggatgacactggccctaagaagcacagcagcaagaactcagagagagctcagaagtcagagcccagggaggggcagaagctccccaaatccaggacggcctactctggtggagcagaggacctagagagggagctgaagaaggagaaacccaagcacgagcacaagtcctcaagcaggagggaggcaagagaagaaaagaccaggattagggacagagggcggagctcagatgcacattctagctggtataatgggcgttctgaagggcgtagttatagaagtagaagtaggagccgagataaatcccataggcataaaagggcccgacgctcccgggagcgggagtcttcgaatcccagtgaccgttggcgtcactgaagacttcagctgcacagtagatttggaaataattatgtttttttaatgcagtcaaattcagttggggtgggntactattttttgtatctaaaactttctgggggctgggattncttttaatccccttggactattttagaggtcatttggggaagggg

SEQ ID NO: 263128 - DNA, 999 bp, Homo Sapiens
  misc_feature (701)..(738): n is a, c, g, or t
ggcgaattcgggacgaggcacccccggccccaccgcgcccggcgtccgttgagccgcggctgccgcagcccggcccgggggcctcgcgctcccgacctctgtcccgggcctcgccccgcgggaaggacccggagccacggcggggagactggaaaggcctagaaccgcgcccgggctcctctggggcccgaagtctcccaagggggtcgctcctgccagccaggcgggagcgacaggcatcgtttttgtgcctcctccgtggctgtggaccggagccccatagcccaggacttgcacacgcaaggggcgctctcggggcgaccgcagacctcggcgacgaccccagcccgtcccccgaggggccccgatgaacgaggacctcggggtgccccctccccagcacgtttgtgcgatttctgtgatctagtccttaaggaaggtggccgttttctttttcccccctaggatgcagaaagtagatgacattccatccacactgtgtgagcaaattggagagattgccttgatagaggactgatgtttttcactgatgagatggtaggggttgtcttgctattggacaaatacatcatccccgaaaaactgtgagcaagtggagcgagtgtgggcttttaagggcaccaagcttgccccctgacccgcgagggccccggtcccccccttgtcgaactcccacaggnnnnnnnnnnnnnnnnnnnnnnnnnnnnnnnnnnnnnnaaacccttccacaactataacccgccccattcgcactctattgcttgcttgccccatggtaaaccacgcgacccgaaccagcgccccacaccttcccggctaagaccccccttatcgcccctctcgccccgtatttcccgccttttatacccaccttcattctaaacctcacattcgcccccattgatattccccgcctattcccatacccccgagaaatctgcgagccttcctccctcatatagccacaatctacgcctc

SEQ ID NO: 263129 - DNA, 945 bp, Homo Sapiens
  misc_feature (727)..(727): n is a, c, g, or t
  misc_feature (803)..(803): n is a, c, g, or t
ggcctgggtggcgaattcggcacgagggtgaagccggagaacccaaccgcctcatgcaggtgtggtgcgaccagagacacgaccccgggggctggaccgtcatccagagacgcctggatggctctgttaacttcttcaggaactgggagacgtacaagcaagggtttgggaacattgatggcgaatactggctgggcctggagaacatttactggctgacgaaccaaggcaactacaaactcctggtgaccatggaggactggtccggccgcaaagtctttgcagaatacgccagtttccgcctggaacctgagagcgagtattataagctgcggctggggcgctaccatggcaatgcgggtgactcctttacatggcacaacggcaagcagttcaccaccctggacagagatcatgatgtctacacaggaaactgtgcccactaccagaagggaggctggtggtataacgcctgtgcccactccaacctcaacggggtctggtaccgcgggggccattaccggagccgctaccaggacggagtctactgggctgagttccgaggaggctcttactcactcaagaaagtggtgatgatgatccgaccgaaccccaacaccttccactaagccagctccccctcctgacctctagtggccattgccaggagcccaccctggtcacgctggccacagcacaaagaacaactcctcaccagttcatcctngaggctgggaggaccgggatgctggattctgttttcccaagtcactgcagcggatgatggaactgaatcgatacgngggtttttctgtcccctcctactttccttcacaccagaacagccccctcatgtctccaaggacagggacaggactacagacaacttctttctttaaataaattaagtctctacaataaaaacacaactgcaaagtaaaaaaa

SEQ ID NO: 263130 - DNA, 1039 bp, Homo Sapiens
ctgcgtatgagtgggggcacgctaagcatcctcctgatagaggacgtgcggtcggctacggccgcgccgtcgggcttgtgtgcggggggcggtccgccggtgggtccgcggggggggtagcggtccttcggagggcgtgggcctgtcgcgtgtggctgggcgtgcggccccgcgcgttgtccctggttgtcgtgcgtgttgcctctgggctgggggcccagcgtctcgggcctggcggcggaattccggctctcccgcttccccccggctagagctcccgcatgcgttggctagtgcatggcccaccttccctgggtcctcccgctttccgcgcccgggtgttctgtcgtgatcggcagtgttcgcgccgcggcgggcccttgagcgtacttgggtgcgtggggctcggcgcgaacctatgtaccctgtcccttccccgatttgcggctgctcgaaagcggactataataattccatgtcttcgacaggattgttgggaggttcaaaggaagtaatatatgtaaagctgttaggacagggcctagagagagtaagcactccacatgttaggtatttgtattaatatttgagaatgtcaatacgcagacccttctgtgcccagacccctctcgagtcccctacaatctctgccagtctccttccttagaatgttcaccttcctcacaaactgtgtggcttctaaacattgtgtgcctcctaaggggcacctgggcatggtgccaccaccaagccatgctgatagcccatcactggccacgcaggacacaggcccactcttctatcatcaatgctgaacagaaaggctgaaagccaaaacaagtaaactggcctccacacaaccgatccaaacagcctggggcctggcagtgccaggggaagagcttgaaaggaaaaacaaccaaaaacaacacacaagcttatctttgtcatggctgacccagctcacagccaggcacggaaacagagtggctttataagaaaatgcctttctcctcgtgccgaattcgccacccaggcc

SEQ ID NO: 263131 - DNA, 1002 bp, Homo Sapiens
  misc_feature (50)..(68): n is a, c, g, or t
  misc_feature (73)..(188): n is a, c, g, or t
ggcctgggtggcgaattcggcacgagggacggagcaagactctgtcgaannnnnnnnnnnnnnnnnnnaaggnnnnnnnnnnnnnnnnnnnnnnnnnnnnnnnnnnnnnnnnnnnnnnnnnnnnnnnnnnnnnnnnnnnnnnnnnnnnnnnnnnnnnnnnnnnnnnnnnnnnnnnnnnnnnnnnnnnntgtatttggagttgatccagtgagtgaagaggagagggctggagggaggctagtggcagcctgtctgtgctctgcctggctggacaggacccattctggtcatctcagagagaggccaggtcaggcttccaacaagttgtcccccattggacattcgtcagcctgaggacagccctgtgttctcctaatgtgtgactgtgccccttcctttgccccacaacagaggtagctcgccagtgtagtgaatgatgaggagagaggtttgctcaggagtcctctgaattgggagccagtaagaagaagattcaggttgtggaggaacgtttgcgctgtaggcccagcctactccagccttaggtcccccattatcaacatgccctcagcagggtcggctcgggcaccaggttcctgctccctgccatgagttgacctctagagctcaggtgtaacctaggttgcagctggaggtctgcctgctgggccttcacctgcacaatggtggcttattgttaaggcatcttggccctgggcagagtcttgcctggatccataaacctttacccattccattccctgctggccaaaccctgtgacttggggaaaaggctgggccaatgccccaggaagccaaatccaggaaaatttctaaaggacttggaaagaaaaaaataatggggggccaaaagaatgtcctgggaatgattcccaagccccttgaaggagacccttgaaaaatttttctgaacttccaaaagagaacaaaaattccccccaaaagtgggaaacactctcccttctcatactcacatcaggc

SEQ ID NO: 263132 - DNA, 1074 bp, Homo Sapiens
  misc_feature (16)..(16): n is a, c, g, or t
  misc_feature (565)..(582): n is a, c, g, or t
  misc_feature (591)..(630): n is a, c, g, or t
  misc_feature (677)..(750): n is a, c, g, or t
  misc_feature (789)..(797): n is a, c, g, or t
  misc_feature (884)..(892): n is a, c, g, or t
ccccccccgctgtggngcactgcgcgccacccccctccccacccaggcctgggtggcgaattcggcacgagggccagagtgaccaggctgaccagcaccagccctgatccagatgcagaggccaggatgtgggcccagccctgtgccaggaggctggctggaataaaggtacagatagaggcctcaccccctctgggaccactggcactcagggtgtttgcagcctcagagcccacctgcccccagggccacagctgcatctcctgccctgctgtcattacagggatgggcaggctggcatgggggcagccgctgcccctgcctgggtgttgctgtgtattcctgccggccaggggccactgccaggaccacgcctcccttttcatatcccgattcttaagttctgctattgtggtattctggtggagaaaaaagaaccgcgtggctgtttttgaactgcctggaacctaagaccctgaattcttttcccccccaaggggaaaatctatatggaaaacatttattttaaaatacaggatgaagtgaattaaaagatttaaatgcnnnnnnnnnnnnnnnnnnctccaggcnnnnnnnnnnnnnnnnnnnnnnnnnnnnnnnnnnnnnnnncatgggcatagctgtttcctgacccagctttcttgtacaaaggggtnnnnnnnnnnnnnnnnnnnnnnnnnnnnnnnnnnnnnnnnnnnnnnnnnnnnnnnnnnnnnnnnnnnnnnnnnntgcagtacccgggaaatttacccgccctaagagcgggcnnnnnnnnnggggacccaaaggatcttccttgagaatccttttttcctgcaagtaatcgggctgcgttgccaaacaaaaaaccccccgcctaccannnnnnnnntttgtttggccgggatccaagagcctacccaacctcttttttccacaagggaaaccgggcctcccccgcgaaagcgccaaaatacccaaataccgcgggttctcttcaaagcggaaccccacaaccttaacggccacccacccttccaggaaaacttctggttaaccacccccacctaccac

SEQ ID NO: 263133 - DNA, 1213 bp, Homo Sapiens
  misc_feature (145)..(153): n is a, c, g, or t
  misc_feature (155)..(160): n is a, c, g, or t
  misc_feature (163)..(173): n is a, c, g, or t
  misc_feature (175)..(180): n is a, c, g, or t
  misc_feature (183)..(183): n is a, c, g, or t
  misc_feature (185)..(190): n is a, c, g, or t
  misc_feature (192)..(193): n is a, c, g, or t
  misc_feature (196)..(222): n is a, c, g, or t
  misc_feature (224)..(224): n is a, c, g, or t
  misc_feature (227)..(227): n is a, c, g, or t
  misc_feature (231)..(231): n is a, c, g, or t
  misc_feature (234)..(235): n is a, c, g, or t
  misc_feature (238)..(238): n is a, c, g, or t
  misc_feature (240)..(243): n is a, c, g, or t
  misc_feature (248)..(248): n is a, c, g, or t
  misc_feature (251)..(251): n is a, c, g, or t
  misc_feature (260)..(262): n is a, c, g, or t
  misc_feature (266)..(375): n is a, c, g, or t
  misc_feature (379)..(379): n is a, c, g, or t
  misc_feature (382)..(382): n is a, c, g, or t
  misc_feature (386)..(386): n is a, c, g, or t
  misc_feature (388)..(388): n is a, c, g, or t
  misc_feature (391)..(391): n is a, c, g, or t
  misc_feature (399)..(401): n is a, c, g, or t
  misc_feature (405)..(405): n is a, c, g, or t
  misc_feature (408)..(410): n is a, c, g, or t
  misc_feature (415)..(463): n is a, c, g, or t
  misc_feature (467)..(467): n is a, c, g, or t
  misc_feature (481)..(1134): n is a, c, g, or t
  misc_feature (1137)..(1137): n is a, c, g, or t
  misc_feature (1196)..(1196): n is a, c, g, or t
gcctgggtggcgaattcggcacgaggcaggagtccagagtcggctgaagcgagttgccgcgttctctctggcggcgcgacaccggcccgtggaccgcccggccgccctccaggacccggtctgcaggagcggagagggcggtgtnnnnnnnnntnnnnnnatnnnnnnnnnnntnnnnnngtntnnnnnntnnatnnnnnnnnnnnnnnnnnnnnnnnnnnnanttntttnttnnttntnnnnttttnttntatttgttnnnttgnnnnnnnnnnnnnnnnnnnnnnnnnnnnnnnnnnnnnnnnnnnnnnnnnnnnnnnnnnnnnnnnnnnnnnnnnnnnnnnnnnnnnnnnnnnnnnnnnnnnnnnnnnnnnnttanttntttntnttnttttattnnntttnttnnnttgtnnnnnnnnnnnnnnnnnnnnnnnnnnnnnnnnnnnnnnnnnnnnnnnnngtgngtgtttgtgggggnnnnnnnnnnnnnnnnnnnnnnnnnnnnnnnnnnnnnnnnnnnnnnnnnnnnnnnnnnnnnnnnnnnnnnnnnnnnnnnnnnnnnnnnnnnnnnnnnnnnnnnnnnnnnnnnnnnnnnnnnnnnnnnnnnnnnnnnnnnnnnnnnnnnnnnnnnnnnnnnnnnnnnnnnnnnnnnnnnnnnnnnnnnnnnnnnnnnnnnnnnnnnnnnnnnnnnnnnnnnnnnnnnnnnnnnnnnnnnnnnnnnnnnnnnnnnnnnnnnnnnnnnnnnnnnnnnnnnnnnnnnnnnnnnnnnnnnnnnnnnnnnnnnnnnnnnnnnnnnnnnnnnnnnnnnnnnnnnnnnnnnnnnnnnnnnnnnnnnnnnnnnnnnnnnnnnnnnnnnnnnnnnnnnnnnnnnnnnnnnnnnnnnnnnnnnnnnnnnnnnnnnnnnnnnnnnnnnnnnnnnnnnnnnnnnnnnnnnnnnnnnnnnnnnnnnnnnnnnnnnnnnnnnnnnnnnnnnnnnnnnnnnnnnnnnnnnnnnnnnnnnnnnnnnnnnnnnnnnnnnnnnnnnnnnnnnnnnnnnnnnnnnnnnnnnnnnnnnnnnnnnnnnnnnnnnnnnnnnnnnnnnnnnnnnnnnnnnnnnnnnnnnnnnnnnnnnnnnnnnnnnnnnnnnnnnnngtngtgatatattatatgtgtagttatgtattgtggttgtatgaataagtgtaagtatagtnttattagggtgatatgg

SEQ ID NO: 263134 - DNA, 1168 bp, Homo Sapiens
attcggacgagggctggaggccctgacaggggtgctccgcagctgtgggaccctcacactgaagccccctgggcgcctcgctgagctctgtggcgtgctcaaggctgtgctgcagaggaagacagcctgtcatgatactgacgaggaggaggaataggaagatgatgatcaggctgaatacgacgccatgttgctggagcacgctggagaggccatccctgccctggcagccgcggctgggggagactcctttgccccattctttgccggtttcctgccattattggtgggcaagacaaaacagggctgcacagtggcagagaagtcctttgcagtggggaccttggcagagactattcagggcctgggtgctgcctcagcccagtttgtgtctcggctgctccctgtgctgttgagcaccgcccaagaggcagaccccgaggtgcgaagcaatgccatcttcgggatgggcgtgctggcagagcatgggggccaccctgcccaggaacacttccccaagctgctggggctcctttttcccctcctggcgcgggagcgacatgatcgtgtccgtgacaacatctgtggggcacttgcccgcctgttaagggccagtcccaccaggaaaccagagccccaggtgctggctgccctactgcatgccctgccactgaaggaggacttggaggagtgggtcaccattgggcgcctcttcagcttcctgtaccagagcagccctgaccaggttatagatgtggctcccgagcttctgcgtatctgcagcctcattctggctgacaacaagatcccaccagacaccaaggccgcactgttgctgctcctgacgttcctggccaaacagcacaccgacagctttcaagcagctctgggctcactgcctgttgacaaggctcaggagctccaggctgtactgggcctctcctagactgcaggctgcagccagtccagagagaatagagcctgcccaggccttaagaccacctctcagcccagttcagttctgccttaccaaagattctgagactcatacccatttggagccagccccacttgctgccttacagggctgtccctgaggctggatctgttacaaatgagtcatgacatcatactgtaataaaagcagcttgttttctgcttgaacaat

SEQ ID NO: 263135 - DNA, 387 bp, Homo Sapiens
ggcgatcggacgaggaggaagctccaccagctccacatctttggaagctagatttggggagagagaagctctaccccagacttaatacccattgaaatttcacctcaggtgttgtgtcctgtgtctggttaagtgtcccatggaaggggaaagccttcacgtcagaacccaaccctataccttttacttcttaaatggtgctaaccacaggtgtcccagggtgctctgtgccagttaagatttttaactttcaaggggcagggcatactgggaaatgtagtttcccaaactgccttatcacttgggtggacatatgtctccttttatgccttttggtcttgagtaattaacagcatcctcttccacgctcagaagtgttctggttgg

SEQ ID NO: 263136 - DNA, 796 bp, Homo Sapiens
  misc_feature (730)..(754): n is a, c, g, or t
gggggagtccagaatgagaagaaggaaagcgggtccggttccttcaggacccgcttcagggggcaccgcggcggcttggggaccatttggagccccgtcctggggagaaaacagctcacgtctatggccctgactgcttaggcgggagctgcgtgcagctcagcttctccggggcatttttttctacacgctgggtgagctatgaacaggccaactgcaagggcgagcagtttgtgtttgagaagggcgagtacgcccactgggactggtggaccagcagccagaggacagactcagcagcctgaggcccatcaaagtggacagccaagagcacaagatcatcctctatgaaaaccccaacttcaccgggaagaagatggaaatcatagatgacgatgtacccagcttccacgcccatggctaccaggagaaggtgtcatctgtgtgggtgcggagtggcacgtgggttggctactagtaccctggctaccgtgggctgcagtacctgctggagaagggagactacaaggacagcagcgactttggggcccgtcaccctcaggtacagtccgtgcgctgcatccacgacatgcaggggcaccaatgtggtgcctttccacccctccaactagtgcccaccccaacatgcctccttcccaggacccaggtctgctgcccaggaaccctccagacctccccagagagtgaattaaagtgtgactttgcagannnnnnnnnnnnnnnnnnnnnnnnnaaaacatggtcggccgccctcggcccctcgaggaagctttct

SEQ ID NO: 263137 - DNA, 773 bp, Homo Sapiens
tgggtggcgaattcggcacgaggcgggcctccacccttggctcagcccccactgatcctgcagcccttggcctccccactgcaggtgggcgtgccacctatgactctgcccatcatcctcaaccctgcgctcatcgaggccacctcaccagtgcccctcctggccacaccccgccccacagatcccatacccacctctgaggtcaactaaggcaggtcactcagagatcaggaccagtgcttcccaccaggctttccttgaccccacttctggctgtcctgcgggccacaagctcttcaggccaagtcagagctgctgttgctgccacttggatggggacctgaaaaagagaatgttgatagccccagctaagacccccaatcagctgtgggacctttttcctcctctgcgctccattcctgggggttcagcctgagagtgaactcagctgtcatctgcagcctctgcctccagcccggcagctctggggaggcatccgtgtgccggccctgcagtgcctgcccacggtcaggcattgaaaactaagcccaaccactctgcactttgtttcccactcccattagccctgggccacctcctccagttcttcctcttttactaattagttggtcagtttggagagttgactggcaccatggagggtaggcaggtgggggctgggtgggggactgcccacaggagcatgtacatatggaaaaacagaacaacagtggactttttatgatataataaatgtcttagtaccagcatcc

SEQ ID NO: 263138 - DNA, 985 bp, Homo Sapiens
aaggagcgaggcctgggtggcgaattcggcacgaggcaaaccttttgatgattcctgtccgaattgactcaatggtacctaagttggcactttttgcagccaaagatattgtgccagaagaagaactctcttatgattattcaggaagatatcttaatctaacagtcagtgaagacaaagaaaggctagatcatgggaaactaaggaaaccttgttactgtggtgccaaatcatgtactgctttcctgccttttgacagttctctgtactgccccgtagaaaagtcgaacatcagttgtggaaatgagaaggaacccagcatgtgtggctcagccccttctgtgttcccctcctgcaagcgattgacccttgaggtgagtctgttcagtgataagcagcttgcccctccctatagtggaagacagtggttggctagctttacctctgcctagttacataagtttaactcaggaatgtggcagagactgcaagttgtccatcagtatcctttcccctttctgtaatagaattctccatttaacaaaagtacatgactacccagaatactcactttcctagttagatttgtcttagtgactgttctagttaataggatataagcaaaaatgacaagtccttaaatggagatatcctgcccttcacctcctctttcttcctgctggctggaatgtatacatgatgactggaaactggagcagtcatcctagaaccccagatgacccttgggaaaagaagccattgcataaaaaaatcaacaaggttaaaaaggagtccagggggcctggtactgtaaaacattcctggtcagtccgtgatctgacaccctttgtacttttcaggggaaaaaaatagtctctcccctttggcttaagtccctggtaattggaaaattttttctagccacttaccatcgaaacctaataattgattcccagaaaaccctttgtgggctttcctaacctaa

SEQ ID NO: 263139 - DNA, 920 bp, Homo Sapiens
  misc_feature (534)..(534): n is a, c, g, or t
ggaaggagcacttccttttaacagtttcaaatgttccccttatgtaaagggggtccattgcaattcctgtttttttggggtaattttgcccatatggccacttttgtggagaagttattcccctgtaaaaggggggaaaataattcctttcctaaaagaatctaaaacatttcgacgactcccaatctttaacggagaaacttcactgggtccctgcatcaagctatagcaactcaattctggttgacaagggggtgaggctaagacgggaaggaaaaaagccaagtaaagcacagaccaggaagcccccgccgagaaggacaaagggtgttccaatttcagtaacttaagcccaacaatggattcaattcagttcaccacaaacaccaccagagtgcccaccgggtgcctggagctgcacaagcaagccaagcacaactcggtgtgagctcagacccctttaccacctatgggaaagccagcaagttctaagcacttggtaattccaatgaaacaccatttgcattttttttngtgtaacatttgacttacagacatggagcttcaagtctttggataatgttaagaccattatgccacatcctttgttctctgccttctcccacttagcatcagacattgagcatttcttcaaagacatctgcccaccttttactgttctccacctgtgcctttccttcttctcttgatatgtacacgagtgtgttcactgtggcatgtttcatcttatgaaaagcctaaacatggatataaattacgagcaggaatttaattctaactaaagtcctgtggcgatggaatccagcctacctcaaatccctttaaaggtaggattaatttttcagccttctctaggttaactacaaaccagtaggcggctttggcttcagcactgctcc

SEQ ID NO: 263140 - DNA, 1144 bp, Homo Sapiens
aaagagcgaggcctgggtggcgaattcggcacgagggcgcgcctggagggccgcgagttcgagtatctgatgaagaagcgctcggtgaccatcggccgcaactcgtcgcagggctcggtggacgtgagcatgggccactcgagcttcatctcccggcgccacctcgagatcttcacgcccccgggcggcggcggccatggcggggccgctccggagctgccgcccgcgcagcccaggcccgacgccggcggcgacttctacctgcgctgcttgggcaagaacggggtattcgtggacggcgtgttccagaggcgcggggcgccgccgctgcagctgccgcgcgtgtgcacattcaggttcccgagcacaaacatcaagataacgttcactgcccctgtcccagccgagaagagagagaagcaggaggcgtctgagtctccagtgaaggccgtacagccacacatctcgcccctgaccagtcaacattccagacaccatggcccacctcatcagccctctgccctcccccacgggaaccatcagcgctgcaaactcctgccccgtccagcccccggggagcggggtcttcagggtacaaggtgggccgagtgacttggccccatgtctggggaacccccctttccaacacccgtttctacacattgccgtctttgaacaaaaactttctacagccaaggccccccgttggaacaacacacttggaaacaaaggggacacggcctttttcccaccgccggctttgggggcaagaaccacgggcctccccccgggacacattgcggcgcacttgggaacccttcactccaatacagccacccgggcccccccgggccaaccctttactaacaccgattttccaccccgctttaaaccacgtggcccggggcccacacagaccgcccccctgggcaactttaacggcttttcccacacgggggccccggaaaacgcttgccatcaacccccggaaacctcttcgcgcggcccttccacgcctcccgggaaaccagtagaacccaacaggcccctcttccgcaagcccgcccccgtgtgggaccaccccaggggcggctacacactgctctcaacttacctcacacccaaccgcacgtttcccacccgg

SEQ ID NO: 263141 - DNA, 463 bp, Homo Sapiens
  misc_feature (36)..(36): n is a, c, g, or t
  misc_feature (135)..(135): n is a, c, g, or t
gcgttgaatgactaaacgagtacacttgcaaaagcncccaataccaagaacacagcagcaacaccagaatcaagcccacatccccaccgatgccctggcagggctgtcactggacaggcaggcgaagtgacaggncaggtgacactgagggccctgtggcctacacactggtcccccaggggctgccttcaaggctacaaagcctttaccttcgggctgtctccacctgaagcttccttttcattttcaggctgtgagttgtcagccattaaattgaggtcagatggcatcactcggcccaccttgtaccctgaagaccccgctccccgggggctggaggggcaggagtttgcagcgctgtggaagagaaaaagttgttcctattagtctatcacagtgcacgcatcctactgtgcttcagcaactggctttaattacagggataacaaatacagaaatgtta

SEQ ID NO: 263142 - DNA, 1030 bp, Homo Sapiens
agccacggcaggagcggagccgggcccggggctgggccggcgtcgaacgcagcgaaggccggaggatggaaccaggtgaggagctggaagaggagggctctccaggtggccgtgaggatggcttcaccgccgagcacctggctgcagaggccatggcagctgacatggacccctggctagtgtttgatgcccgcacaacgcctgccactgagctggatgcctggctggccaagtacccaccatcccaagttacccgctatggggaccccggttcacccaactcagagcctgtgggctggattgcagtgtatgggcagggctacagccccaactccggggacgtgcagggcctgcaggcagcctgggaagctctgcagaccagtgggcggcccatcacaccgggtaccctgcgccagctcgccatcacccaccacgtgctctcgggcaagtggcttatgcatctggcaccgggcttcaagctggaccacgcctgggctggcattgcccgggccgtggttgaaggccggcttcaggtggccaaggtgagcccacgtgccaaggagggtgggcgccaggtcatctgtggttacacggacgacttcacggaccgcttgggtgtactggaggcggattcagccatccgtgcagcgggcattaagtgcctgctcacctacaagcctgatgtctacacctacctgggcatctaccgggccaatcgctggcacctctgccccactctctatgagagccgtttccagctttgggggtagtgcccgtggctcccgagtgcttgaccgtgccaacaacgtggaactgacctagaggggccaaattgggggagactgcccactccccctccatggctgggggttggatcctccctggcttcctccttgtcccaagaaaggccacacccccccagcttctgggggactccctaggggcactttggggaactacccggcatcctttcatccccctttggaacttctggcccccctggttcaggggcttgcaaccaagcccccct

SEQ ID NO: 263143 - DNA, 1001 bp, Homo Sapiens
ccctccgggaggggggggcccttcttttatccccaaaagctaaaatttgggtcccaaattgttgatcttatcgggcccaagggggggatcccatttttccccggaaagttcgggggaatttcactaaagttttcggtgggggttttgctgaaagttgtttcggatgaaacccatatgcccccccgggctttgggagggtatctatcattggccctgcccccccagtagttgcctgttgaaaagcgaagggggggagaaggtgtccaaaaggggtggcccctgaaggaggttccggtgcctgcagtatttcttcttttagccatcccctttcaccaaggcaacttgcgggtcccttgggggttttggaggaggagaatcttgtttatcaggctctatggagctgaccatgttttcagtgttaatttcattcactcccatcagcaattttctgagctccatgaatttcatatagttgtagctgtttttcaaacagttgggcaatagctctatgaacaagttcatattgctcctttgtttgtactgcagaatgcctttgtgttctcatttcttgtattaaattaaatacattaaattcctctggtattttcccagcttttagtaaattccacgtataatctatggcacaaatggcacctgttcttccacagcctgcactgcaatgaatacaaataggaacatcgttcatgttcttgatatgttcctcagttaagcttatcatgtccagaatagaatcaaatgatgaacggaacatgcagtggtctggccagttcacataatgaaactgatacagcctacgagattcatctttgaaattcaagtaagagtgtcctgatgaagtagtctgttcttgcttgttcatcctcacaagaaattttaaatggtgcaaacgttatggggtcttctccatacaaaggccagtagcgctcacatttgtttccttcccatctcaaactcggagcgcgtggtcgacatatgtaaca

SEQ ID NO: 263144 - DNA, 1089 bp, Homo Sapiens
aagtagcgaggcctgggtggcgaattcggcacgaggcggagagaaagccgggacttgaggtggtctcctagcaggaggagcgagagagcccagcagcgatacggtggttttcgacccagctaggggccaggccgtacgattgggagcccggggcagccccccgcgcagtcaccacgacgcggcacccgtggacgggcgttggctctgcgtggtgggcggctgggacgggtctcgccgcttggccacagtgaccgcactggacacagagcgcggtgtgtgggaggcgtggacagggacccctggtgactgcccccccgccggcctcagtagtcacacctgcacccgaatctctgaccgagagctgcaggtggctggccgggagggcggtatccacactcagcgacgctatggaagcatctacacattaaggctggaccccagcgcccgcacctattgctacaagcaagaaggctgccacacagcctcacgctcaggtcactgtgcggccctgctccaaactcctggaccccatccaggtcatcagctattgctctttggaggttgcaacttagctgaaccagaagtagctgggcattggagtcatgggaaaattaagtcctttctttctccccaaggaggaaccacctgttgctcctcatttgatggaacagcttgcaaggcttgtgagcagtgggcaggggtcccagaaggggccccatggactacggcatcactcatgttctgtggtcgggccctttgctgtgctgtttggtggagaaactctgaccagagctagagacaccatctggcaatgatctctacatctatgatactcgcacatctcccccttttggggtcccacttcccctgtgcagatcgggggatgaaacgcatggggccatcccacctgcctttggaatgatcagctttacctgggttgggggttttggtgaagatggaaggacacccagtccacgggtttgcatcctggactttatctaaatagtgccaagacacctcactaaccctccgttttggtttgctttggtgcaaacctataagcggtatcccaagagctatctgctttcc

SEQ ID NO: 263145 - DNA, 1170 bp, Homo Sapiens
  misc_feature (77)..(77): n is a, c, g, or t
  misc_feature (86)..(86): n is a, c, g, or t
  misc_feature (92)..(125): n is a, c, g, or t
  misc_feature (210)..(218): n is a, c, g, or t
  misc_feature (250)..(298): n is a, c, g, or t
  misc_feature (319)..(320): n is a, c, g, or t
  misc_feature (345)..(345): n is a, c, g, or t
  misc_feature (349)..(349): n is a, c, g, or t
  misc_feature (364)..(373): n is a, c, g, or t
  misc_feature (413)..(618): n is a, c, g, or t
  misc_feature (621)..(621): n is a, c, g, or t
  misc_feature (630)..(887): n is a, c, g, or t
  misc_feature (889)..(909): n is a, c, g, or t
  misc_feature (911)..(911): n is a, c, g, or t
  misc_feature (913)..(920): n is a, c, g, or t
  misc_feature (922)..(939): n is a, c, g, or t
  misc_feature (941)..(943): n is a, c, g, or t
  misc_feature (946)..(952): n is a, c, g, or t
  misc_feature (954)..(956): n is a, c, g, or t
  misc_feature (958)..(973): n is a, c, g, or t
  misc_feature (975)..(987): n is a, c, g, or t
agggcggggcggaatacggtggtcagggtaatttatgtggcgggcggcatcgggcggggccggggtggttgaaaganatgctcgangcttannnnnnnnnnnnnnnnnnnnnnnnnnnnnnnnnntcccgggaaggcggggataaggagtgtgaggcgcggcgaccatggccggggtggggtgggtagtaatcgccggctggtcggatcnnnnnnnnncgtcgcattgcgtggagtgggtgtgcaggtcnnnnnnnnnnnnnnnnnnnnnnnnnnnnnnnnnnnnnnnnnnnnnnnnnctcgtgccgcggcgaatattnngagaggtgtggtgggggtgctcccntccnctggggcgggtcccnnnnnnnnnntgtcccgagccggcgactggggcgacgtatttttgtgccnnnnnnnnnnnnnnnnnnnnnnnnnnnnnnnnnnnnnnnnnnnnnnnnnnnnnnnnnnnnnnnnnnnnnnnnnnnnnnnnnnnnnnnnnnnnnnnnnnnnnnnnnnnnnnnnnnnnnnnnnnnnnnnnnnnnnnnnnnnnnnnnnnnnnnnnnnnnnnnnnnnnnnnnnnnnnnnnnnnnnnnnnnnnnnnnnnnnnnnnnnnnnngcngctgctggnnnnnnnnnnnnnnnnnnnnnnnnnnnnnnnnnnnnnnnnnnnnnnnnnnnnnnnnnnnnnnnnnnnnnnnnnnnnnnnnnnnnnnnnnnnnnnnnnnnnnnnnnnnnnnnnnnnnnnnnnnnnnnnnnnnnnnnnnnnnnnnnnnnnnnnnnnnnnnnnnnnnnnnnnnnnnnnnnnnnnnnnnnnnnnnnnnnnnnnnnnnnnnnnnnnnnnnnnnnnnnnnnnnnnnnnnnnnnnnnnnnnnnnnnnnnnnnnnngnnnnnnnnnnnnnnnnnnnnngngnnnnnnnngnnnnnnnnnnnnnnnnnngnnnggnnnnnnngnnncnnnnnnnnnnnnnnnngnnnnnnnnnnnnnactcccatccccacagagcaagctatggggagcgagttggagccgaatgcccagcctttctgctgccggtagttctgcatctctagtgcggctttgcgcgggaatgtccggaggagcttcagcacttgctgtttccaggatagcagccgtcctcgtgccgaattcgccacccaggcctcgctc

SEQ ID NO: 263146 - DNA, 1132 bp, Homo Sapiens
  misc_feature (47)..(70): n is a, c, g, or t
  misc_feature (1064)..(1064): n is a, c, g, or t
  misc_feature (1108)..(1108): n is a, c, g, or t
tgggtggcgatctcggcacgagggcggcgccgcagccatggagggannnnnnnnnnnnnnnnnnnnnnnntcgggtggctgcgctgggaggcggcggtgagaggctcgcacgcctccagcccggccccggccccccgggagggagagccgagcagccccggctctgggctacggactatgggcgaatagctctgaccacccggcgaagagctgagaatgaagcggagagcatcagacagaggagctggggaaacgtcggccagggccaaggctctaggaagtgggatttctggaaataatgcaaagagagctggaccattcatccttggtccccgtctgggcaactcaccggtgccaagcatagtgcagtgtttggcgaggaaagatggcacggatgacttctatcagctgaagatcctgaccctggaggagaggggggaccaaggcatagagagccaggaagagcggcagggcaagatgctgctgcacaccgagtactcactgctgtctctcctgcacacgcaggatggcgtggtgcaccaccacggcctcttccaggaccgcacctgtgaaatcgttgaggacacagaatccagccggatggttaagaagatgaagaagcgcatctgcctcgtcctggactgcctctgtgctcatgacttcagcgataagaccgctgacctcatcaacctgcagcactacgtcatcaaggagaagaggctcagcgagagggagactgtggtaatcttctacgacgtggtccgcgtgggtggaggccctgcaaccagaaaaatatcgggcacagagacctgaagctggggaacatggtgctcaacaagaggacacatcggataaccatcaccaacttctgcctcgggaagcatctggtgagcgagggggacctgctgaaggaccagagagggagccctgcctacatcagtcccgacgtgctcagcggccggccgtaccgtggcaagcccagtgacatgtgggccctgggcgtggtgctctttcaccatgctgtatgggccagttcccctttcttacgacagcatcccgcaggngcttttgccgcaagattcaagggctgccgagtattaccatttcntgaaggattggacggggttttttt

SEQ ID NO: 263147 - DNA, 1246 bp, Homo Sapiens
  misc_feature (678)..(687): n is a, c, g, or t
  misc_feature (993)..(993): n is a, c, g, or t
  misc_feature (1109)..(1109): n is a, c, g, or t
  misc_feature (1127)..(1128): n is a, c, g, or t
  misc_feature (1217)..(1217): n is a, c, g, or t
gagcttagtccacccttacgtattcccctatcctctcctgctggtgattccttaggatgggggccgactgggttgacccagagcccagaagggttctctccgcctcttccttccaccaggaggagaaaccctcagggcccatcccggacatgctggccactgcagagcccagctccagtgagaccgacaaggaggtgttgtccccggctgtgctagctgcagccccctcctcctccatgtcggaggagccaggccctgagcaggcagccacaccgccagtgtgggaacgtggaggggctggagggatgcagcagggctcctccccagccccacacagctgccaatctggccccggacccacccctggcctgaccaccatactctccgggaccagcgaggacctgcggccttcccagacgacgcccccctccaggggaagcaaatccccttgcctcccagcccctgggctgcgtgccctcgagtttttccccagcggggccggggaaccctggggcacagccaatcttggcccgaacgcgaacttgggcccgggcctccacacccgagtccccactgggggaagaggcccaaagccttccattaccccggcctggccctcccgagccccccttgcgaggaccgttgccctagccccgatgaacgaaagccccctttttnnnnnnnnnnaatgggccacctagtgggtgcacagatgggggtacccccccctgcggggcatggggggggatttcgcaccacccacagctccccgcataaacccctatgggccctacctctcacaacgcaggtaaatccccgcctccaatatctcccccctcgttaaacatctcttcccccacagacctgcttgaggcggaaagttaaaaacctgtcggggcccccctacctccatgtatgcgtgccccccttttaccctccttagcacctcgtcccgcacccccgcgggattataccactgcccgccgcgcttcncgcgaagaagccccatacgaacgttggtggctcacatgagctgctctgtgacggtgcgcgcccgggtgagagagcacactgttgcgctggcgaccggtacaagagacccccctctnacgctcgatgcctgcgcnnggcggagggtccctccacaccaacctgcagcgtgcaccgtccttttgctgatagataacatgcagacagaatgctctccccactcatanaatctgccgtctgcggtatccctggcgca

SEQ ID NO: 263148 - DNA, 1036 bp, Homo Sapiens
ttgtacgcacttcatctacacagtcaaattcacaggacgctaagatagacttcgagagttgtggatcaagaggaaactctgacatgatgattccaaattcagaaagatttccatcattatccagtgctgccagataatctaagtcttccaatgcctgcatcaaactttctggtgctaggaaaggaaaaaaataataatttaagagtctcatatggctaagatggagaaacaggtactggacttttccctcctgcatgaaacaagcaaacaatggacaaaatatgtgaaacaacggtttgcaagccaccaaataccagggagtgaaggatagtgattcttgagagggcaaactcaggaggggagccctgtgattgtccagctcatgctccgaggagggtcccagctgcagtgtgcatgcggggggaacccaggtggagcctgccagcctccctgcagtaggaaaacaatgccagggatccagggagactaaggtggccggaactcgcggtcacagtactggagagagacacacagatctaagtcgggggccagagggagctccctcaactaggcagcacagccctactgatcagcgcatgtgtggaaggaacccacctcacggccaaagaaagagccatgtgagaagattaaaaggaacagtggtgctggacacacgacctagggtaggggcctgttcccaccaccctagctggaaaacctcatgatttatgggggcactgggtagaaaacacaagtgagaaaccctagatgggcactgccacctgacacagctatacagcaggacctgaaaggatcacactgcatcctaggacaaagctcaaaagtacctctgggactacaaaaatattcagtgcccaagaaggtaaaatgtacaatgtctagcatccagtagagaggcatgaaaagcaggaaaatacattgcataatacagagaaaaattaatcacaactgacctggatctcagatgctagaaatagtagaccaaagatgttatttcccagtgcaaataaagaaa

SEQ ID NO: 263149 - DNA, 421 bp, Homo Sapiens
  misc_feature (39)..(39): n is a, c, g, or t
  misc_feature (54)..(54): n is a, c, g, or t
gaggtttcccaaagctaagggtgggtgggaaaaaaaagncccctaacccctaangtccctgtgttaaagcaaccaaatgttcccttcctaaaccttcctcaaaatggctctttcctcctggccctaaaggtgggttcccttaaaacaaatgcgcttgatcaagtagggctgtgctgccctagttgagggagctcccctctggcccccgaacttagatctgtgtgtctctctcccagtactgtgaccgcgaagttccggccaccttagtctccctggatccctggcattgttttcctactgcagggaggctggcaggctccaccctggttccccccgcatgcacactgcagctgggaccctcctcggagcatgagctggacaatcacagggctcccctcctgagtttgccctctcaagaaat

SEQ ID NO: 263150 - DNA, 455 bp, Homo Sapiens
  misc_feature (31)..(31): n is a, c, g, or t
  misc_feature (124)..(124): n is a, c, g, or t
  misc_feature (372)..(372): n is a, c, g, or t
cagagaaagagcccttgtgagaagattagangggaacaagtggtgcctgacacagggcccctagggtaagggccctgtccccaacccacccctagcctggaaaaccctcatgatttatggggcncctggggtagaaaaccacaagtgagaaaccccctagatgggcacctgcccaccctgacacaggctatacagcaggaccctgaaaggatcacactgcatccctaggacaaagctcaaaagtaccctctgggactacaaaaatattcagtgcccaagaaggtaaaatgtacaatgtctagcatccagtagagaggcatgaaaagcaggaaaatacattgcataatacagagaaaaattaatcacaactgncctggatctcagatgctagaaatagtagacaaagatgttatttcccagtgcaaataaagaaataaagatagcaagctgaaaac

SEQ ID NO: 263151 - DNA, 1198 bp, Homo Sapiens
tcgctccggcacacaaagggcaataggtggggcttacgattgcggtaaagaggtggcaaaggtggtcccctttgggttgctgcccgttccagagccaacgcgagcgtcggagttttgatggggctccccgggcttttggttgaaaggtatccgggttaatggtggagaaaccatggcccccgcccggttgtcccatggcaagcggttgggggggacgccggccccgggggctccttgggacattcatgggggcccccgcccttccttgttatatcttggaccgggtaacgagcccgcagggttggattttttctgtcagccaggcagcttggtggccctccctgggagtcaaagagggggcaggggcaccgtagtccgtctgcgtggttctcgttggtgaagccaaagtggtagatgacgggggtgatcctcacgtcgttcgtaggggccctggagcagcaggaaggagcactccagcggtgccgtggccttgctccttgaggaggagctggaaggagagcgtacgcttgcaggacaggttggggttacgctccgagtcgttgactcgagctttcaggacccacgtctggttcagcactgtgaacctgggcgtctcatagtacaggcgcgtgatgaagtcgtctgtgcggtacggccggaactggacctctgtgtagccaatcttctcgaagctgagcaggctgaagatgctgttgtacagctgcatctccttgcggtggctctggtccatcccatccaggatctccatcagctcactgcctgtcttggtcgggtgggcgcacgcagcctcgtgcaccgtcagctcatggaaggggccgggccatgggcaagccgatgcgtttgtacttgcacttgggttacccttgtccgtggcattcctctttctggtgcctctccaggagggagcggggaaactggcgcaggcagaagccacactctgaaggcagctcgctcacggctttctccacggccaggttccggcagcagaggctcttactgatctcacaacgacaattggggcacgtggcctgctcctccttcagccgggcatctgctagtaggtggataaaacagccagcgcacatcaagtgaccattagtacactggtacacggaggccttgggcaggtccgaggacgacggtgcagcacagcaccgagtagagccgctccttccaa

SEQ ID NO: 263152 - DNA, 806 bp, Homo Sapiens
gctgggtggcgaattcggcacgagggaaggccaagacctccaagaagaagaagcgctccaaggccaaggcggagcgagaggcgtcccctgccgacctccccatcgaccccaacgaacccacgtactgtctgtgcaaaccaggtctccttatgggggagatgatccggctgcgacaacgacgagtgccccatcgagtggttccacttctcgtgcgtggggctcaatcataaacccaagggcaagtggtactgtcccaagtgccggggggagaacgagaagaccatggacaaagccctggagaaatccaaaaaagagagggcttacaacaggtagtttgtggacaggcgcctggtgtgaggaggacaaaataaaccgtgtatttattacattgctgcctttgttgaggtgcaaggagtgtaaaatgtatatttttaaagaatgttagaaaaggaaccattcctttcatagggatggcagtgattctgtttgccttttgttttcattggtacacgtgtaacaagaaagtggtctgtggatcagcattttagaaactacaaatataggtttgattcaacacttaagtctcagactgatttcttgcgggaggagggggactaaactcaaccctaacacattaaatgtgggaaggaaaatatttcatttagcttttttattttaataccagtaatattattactttatgaacaattttttttatttgggcatgtcccccaaaaatacagccttatagtaaaatggggtttctttgctggccatgatggtatattccattataacaatttcag

SEQ ID NO: 263153 - DNA, 1085 bp, Homo Sapiens
  misc_feature (134)..(142): n is a, c, g, or t
  misc_feature (720)..(729): n is a, c, g, or t
ttttaaaactttcctcggcttcgtggtgaccagtaggtgaacgtgaaattgacttaacatgcgacagaccagtttggtttgttgcccccaaaataccctccttccccccaccttttactgagaagacttttttnnnnnnnnncccaaacaacttgggaaattgcatcaagcgtccgaacatgctgcttacaactttagaaacgcaaaatgcgttgttgtgggagttgtgtaatttttagtaggtgctcaaatacttgctgaacttggtgtctatttttaagtcttgcccattgatgtaaactgtccctaggtcacgtgtatcttgaggtctaaaagattatttatgcaataaattgaaattcccatagccaattaaagattcagacgagcctccactctttttcattggttctttaaatttgcctcggtagctttgcgatgcatggtttgcgagcaacctttcttgcagaatcgtcaacgtaagtttttctgaccgatgaaaaagaacctctaaaaatacaaggctctcttaaaatgtaatttggagccgtcttaacttacacatttcttgagaagttaaaggcacctccatagagaaacttgttcatctagtaagtaaataccagagtttcaaagcggctggattgttccaacaagggtatcattgcattaattattaaaatagagctttctatacaggagggtgttgtttagagtggnnnnnnnnnngaaagttctttattactaaaacaaagtggaaacttgagaccacgattctttgtaaaacattataaaggtacttttctccataaagggtacataatggattgggatttttggtaacattttatttttatctttcctttcggggacattcttttagcttgtccttgaatccggagtccccctaaggtaaaaaggacttcaaattggctttccaccccaccttcttcttggtaaggacacagtaatattggccgacctggggttttataaaaatggggttcttccaccaagaacgtggaacacttccagaataaagcttggagaaacataggcctctctagaacagacgccttattcca

SEQ ID NO: 263154 - DNA, 1169 bp, Homo Sapiens
  misc_feature (51)..(122): n is a, c, g, or t
  misc_feature (163)..(212): n is a, c, g, or t
tagaaatcacattcactaagcagtggattgaatttaagagtgctgcccctnnnnnnnnnnnnnnnnnnnnnnnnnnnnnnnnnnnnnnnnnnnnnnnnnnnnnnnnnnnnnnnnnnnnnnnnagtttgaggctgcagtgcactatgcttgcacctgtgaatannnnnnnnnnnnnnnnnnnnnnnnnnnnnnnnnnnnnnnnnnnnnnnnnngagagcactgcctgaaccttggtggcactgggaagctctggcctgagagttaaacacccatgctgaatggtacagtgtgcattctctccagctgaaaactttcttcaactttcctaaattcttactaaattcagaggaataggataaagatcacttagagaaagggtgcttatggacatagcctgagtttcctttaacctctctccaatgggtgcttttaactagcttctacatggcaagctgtttcagtttgcaaaatcactgcccagcatgtttgaggtcagttggcaccttaaaacacctgttctccagcccttggacagtggagagaatctgtaaaagtgtgaccccctctaagatttcgttttaaatgatcagattcggttccagttttattcttgttgagtttttccctatgaaggctccttttgaatgtgtcttgagacccaaattgagcatgttgctgttattcctgccctgcacctgtggagcaggaggtggcagggctggctgtgctgggttccagctcgctcctgccgagggactagcttggcctttgcgctttgattcccagatagtaagatgagtggaagtgtttatcgagcatgcaaaagaaaccctcacggctaacggctctgggagttgtgtctgtgtgacctgagagtgatcccatctcctgcctgtgtgaggtagcagtgggcactttttcattgagacaaactcccagggtgtccagagggggttctgccccttgtgaaggcccattccttggcacttagagacagaaagaactcagcaatctttcgttctagttatattcggtctttgaaactgacaatctttgaaatgtgaatactgtaacaatatgttttcttggattgttgtctttaaaaaggatttttgtgaagcaattgatttatcaaagcaaaaaaattaaaaatagaaacttgcaacttt

SEQ ID NO: 263155 - DNA, 905 bp, Homo Sapiens
ttttacggatgggtggggggcctctgggccaggcccagaaggccccctccagttacagccatccattccaattcaccccccatttcagggataacgggaaatgatttttgccatagagaaagaggaggggctggggcctgttatcagctccctactcttttagagggaactctgctcaactcttcctagactgtcttctgaaatacaggtaaactgaggcagtggaagggaaaccgcactggccttggcctgtcttgggacctgaacttggcctgctgttcaccctgccacctccaaagtttgggtgaggggcaggggtctccaattcttctggaccttcttccagaatgagccccagtagatgagggagtgccggcccccacaaactctccctgtgaacaccatctgcaggatgggatgcctttgaagagtcagcacgggcagccccagccccttccaatcagagctgggctgtatcaaaccagagcatggtggaggcaacggcgtgtgaattctgaggctagggataaaaataacacgttggcttttaccctgggcccttgaatctcttgctctggggggaagccgagcgccatattgtgaagacactcaagcagccctgtgggttggcccacctggggaaggactgaggcctcctgcctacagccaggcctcacttagaagtgcatcctccaatccttagctaagatttcagacaacagcaacctcatgagtgaccctgagccagaactgctcaaactgttcctgacacctttgcccccctccagagtagttctgacaagtggggtgaggccgtcctaccagagacgccccaccctctcccctgagccagggtctgcattcgagtcctgcctcgtgccgaattcgccacccaggcctcgctc

SEQ ID NO: 263156 - DNA, 1039 bp, Homo Sapiens
  misc_feature (653)..(702): n is a, c, g, or t
  misc_feature (744)..(798): n is a, c, g, or t
acgtggagtcgcagttaccgaaaagggggtttgtttaaggcgccccaggggggccaaatttatcgcggggccgggggtatgaaaggggaaagtccggctaagggagggccggagtgagggccaccgagggcgggaccccacgcaccccggcgaaagggtgcagtgtggccgccccacggagtggggggagctgggaagaaagggggctgcggtgggctggagagaagcgggacggggaaggcgctcgggaagctgtccccgcggcgtcgtgcgctctggggacagaggaggggaggtctgggcgggcgggtggcgtgtgaccgccgaggctgcggcggctggaacaggtgagcggccgctgggttgtgggtccccgcccttcaccgccagcgtgcctcctcccacggactctctccagcgctgagctgctccgcggctccccttgctttggggttttgcaactggctgctggcttttttcccctcccctgtctcggtctctccttcttcttttaggttgctccaccccggtcaggatcaggcgagggggaaccagcctgagtgcagctgccaactcccgccgagtgcgtctgcgaactcccggagcggagtcccgcgtgccgccacctccccgcgggacgcactctcctcgcnnnnnnnnnnnnnnnnnnnnnnnnnnnnnnnnnnnnnnnnnnnnnnnnnnccttttccaatcacatggcattttaagaatgccggaaagatnnnnnnnnnnnnnnnnnnnnnnnnnnnnnnnnnnnnnnnnnnnnnnnnnnnnnnngcgcagcggagcgggctgctggaagttttggtgcgggatcgctggcacaaagttctggtgaacttgagcgaggacgccctggttctgagcagcgaggagggcgctcggcgtacaacggcatcgggaccgccaccaatggctcgttctgcaggggcgccggggctgggcacccgggcgcgggcgtgcgagtgcccccggactcgcccgccggggtccgcaccgctttcaccgacctgcccga

SEQ ID NO: 263157 - DNA, 964 bp, Homo Sapiens
ggtcgtgtgtgtgctttgtgccatgtggagtggggttagactggtatggcgtgtggggtttgtgggtctggtcgttggtccgtcggtgcctcttctgttgtgttgcgcgtttcgtttctagggggcgcgtgttctgccaacgtgtttatggcacgtcgtccgctgcgggtgcgcgatagcatgccgtttcgaggttgtagcttggtgcctgcgtggcttggtggagcttgtgcatattagagggcatgcaggctcatggtcttgtggatgcatattctgacagcaccaggctgctgcagctgtccttcgcacacgctgctcctcggagctggcctgtcctggcatgccacctccagagcctgtcatggtgctgtgagcccggcctgtgggcgcctgcccgggttgcagcggggagaaggagcgcagggcagaggcgacttcagccctgtgcctggagccctgcaggtctctgggcagtggagggccccggcaggatgagccagctaccacatttgcgataaggctcaggggctcagactcagattgtaaggactggatagacgtaaagagggcattaccctgccagtggtcaggcatgtagtggatgtgagcgaggatcacgcggagcagctgctcagggcagaacaccatgtgctggtccgggataaaggacctgcacacggtcacggtgacccccaggagtgtgacggtggtccagcacatgttcccacagcccaacacatcttcgtcataaatggtgagggcaataagcacagcccaggatggagccagcgaagaaggctccattcttggccagcagtgtcaaaagaggtgacaagaagcaattcatgtacttggaggcgggcttgtagccacggttgaggcgggactgcagctcgtgctccagctcgttgaagtggcggaggtagcagcggccatagagtgacccagcagcgtgctccca

SEQ ID NO: 263158 - DNA, 1117 bp, Homo Sapiens
  misc_feature (970)..(970): n is a, c, g, or t
  misc_feature (1001)..(1028): n is a, c, g, or t
gcacggaaccgcgccccgcccaccccgcccggtccatccacaaacccatcgaggcctggcgtggcgaattcggcacgaggctgggatgcaccggccagaggccatgctgctgctgctcacgcttgccctcctggggggccccacctgggcagggaagatgtatggccctggaggaggcaagtatttcagcaccactgaagactacgaccatgaaatcacagggctgcgggtgtctgtaggtcttctcctggtgaaaagtgtccaggtgaaacttggagactcctgggacgtgaaactgggagccttaggtgggaatacccaggaagtcaccctgcagccaggcgaatacatcacaaaagtctttgtcgccttccaagctttcctccggggtatggtcatgtacaccagcaaggaccgctatttctattttgggaagcttgatggccagatctcctctgcctaccccagccaagaggggcaggtgctggtgggcatctatggccagtatccaactccttggcatcaagagcattgggctttcaatggaattatccactagaggagccgaccactgagccaccagttaatctcacatactcagcaaactcacccgtgggtcgctagggtgtggtatggggccatccgagctgacgccatctgggtggcggtggctgacggtactgtactaaccgcaccgcgacgtcaaatctgaatccccccataatcaaaggccctgcccaatccatccagcatgccattaccccccgggcctactttcgcggcgccgtcagccaaagcgcctcgcaaccgctgggttccccacccactcgctgttcccattcacccctcttctcccgcctccctatcccgcgctcctatcgccccgactctccccccgcaatcgcgtcgcttcaccctctgccttttcccgctctattaccccgctcctctctttcctgttacgcttgtnatccctgtttccgccgccacctcatactttnnnnnnnnnnnnnnnnnnnnnnnnnnnnttgcgtcctcccttattaccgcgccttactccccttgttacccccctctccgtacccccacgttccggctgagcccccccactactatg

SEQ ID NO: 263159 - DNA, 993 bp, Homo Sapiens
  misc_feature (923)..(923): n is a, c, g, or t
aaagagcgaggcctgggtggcgaattcggcacgaggattggcgacctgcaccagtgccagcgcacatgggacaagatcttccacaataccctcaagatccacctcttctccatggctttccgggagctgcagtggctggtggccaagcgggtgcaggaccacacgacggttgtgggtgatgtagtgtccccagagatgggcgagagtctgttccagctctacatcagcctcaaggagctctgccagctgcgcatgagctcctcagagagggatggagtcctggccctggataatttccaccgctggttccagccggccatcccctcctggctgcagaagacgtacaacgaggccctggcgcgggtgcagcgcgctgtgcagatggatgagctggtgcccctgggtgaactgaccaagcacagcacatcagcggtggatctatccacctgctttgcccagatcagccacactgcccggcagctggactggccagacccagaggaggccttcatgattaccgtcaagtttgtggaggacacctgtcgcctggccctggtgtactgcagccttataaaggcccgggcccgcgagctctcttcaggccagaaggaccaaggccaggcagccaacatgctgggtgtgggggtgaatgacatggaacaactgcgggctggggatcagcaaattgcccgccccagctggcatggggaggccctggaacaaccgggtaaggggacgggcctggagcaggggccgcctggaaaaaactctttcttgcacagatttaaaagacgacttggcccggcatgggatcatcccacgccgacctgaacggccaaggctcgccgcccaatccctgacgagtgggggccgtccggtgaacggccgactcggacactggatggcggaccagggggggtgangagttgcgagaagaaagggtgttcacggcccgatgcctacagagagggccgcgaaaacgctctctggtac

SEQ ID NO: 263160 - DNA, 1320 bp, Homo Sapiens
  misc_feature (939)..(939): n is a, c, g, or t
aagggggtgttgtttcccttgggaaggggactcttctccttggggggagaaaatctccagaaatggtgccccccacttataggccacagttacccacctgggtttttgggttaaccaggaaagatttgggattgtggtaaaaaaggcaaactcttccccgggtttagagagggaaaaggggattccccggaccttgggggttcccaattccctgttaagctcttttccaaagccaatttagggctttgggaaagggaaggtggggtaccagggctttagggaaacccgggtttctttattagaccacttggaaaccccccggaatggacaaaattggttccccattttgccaagggggagatccctggtggagggggaattgcaagcagagaaggcaagcaagcaggatccctctttgggaaacttttttgataactagcatctgggagggttgcttggcactaggcgggttttccccatactccagaagtggtcccaataggtctgcatggctgatgctgtttgccagcttctggattcaaggaaggaaagtcctcctcttcaaactgcaacttttccaccttgtcttctttcttttcttccctaatctccataggtggcttttcctgaaaagcacaccctttccgggagtggaagctgccattccaatggcgatggttccctgtgccacctccactacgttggctcatgccatcatgacctcgggaagagctatgccaaccagatgggttccctgtgattccagcatatgctcccttagagacaccagagtccacagaatcatggcggaacagggagggctggtgccaagaatctcctgcagttcgtaggggaccattgttaaaaaaaccatcagaggaattatgtcgacggcggcttactccaaatctaccttctccctctgggtaggtgcctccnccgtgtttttccgaaggtggccagtaggtgacttagctgactgtggtgttgagaaatttagccaagcaggaacaaaatccatctgcgcccatttaggtccagtgtctcctttcagtaaggtgaggcatccaacctcatggccaggatcccagagtgtaacctctgtggtcccgtttctgaactcgagtcggccagctggatctcccacaaggtttccttgttaaaagggtgcttaagtaacctggccggcagcacgacttatgatgaagcacgaagaagccaggttctgtgtcgatcactctctcagtcccctcaactgctcatcttaaactatttggttcctgacacgtttccaaaaggggaaaggggaaaaggggaagg

SEQ ID NO: 263161 - DNA, 941 bp, Homo Sapiens
tgggtggcgaattcggcacgagggatgggttctaattttggatggagtccagggaagagaaagtgatttctagaaagcctgttcccctcactggatgaaataactccttcttgtagtagtctcattacttttgaagtaatcccgccacctatctcgtgggagagccatccaaataagaaacctaaaataattggttcttggtagagattcattatttttccactttgttctttaggagattttaggtgttgattttctgttgtattttaactcatacctttaaaggaattccccaaagaatgtttatagcaaacttggaatttgtaacctcagctctgggagaggatttttttctgagcgattattatctaaagtgtgttgttgctttaggctcacggcacgcttgcgtatgtctgttaccatgtcactgtggtcctatgccgaatgccctcaggggacttgaatctttccaataaaccaggtttagacagtatgagtcaatgtgcagtgtagcccacacttgagaggatgaatgtatgtgcactgtcactttgctctgggtggaagtacgttattgttgacttattttctctgtgtttgttcctacagcccctttttcatatgttgctcagtctccctttcccttcttggtgcttacacatctcagaccctttagccaaacccttgccagtgacagtattttgggtcttagttctcactgttccctctgctcctggagcctttgaataaaaatgcacgtagctatggagtggggtttagctggaaaggtggccttccaacttcacgtcaacttctggctcctcagtttggcagtaaggcagggaagttgttttcctatttctcactgagaagattgtgaatatttccatatggattttccattattgcttgtttgattctttgttttaaaataaaaattc

SEQ ID NO: 263162 - DNA, 778 bp, Homo Sapiens
actcttacaattatagccaatgattttcaacataggtgtccaaacaattcaatggaagaaaggagagtctctttttttcacattcagaatttttattttaaaacaaagaatcggagcaacattaacaacaggaaaatccatatggggaaatattcacaatctgctcagtgagaaatgggaaaacaactttcctgccttactgccaacctactgtttgaggaggccagaagttgacgtgaggttggaaggtcaccttttccagctaaatcccactgaataggtgtgtgcatttttattcaaagtctccacaaccagagggaacagaactgagaacaaaaatactgttattggcaagggtttggctaaagggtctggctaaagggtctgagatgtgcaagcaccaagaagggatagggagattgagcaacacatgaaaagaggggctgtaggaacaagcaccgagaaagtaagtcaactataacctacttccacccagagcaaagtgactgtgcacataaatccacactctcaagtgtgggctacactgcacgctgactcatacgatctcaaacgtggtttattggaaagattctagtcccctaagggcactcagcgaaggaccacagtgacatggtaacagatgcacacaagcatactgtgaccctaaagcaacaacacactttagataataatcgttcagaaaaaaatcctcaaaaggagaatctttcaacaaatcgtagtgggataattggatatccacatgccaaaaacaataaaa

SEQ ID NO: 263163 - DNA, 1154 bp, Homo Sapiens
gagggcacggagggagcgggccaaggaggaggcagagtggcagacgaggtggttctacccaggcaataacccctacactgggacccccgactggttgtatgcaggggattactttgagcggaatttctccgactgcccagatatctactgagggcctggaggggcctggggcccgggaccggaggctgacgaggctggacttcctcgagtggccactgtgagcctcgtcacagcagaaaccaacttttctaacgactgagttcgcggagatagcatcatccctgatcaaggatgtaattctaattaactgttgattgccaaacatttcactctgctgtgccgtctcttcataaagcttcacttgggatcatcgtcttcattaaggtttcaacagggaaattcttcacggcgcccttttatgtggcagaaatcagctggggcttgtttagcttccagcacactctcagtcatagcatgtgtagctaaaggaagtaatgggaaggggttcatgttctctttataatgcagtggcaaaaggttctgaaagccttttaaactcgaaccagtgggggaaagatggatcttgaagctaatcctgcagagagttttatagaggccagggattgccttctaaattatggataaaacagaagggaagagtttcagagcatcagattgagtgaaaagttgtcagattctgtattttttaacaatcttcaataatgtaaagattactttctaaaatatttaagttaaaacctacttgaatagtattttgctgaagagcaagatatgcattaaatcacccggttttatactgtcccaaaatgaagcatccccgtgacaaaccagagtgggcagaagcatcgagagcgtgacaggaaatcccaagaccgcttccgcctcagaggcgtcccggctgcgattcgctgccctgttgtcagtgaggcctggctgtcaccgcacaccgcgtccgtgtctccagggggttcctttcttctcacacgtcgcgtgtacccatagcactcttgtgtttctgtttttcccagtatgcatgtttaaaatagaagtgacaagaatcacatccggttgtgtcctgtgggagggtcagaggcagaatctacttacagtggtgtaattaaagttatttaacc

SEQ ID NO: 263164 - DNA, 1455 bp, Homo Sapiens
cgcgcgagtgtccatagaatatggaacgcggttagacgcgctgcgcgcttatgtggagagagaataagacacgggcccctccgctgttaggcggaaaaacccgggcagagtttattggccgcacttgtgttccagaagaaaaaatgtggggatcaagggagaaccaggataatggaccccctgtggccaatttccggtgcgcgtctttttgtcccgccaccccaaacatgaggagtcccttcgaaattgtaattatgggggttttccagtttttaaggactgtgggggaatgggtttgaattgagaattgttaaatggcattatgtaataggtatcccagtgtattttacaaagttaaaggtaagagaatgtatgaaatagaaatgtaggaaaaacttaaccagggtcaggaacgcggaatttttccaaaccagggggccaaaggtagatgggtagcctgtagggcccaaggaggagacaaggaggggtgacaggtacagttaccggtttgtggtatgtgtttgttccctgtgtgtatgctgggaaggacttgagacctgtcccctgccctgatctggggttgggagtttagtctggtcagctggaagatggcggcttgggaaaaagagccatctggttacctacacagagctggtcccctggtggctgcaggtaggttctgctgttgagggaattaggggtgtatgtgtcaaaaatcaaacgtgtggaggaaaaaagtaaacagtttcctcctccctccaaaaaacccaaattcttgaaatgtacacacattcttctttcaaacatagaaaagtctcactctggatgtgcttacaagaagatcgtcgtcaaaaaactttgtttctaggataacgttcccagttaaggacgcttgctggcatcatctgggaactcgggtgctgcctctatcaaggactgccaggtatttgtggagttagggatcacaaagccaaactcgaagaaccattcttctaggcattgcccttttgaagtaaactttttgttccaggcggaatttttccatttgttctgtcgaagaaaaattaagttctcgagacactgccttgcacttgaggattttcttgggaacacgggcttcatgctccacaccagggacagacaggtcttctgttccttgccagagtatcttccctgtctcagcatcccgaaggttcatccaatttagtttgaagcccctcaggatctcctggcccgctcgtccttggctgacatgatgcggcggtcgccgcccgcggctttctcactctggtcggcggagcctcgcagacggtgcccaggagccgaggatggagccgcagcccggcttggagacctcgggctagcagccgcagcggccagaccaggaccggcctctccgacgcgtggtcgacgatatcccaggattccgaccagtacagcctgctttaatcaagt

SEQ ID NO: 263165 - DNA, 928 bp, Homo Sapiens
  misc_feature (887)..(887): n is a, c, g, or t
tagcgaggcctgggtggcgaattcggcacgaggaaaacaggacagacgacaggtccacccaagactgtcaagggatgagcatcccaaacctgctccacagaggtagctgcgtcctgaaaaaaaacagagcagggatgtagtggggctgggcagggatgggggcttgagaaatcaacaggtgcagcccagtgggtcagaggaaagcgtgctcgaaggatgccatggtcagggcagggcctccagagcaggtgttgtgcctggagctgctctcctggcctccttggatttatcgcaaaaactgaaggtttgcgcaagagacgaggacagcggaaagtggacctgccaggccgggagtgtgtccctcaccaactatgcacacagcactcgctcttagctcctctgtccgggctactaggagtgagaccagcttctggcaactgccccagctccaggccatcccatagcccctcctcttctggctgcccccaatgccccgaggcctggggagcccccagctcacccatctgtagctccctcaaagtcagggcccaccccatctgaggcagagaagacttgagtccagcccccaggaagcctgctcccctctctggcccatggtcctgcttcatgctttgggtcaggaggccaaagctgatgttcaggccccacccactccctaaagtcctcagaccaagggagggttttgcgtagcaccgccccacctgcattcgcgggccttccttcgggccactggttatcccacgcagtggggcaccgcttttgccccccgccttcttcccccctgtcgccgtattcccctcgcctggccccctagagagtggaacgatcccgggcgggcttccgtcccacacttgcgtggcccccgncggccctcaccgccttccgtcgcccccccgtcttatcctcc

SEQ ID NO: 263166 - DNA, 733 bp, Homo Sapiens
  misc_feature (621)..(621): n is a, c, g, or t
  misc_feature (701)..(701): n is a, c, g, or t
agcaaaggctgcaggatgaactggagctcaccagacgggctctggagaaggagcggctacacagcccaggtgcaaccagcacagcagaactggggtccagaggggagcaggctgtgcagctgggagaggtctcaggagtggaggctgagcctagtcctgatggaatggagaagcagtcatggagacaaaggcttgaacacctgcagcaagcagtggcccggctggagattgacaggagcaggctgcagcgccacaatgtccagctgcggagtaccttggagcaggtggagcgagaacggaggaagctgaagagggaggccatgcgtgcggcccaggcagggtccctagagatcagcaaggccacggcttcttcacccacacagcaggatgggagaggacagaagaactcagatgccaagtgtgtggctgaactgcagaaagaggtggtcctgctgcaagctcagctgactttggagcggaagcagaagcaggactacatcacccgctcagcacagaccagccgtgagctagcaggcctgcaccacagcctctcacactcacttcttgccgtggcccaggcccctgaggccactgtcctgggaggcagagacccgcaggctnggatgagtccctgactcaaaagtcttgacatccccaggggccagtcctgcttacaccccagacccagcactaccccaagnccgtctttagggtaggcagccacagtcagggg

SEQ ID NO: 263167 - DNA, 1048 bp, Homo Sapiens
  misc_feature (688)..(748): n is a, c, g, or t
  misc_feature (808)..(816): n is a, c, g, or t
gcctgggtggcgtactcggcacgagggtccctttagctgccagcaggaacgggctctgaggactcaccagatccggggctgccccctcgaggagtctggagagctgcactgcagcctctgcccattcactgctcctgctgccactgccttaaggctccaccagaagcggaggcaccccactgcagccccagcccgtgggccccggccccatctacagtgtggggactgtggcttcacctgtaaacagagccgttgcatgcagcagcaccggcggctcaagcacgagggggtgaagccccatcagtgccccttctgtgacttttcgaccaccagacggtaccggttagaggctcaccagtcccgacacacaggcattggccgcatcccctgcagctcttgcccccagacgtttggtaccaactcgaaactgcgcttgcaccggttaagggtacatgacaaaacacctacccacttctggccactttgtgactatagtggctaccttccccatgacatcactcgtcatggcaacagctgccaccaaggcaaccccagcctttgcctgctcccagtgggggagccccatttagcttagaaaacagcctttaagcattttgcttctgcgccgacaccccgaagcctggacagcccgggcccctgggctctcctgggaaaaacccactggaannnnnnnnnnnnnnnnnnnnnnnnnnnnnnnnnnnnnnnnnnnnnnnnnnnnnnnnnnnnnagccttaatagagggagaacaccccggtgaaacaaattaccccaccccgggtttgaggtnnnnnnnnnctccgccccggaaggccccttccccaaaacgcgaattgggcttcttggaagtaagccacccggagggggcctaccccaattctccgaccacccgcggttggtggagcctcttcgggacactctttgcctggcccgcgggaacacgcttgcggggctctatggaaaaaccaccctcaccccgtgggaaacagcggtttcggggggggcactctttcggcggcgcgagggtggg

SEQ ID NO: 263168 - DNA, 1147 bp, Homo Sapiens
  misc_feature (888)..(888): n is a, c, g, or t
  misc_feature (891)..(891): n is a, c, g, or t
  misc_feature (899)..(899): n is a, c, g, or t
  misc_feature (1019)..(1019): n is a, c, g, or t
gggaagcaggacagagaaggagcaggaagctatgctaattttcctgtcagcttaagggatccgtctcagcaagaatcttgtattctgataacggaatgctgtacgtgctgaccacatctaagaaccattaaaaagcaaggaaacaaacaaacaacccttttctcattccgacacacgaatagtcatcgagtattacaccagcccctctggtggcttccttcaaaactgttgatcttagctaaagtgtataaccagttaccagctgcacttcgcacggccatcccgtccacaatgcagcagactcttcccaaggccacctagcaagcaaggttgatcggatcatctaaactggccgcctcctgaatatttcactgaatcctggcgttcatgttgaagcagacaaaatgagaaaggaggagggcattgctcacctctcaatagcttttttcgttcaagttctatgtctttatcagctcttgcctgtgattttaccccaattcaaccttgggagtgggaagaatatgaacagataacccttggcctaacagctccatcaaacctccttgagagcaactacctaggccaggctagtgagtgctttgtgaaggaagctggtcagaagggtccctcaactccttccgggtcctcctggacactgcagaaaagacttagggggacccccagcagaggccaattgctctccttccttccctgccccaccaggaaaggaataacgtccacagacttgaagcagatagtgaagtagatctgtgagaggttctaggtacttagtgtgtagactttgacgaatatttcttcaagttgggagcccttgttaaaaatgatgtttaagggagtggtttgggggggaagatgaaggcatggagngangaagaagnagaaggaagcccttgccatataaaattcatgcagactaaacagtttccctgacagaataaaataaagtggatgctaccccactccagaatcaaaagcaattttattaaagtctcttaagnttgtaaagagtttaaatgaaacccgtggttgaaggcgatgcctgccaaatggcagggggtctgacctcaactgccgggccctggggtgtggagccaatttgcaattctgtttaagggcaggttggaat

SEQ ID NO: 263169 - DNA, 1197 bp, Homo Sapiens
  misc_feature (12)..(12): n is a, c, g, or t
  misc_feature (116)..(116): n is a, c, g, or t
  misc_feature (749)..(749): n is a, c, g, or t
  misc_feature (1135)..(1151): n is a, c, g, or t
aggtgtgatcanttctccgtgcgtgagtacgctggtctcggcgtggggcgcgctccacgctgagcgatcgggaggctaagcggttgacatgggagagcgacgtgcgctagtggatngtcgctagcagtcgggggttggtcggcgcgcgacacaggtgcgtgctaccgcgtagtctcgcgctggatgtgatcgcgaggaagctgtcagggctacctggcgcgtcggcgtcgagacaacatgaggggcgcgcgctcggtcacgtgtggctggtgcacggtggtaggggtcgaaggtggtatgtggaggcgtggggtgtccagaagcggacgaggtagcaatggatggtgcgcgcggcagttggcgagccgaaactaaggtgtttgtaggtaagggagggggtgttccaatttccggggcaggggtggggctccgatggcgcgagcgtccgtatgtcagccgacgtgggtcgtcgccaaagttcccgggatcggcgggcgtgagcccacgtgccctggccgggaaaggttttgttatcgttccggagtgccggtatttttggctttcacaagggggcttcccccaaggcagacaggcaagcatctaggggttcaattcgaaatgcaacaatgacagatgtacaactttaccactcttaaagaaactaacatgccatccattattctccatgtgggaaacattcagtaaacttctaaaaccaaacacaggactctggcatatccccacacccnccagcagcaggctgtgacaggctttaatctcaatcaaatgccactgtacacagaacataaaaacaggctcaggatgctgcatgtcactctgacatatcacattatttcatattactctgtcacttactcacaaacaaaagtctccactatggcatgattgagagagaaaataattcactttatataaataacagctaagaacaacatactgtgaacagtttccagagtttgaacattcagcacaatcaattcttacttcttgggaaaaaaatatcttacctatcttttctgttacagtatgccttcttggagaaaatattttagtggtaacatcattttctggggcattcggttaattttgaaagatgattatgccacatgaaccnnnnnnnnnnnnnnnnnctggcaggaggaggagggtcctcgtgccgaattcgccacccaggcc

SEQ ID NO: 263170 - DNA, 1019 bp, Homo Sapiens
  misc_feature (874)..(899): n is a, c, g, or t
ggcctgggtggcgaattcggcacgaggcgcctcaagatgttggtggagaacatcctgaagcggacagcacagggctctgaagacgaagacatggccaccaaggccttcaatgcgctcaaggagctggtgcaggagtgcaatgctagtgtacagtccatgaagaggacagaggaactcatccacctgagcaagaagatccactttgagggcaagattttcccgctgatctctcaggcccgctggctggttcggcatggagagttggtagagctggcaccactgcctgcagcaccccctgccaagctgaagctgtccagcaaggcagtctacctccacctcttcaatgactgcttgctgctctctcggcggaaggagctagggaagtttgccgttttcgtccatgccaagatggctgagctgcaggtgcgggacctgagcctgaagctgcagggcatccccggccacgtgttcctcctccagctcctccacgggcagcacatgaagcaccagttcctgctgcgggcccggacggaaagtgagaagcagcgatggatctcagccttgtgcccctccagcccccaggaggacaaggaggtcatcagtgaggggggaagattgcccccaggttcagtgtgttaggacatacaaggcactgcaccccagatgagctgacccttggagaagactgacatcctgtcagtgaggaactggaacccagggacggctgggctggaaaggggtccccctggcaaatggtgaaaaaggggggggtgcccccagcccaagtgggaagaaaacagcaagcctcaaggccccgccttccaaaacctccggggggaataaaccgagtccccagatggccccccgcaaaacnnnnnnnnnnnnnnnnnnnnnnnnnnacaccctgggccctaagaaccccccactccagtggccgggtctcttggaaggcgccccggagagggcctgtgacggccctccattttcccccaggctggctccttgcggtggacctttct

SEQ ID NO: 263171 - DNA, 886 bp, Homo Sapiens
cgggggcagaagcaaggcagttaccccccacccaagggttcacatgagatgccagggacgctcttgcccataggaaatttcccacccgggcatcttctgggatgactttggtgaagatgcctgagtcagctgattctctcgagcagatgactccataaaggtcgcacccaaggactctgccagcttctttccttcaactgcctgtacctctctctctggagagagatctgccttgttccccactagaaccactggcacccgggtttttcccatggccttcatgtagcttttggtacagactctcaatgacttggaagctatgcagagaggtgacagaatacacaagcacataaccatggaccccaatgatgaatgaatagggcagaatgctgtactcatcctgccctgctgtgtccaccagatgtaggtgaaactcatctttgccaagagtcactatcttgctgtaagtattctccactgtaggatcgtagccttccgagaactcgccttccacaaattgatgtgccaaagatgtcttccctgtggggagcagtgtgacagttgtatccaaatcatccatccacattcacatcctctgtcctttcggactacacagcggtatccgaggatgaccaccttcctgtagcggactagcggcatggcaggagcccgccccaggggcttgcggaactgcgggctcagagagcccgaaaacgaggtcagggtgtgagcaggcgcggcagctggtgcaggaaagtcgctcaccccgaagctgccgtgggcaagttagaaggaaaccaaaacaagcgccgcgcccggagctgcccacgtgatcacaacacagcacgtccctcgtgccgaattcgccacccaggcctcgctacct

SEQ ID NO: 263172 - DNA, 1098 bp, Homo Sapiens
  misc_feature (34)..(34): n is a, c, g, or t
cccctgcccgccgcggcgcacacgccctaacccnccccccgcgcgaggcctgcgtggcgattcaacacgagggctgatctggaccatctttgtcttgccttttcacggtagtggtccccatgctgaccctcatctgggcctgggccctctgccaagtgcccctgtgggatgggaggagtgaggcagtggcagaagaggtggtggtcgtttctatgcattcaggctgcctttggggctgcctcccttcttattcttccttgctgcacgtccatctcttttcctgtctttgagattgacctgactgctctggcaagaagaagaggtgtccttacagaggcctctttactgaccaactgaagtatagacttactgctggacaatctgcatgggcatcacccctccccgcatgtaacccaaaagaggtgtccagagccaaggcttctaccttcattgtccctctctgtgctcaaggagttccattccaggaggaagagatctataccctaagcagatagcaaagaagataatggaggagcaattggccatggccttggtttcccctcaaaacaacgctgcagatttatctgcacaaacatctccacttttgggggaaaggtggggtagattccagctccctggactacccttcagggaggcacgagagctgggagaagaggcaaagctacaggttttacttggggagcccagctgacaacagaccaaactcacaggtgcctggtgcttgggatttagccaaggctccctccccagcaacccaatgcatgtccccagccccctggagccctagcccctttccctgcccctgcagtccggcagtgtccaacacgccaaatccctttcaccaacaggggtttccgttttgcctggcctttgaaacaccaatgggttcttaacactctccttgcagaccccttagcctttaatattgggtggatcccggcccccccttgttaaagaattccttaactcccccttcccggggggtaaggggcccataatttttttgtaccaatcacactatttaacaaaaatccgccctttttaaacccacgaaaacggaaaagcgccctttgctcg

SEQ ID NO: 263173 - DNA, 559 bp, Homo Sapiens
ggcctgggtggcgaattcggacgagggaaataatctgacctccttataggcaaattggggaggggagggtgtatctagctctagttcaattatttggaagtgttccctgagaaacccaccagcctaagaagctctggccccaggcttgtcactagcagctgcagtcaacagttcaaagaagtcatggcccaaatccagtgtgcacccctccccattcacagagcctttttcacaattccatttccagttcatctatggcagtccagccagctcctggggcagcttgagagggcaaacccaaaacctcatgacagccagagcctgtctttcagcattcagtccgcctgggccggcttccagtttccccatggggctgcgggacagaggaccattacaactagatcaaggagcccagaaaacctccagtagtggacaacaggttttcaccatagcctacgttaacccatttttgagccaagcttcaaccctcagccttgaaaaacaagtctttaatttaatttttgttttttgcctaaatccaaagaaaaagggctgtcgg

SEQ ID NO: 263174 - DNA, 1043 bp, Homo Sapiens
  misc_feature (213)..(221): n is a, c, g, or t
ggatccacgctgtggttcagcagcctttagatcatacggcattgtggttcatgtttgaaattacagattttaaatgccatgttcattaagaaatccagggtattcagattctggggtttttcatattgtattattattattcttaggaatagttcaatgtaacaagaagaaaacttgacctttgctctggttaaaacagtaataggcacttgnnnnnnnnngataaattattgaatgagtagtattacctacaaattccagaattttctgggttttaggacgttgtgaagcatgactgattaacagaattttatacaactgtaccaataaaattccaaattggaattgttttgttactctggttgttgtgccaaattgtggtacacttagaaaattctacagtcgtcgatttttagggtgttctctttcaacacctttttgttagtaatcattgccagtagtgccttcatcagttaagggaggtgtcccagcacagatcattctcaaaagcgagcagggaagagctagtgggcatgctgaaggccagcgtggacagcaggtgaggcaggtgctcctcacacccagacctgggcatcttcattgagggaaagaaaacagtcattgtgcaaaattctgttagtcagtgattctttacttgcaaattcaggggcttagaaaatgaaagcaaacacaaaaccttgagtgtgctttggggaaccaaatggaccttctgggacaagcctgagcaagcctgtatgaacgccccacgtttgtgaagagcctgagggtatcaggagggccgacgcctgtgttggcatgcgcagtaggggatgacggttagcccatagtattcctttgcaaatgtgaaagcgagacattatatcttctcctgcttggtgtaactaatcactgttaatttcaggaaacaaaactcattaaaactcccttaccaaaccaggtctacatcctggttttgtttgctgagtgaggttagtgggagtggtcaaattggtactcttggaggaagaaaaactgtccttcct

SEQ ID NO: 263175 - DNA, 1272 bp, Homo Sapiens
cggggtgaggtgaatagacacaccgtggggcgcacctcagagtggggccgttagtcggggtcgctccggagccccggcggcacggggtccacggattgctgttgttaacccacagtgggttaagaaggatgggagatgttagcggttccacgggcgatggccccccaggaagccagaaggcctggacaaccatggaagctgcaggtgattcaggtcaaaggccatgtcccagctgttgcagcaccgcagcccgggcccaccagtgcaccggcctccagcaggaggatgacggccgtctccagcacgttgctcccgctcaccagcaggtccgacaaggccaggcagcagatgaagcagtacatgggtgagtgcaggttccggttcttggcgatggtggccaccaccagcgcgttctccaccaagctcaccagccccaggctgaggaagagcccgtcagagatggacacctccaggcaccgggctcctgtctggttggcagccagccccagctgggggatggctgtgggggtggagttgagggagcccagaactcttctctgggatccctgcacagccatagtcctgtccaggaagcaggaaggagtctgttggaggcctccaggtccccacagttcttcccctccaggtgtcctgcatagttcatggtgctggccagggggccttgggtgtcccccatgcctgcctccttccatctgggcacccccagatctgccctcacaccctctccctggctggacaggtcagcccaggcatggcccagccagtccagacacctcctggcatctaccgcctgggctcagggattctcacaaccaagcctggtcctcagctccctccctgcctcttccctggtggctgctgctcaggtccccaggacatttcgacacctctggaccgtccatggcctcatgtctcctgccttcctgggccagggctgcgctgaggtcctgggaagaatggagcttttctctgcgttttaaaaagtcgttctcagagcccctcccactgagggcggccacatgccgggggcgtgagcacccaccatggcccggcctgccaccaggcggcgtgcaggacccagggggtccctcacaccgcggatctcctttacgttaaaaaacaccacagtctgtcctggtcaccagggcccccacctggccgcccctctaggagtccggagcttccccgggacctgccctctccagaggccccacccttcacccctcaccctcgtcagcagctcagggagga

SEQ ID NO: 263176 - DNA, 1319 bp, Homo Sapiens
  misc_feature (831)..(1121): n is a, c, g, or t
  misc_feature (1127)..(1139): n is a, c, g, or t
ctgcccaaacttttaactggaaaagagaaaaaagacaaataatagaaataacttgggaaaagtatattctctttaaagtattactttttggtcagcttgcaatgccctttacttctttcttcctgttacatgcctagctcaataagtaagttaggccccctgctttggaaaactccatgttcacctactctcatgctccagagagccaagtaaacagataaaaggatcaagcgggaagcagacctctcaggagctggaggcctgtaagcccaacaatgctttaggctaaacagactaaactttatgctaaaccgtgtgaaaatggacaagtgagatttcctgaaaacaaaatccacagctttcatcagattctataaggggttcacaaccattcttagaatggtcccctcttggacttccaatccctagaggatgggactagattaatctagactaacactaggtcatctaaaactataattgtattttctctaaacaagtttttaaacagctatctagtttagtccacatcacatacaattcacctcatttaaaatgttgttagtgattttaatctcatttcaaaatgttgttagtgaactatgtttcaactttctcatttatattcatatccacagaacacctgaataaaagtaacacatatcagaccttcaattgttgaacttaattccccagtttatctggtgtaatttgtaaagtttctatgaactttcctgaattgagacatacttgcacttcctagttttttgggggttttcccccctgaaattgcaggtactgtaaaagcaacatgtgggcagcaccccctcnnnnnnnnnnnnnnnnnnnnnnnnnnnnnnnnnnnnnnnnnnnnnnnnnnnnnnnnnnnnnnnnnnnnnnnnnnnnnnnnnnnnnnnnnnnnnnnnnnnnnnnnnnnnnnnnnnnnnnnnnnnnnnnnnnnnnnnnnnnnnnnnnnnnnnnnnnnnnnnnnnnnnnnnnnnnnnnnnnnnnnnnnnnnnnnnnnnnnnnnnnnnnnnnnnnnnnnnnnnnnnnnnnnnnnnnnnnnnnnnnnnnnnnnnnnnnnnnnnnnnnnnnnnnnnnnnnnnnnnnnnnnnnnnnnnccctcnnnnnnnnnnnnnaaacaaaatatttcataagtattccttcctgttttaatttttccatttccccaactttaattaattatacttacaaccatattttggtttatcttctaccaggatttcttccatgcatacaataaaatgtacaaacactcaaatacacaaaatttcctcgtgcggaattcgccacccagc

SEQ ID NO: 263177 - DNA, 312 bp, Homo Sapiens
  misc_feature (74)..(74): n is a, c, g, or t
  misc_feature (134)..(134): n is a, c, g, or t
aaagccatgttgggcctaacaggcccccccagctccctgagaggtcctgcctcccccgcctggatccctttaancctgtttaccttgggctcctctgggagccatgaagagtagggtgaaccatgggagttttncccaaagcagggggccctaaccttaccttattgagctaggcatgtaacaggaagaaagaagtaaagggcattgcaagctgaccaaaaagtaatactttaaagagaatatacttttcccaagttatttctattatttgtcttttttctcttttccagttaaaagtttgggcggggtgcg

SEQ ID NO: 263178 - DNA, 1545 bp, Homo Sapiens
attcggacgagggtccgagtgacgccccacccgtggactccactgagcgcttccttcggcaggcttttggggatgactgggggagcatcctctcttttgagaaccgggaacctgtgggctcaggctgcgtggcccaggtgtacaaagcatacgccaacactgccttcctggagactgacagcgtccagagacttggcagggcctcctgtctgccgcccttctcacatactggggcagtcggtgggctgagagagctctttggataccttggaaatggccggaaacctccagaaaatctcgcagaccagtcgtttctagaaaggctgctcctccctaaagctgacctggttggatcaaatgcaggggtgtctcgggctcaggtccctggccaccaacctgaggccaccaacctcatccccgtggcagtgaaagtgttgcaccctggcctgctcgctcaggtgcatatggacctgctgctgatgaagattggcagccgagtcctgggagttttgccaggcatcaagtggcttagcttgcctgagattgtggaggaatttgagaagctgatggtccaacagattgacctgcgttacgaagctcagaatctagaacacttccagggtcaacttccggaatgtgaaagccgtcaagttccccacccctctgcgcccctttgtcaccagagaagtcttgggtggaaacgtatgaagagagtgtgcctgtgtccagttaccagcaggcaggaattcccgtggacttgaaaaggaagattgcacgggctggggatcaacatgctcctgaagatgatatttgtggataacctttgtccatgcagaacttcaccctggaaacatcctggttcagggggccaacggcctggcctccaagtcaggaggcgcagctgcagcaggcggacatctgtgacactctggtggtggccgtgccatcttccctctgcccgctgcgactggtgctgctggatgctggcattgtggcggagctgcaggcccctgacctgaggaatttccgggcagttttcatggctgtggtgatggggcagggccagagagtggctgagctgatcctgcatcatgcccgggccagcgagtgcagggacgtggaggggttcaaaaccgagatggccatgctggtgacccaggccaggaagaacaccatcaccctggagaagcttcatgtgtccagccttctctctagtgtctttaagttgctgatgactcacaaggtaaagcttgagagcaactttgcctccattgtgtttgccatcatggtgttggaggggcttggccgctcactggaccccaaactggacatcctggaggcagcgaggcccttcctcctcacgggcccagtgtgccccccgtgatggggcagtggcctctgtggggccttgtcaagagcctggaggccactcccaagaagcctctccctatggcagctgggacgtttaaaattgggacaccaattttcaatgttaccctccagtgggtggaaggacaaccatggctttctcttgctggtttgagg

SEQ ID NO: 263179 - DNA, 623 bp, Homo Sapiens
ggcctgggtggcgaattccgcacgaggcttgaactcctgggctcaagtgatcttcccacgtgggcctcccaaaacgctggaactacaagtgtgagccaccgcgcctggcccaagccctccacattttcaatccaggagccttgagtctgtgttgtgtcctgacacctccaagttctagggccgtcaggacacgggagggtttggggacagagtgtccttcctctgtcctctcatcccagtcctgatggccgcttggtgagtgtctggtgccctggtggcctgccccagctctcttctggctttctgagcaggaagcgagcagaggctccacaggcttacgctgctctcctgacagccacacgcgaccctcggtgcagagtgcagaggcggctctggttcctccagccacctcagtccctctttgggaggtgatgttcccattgtttttcaaaggcctcaccttcaactgtctgtcttagaattcccctctggagggctatggcctccctatgctttcacttcccacctctctacctaagttccttcccagcacatcgccagccctgggcctggggatgtccccaatgctgtacctggctgaccccggattaaaagcctcatcc

SEQ ID NO: 263180 - DNA, 966 bp, Homo Sapiens
  misc_feature (161)..(224): n is a, c, g, or t
  misc_feature (363)..(373): n is a, c, g, or t
  misc_feature (439)..(456): n is a, c, g, or t
  misc_feature (465)..(503): n is a, c, g, or t
  misc_feature (552)..(609): n is a, c, g, or t
  misc_feature (864)..(864): n is a, c, g, or t
  misc_feature (866)..(920): n is a, c, g, or t
gagcgaggcctgggtggcgaattcggcacgaggactacgacgacttcaggtctcgggagcgccctcctgccgaccccaggtcccaccaccaccgtacccgggaccctcgggacaacggctccaggtccggggacctcccctatgatgggcggctactggannnnnnnnnnnnnnnnnnnnnnnnnnnnnnnnnnnnnnnnnnnnnnnnnnnnnnnnnnnnnnnngcctactacccgcccgcgccgcccccgtactcggagaccgactcgcaggcgtcccgagagcgcaggctcaagaagaacttggccctgagtcgggaaagtttagtcgtctgatctgacgttttctacgtagcttttgtannnnnnnnnnnaatttgaaggaacactgatgaagccctgccatacccctcccgagtctaataaaacgtataatcacnnnnnnnnnnnnnnnnnnctcgaggcnnnnnnnnnnnnnnnnnnnnnnnnnnnnnnnnnnnnnnncatggtcatagctgtttcctgacccagctttcttgtacaaagtggtaannnnnnnnnnnnnnnnnnnnnnnnnnnnnnnnnnnnnnnnnnnnnnnnnnnnnnnnnncttatgaaccggctgccgaacctggggatcttacccgcccactgagcgggcctcttcttggtgatccaaaggagcccgttgagaatcgctcttcccgccgagcctctggccgctcgcccccatcacaaccctccccccacgccggacgcttctttttgctgttccaagagctccccgtcccctctccccatggctactgtcggtccctgcccgcggcctctgcccctccctgctcaatcctcgcgttccgcaganannnnnnnnnnnnnnnnnnnnnnnnnnnnnnnnnnnnnnnnnnnnnnnnnnnnnnngggtcgcgctcttcgtccgtgctcctgccttcgtccccccgccccg

SEQ ID NO: 263181 - DNA, 852 bp, Homo Sapiens
ctaccaggtccctttgaagccccctgttccaagggggcccatccccagccggagggaaagaaaaatgggcccctccaaaacctgctttggggcagtggagctgttgtcatcagcaagaccctgacatatccgctggccctctcaaagaagcggctacaggttggagggtttgagcatgccagagctgcttttggccaggtacggagatacaagggcctcatggactgtgccaagcaggtgctccaaaaggaaggcgccctgggcttcttcaagggcctgtcccccagcttgctgaaggctgccctctccacaggcttcatgttcttctcgtatgaattcttctgtaatgtcttccactgcatgaacaggacagccagccagcgctgagcgcaggaaggaccccaggtcttccctggaggcagcctcctgaaggaaggaagattcagtctccactgagaggtgccgtctggcccttccctgcaggccagctgccccaagcggggtagcagccttgaaccccaccccagctgggacacccacccagaaggtcccagggctctcccccatgagagaatcagagggaatgcaggacgtggtctatggtgagccaacgacacagtgagaaggagcaggaagttgctgtttctcctctgaccagcccacactccaaaggaaacagacgccatcctacacctatcagccctgcctgccaggagaacagaacacactcctggtctggatggggctgctgcttgagtgcagagggctgcggtaggccctttgcaggagtcaggtccctacacttggcctgtttttccaacctatttaatagacattaaagctaaacaaaca

SEQ ID NO: 263182 - DNA, 1013 bp, Homo Sapiens
ttcggacgagggttcctggtgatggacttcgtcctcatgttgctggacacgctttttggggaactggtgtggaggattatctccgagaagaagctgaagaggaggcggaagccggagtttgacattgcccggaatgtcctggagctgatttatgggcagactctgacctggctgggggtgctcttctcgcccctcctccccgccgtgcagatcatcaagctgctgctcgtcttctatgtcaagaagaccagccttctggccaactgccaggcgccgcgccggccctggctgtgccttcacacatgagcaccgtcttcctcacgctgctctgcttccccgccttcctgggcgccgctgtcttcctctgctacgccgttctggcaggtgtaagccctcgagcacctgcggccccttccggaccctgggacaccatgtacgaggccggcagggtgtgggtgcgccacctggaggcggcaggccccagggtctcctggctgccctgggtgcaccggtacctgatggaaaacaccttctttgtcttcctggtgtcagccctgctgctggccgtgatctacctcaacatccaggtggtgcggggccagcgcaaggtcatctgccctcctcaaggagcagatcagcaatgagggtgaggacaaaatcttcttaatcaacaagcttcactccatctacgagaggaaggagagggaggagaggagcagggttgggacaaccgaggaggctgcggcaccccctgccctgctcacagatgaacaggatgcctagggggacggcgaaatgcctcacgggcccgcccagcaccctgaaaccacactgttgcctcccagtgaccctgctgggacaccaggacaaggaagacagtttcgcctctcgaaaagccgcactgcgcctaggctggagctggaagggtgggtgaatccggcttgggcatccccaatgaactctgccctgcctgggactctatttattctgattaaaggggttttgcaaatggg

SEQ ID NO: 263183 - DNA, 1308 bp, Homo Sapiens
aactttaacaaatgttattaaaagcagcaattaaaaaccatgaatctttttgaaggtgcagagggttataaggtcagttggcagtaatgcagctattatctggtatgaatgaaatgctggggtggggagtcagggtgacctcattaggccttgtgctatcttcccaggtggtgcagacaccccctccctccttttccctctccaggcccacagcctccccaagagcccaggtagggaaggtccagatgtactgtaacaggattgctcatcccaggctatctcagaagtctggaaagcaggcctagaaggttgctgggctctctgaagccaggcaggaagctacaaattggatcccagttcccacagcacccctgggctaggggttggcttctcagctccccttccacctggccctagttggcccctgtggcagcagctgtggggctgaaaagggggaagaactgggtccaacgacagctcgtctatgcctgggctgtgccagggaagcagaggaaagtgggtgggctgtgcacaggaggtgaggtcccccttaaaaggcactgtgggagctgaggtctaagatgggggggcatctaaactatctcagggaccccctgaacgctcacaggtagagaggggtcaggcctagcaatggaaaaacagctcctgcaggcctgctgccccgccagtgcctcttgctgtactaccaccttcgccttcctgctggcggcctgcaaaaccagccaagctggaggccacagcagcagttggcaaggctggtccccatctggtgcccaccctccacgtcaaggcacttttgtccattttccaatcaagtgagtcagtttctaatatctctggaagcagcaaaacatcaggggtcctcttccccctcccaattttggtttccctccagatgaggcagaatttgaatgttggttccaaaaattctctttcaaacccccactggcaagggcttccctttgagggaaccgaatgatgcaggctctttaaaaatttcaacctatcccaaaaagtgattgtccatttcagggcagggcaagggatatgaaagagggtgagtcccctgtgcttccctatgggaccaatgctggttgatgggctgaaagaaggagcggccactgagctttcacatttagttgcagcacctgggccctggaagtgggccaagggaaagccaagggaggagccagcaggcccagagggacggtgtggctctgtgtgtgtacacttgggcatgtggtggtgtggccgtgtggggttgtctgcatgcccctcgtgccgaat

SEQ ID NO: 263184 - DNA, 886 bp, Homo Sapiens
ggggtcctttgcgcggcacctggcgacaaaatggctgcccgagggagacgggcggagcctcagggccgggaggctccgggccccgcgggcggtggcggtggcgggagccgttgggctgagtcgggatcggggacgtcgcccgagagcggggacgaggaggtgtcgggcgcgggttcgagcccggtgtcgggcggcgtgaacttgttcgccaacgacggcagcttcctggagctgttcaagcggaagatggaggaggagcagcggcagcggcaggaggagccgcccccgggtccgcagcgacccgaccagtcggccgccgccgctggccccggggatccgaagaggaagggcggtccgggctccacacttagcttcgtgggcaaacgcagaggcgggaacaaactagccctcaagacgggaatagtagccaagaagcagaagacggaggatgaggtattaacaagtaaaggtgacgcgtgggccaagtacatggcagaagtgaaaaagtacaaagctcaccagtgcggtgacgatgataaaactcggcccctggtgaaatgacgcccctcccccacctgcccatggcctgggactctctgcgatgtacataactatttaatgcagcggcagcggcgacagccttccctgagaggacttaaaagcagaaggaaaccgagatgcttcccgcagccgtggacgattctccaggactctttttttaccttgagcacttgcctcgtgagacttcatagaacagtggtttactgtcccccccttctcacctcctcattctctctggctctttctgtcttcctcttctcaccctcctccctccccttagccatcacttctgggaagtaaagaacttgacttagtgccggaaaaa

SEQ ID NO: 263185 - DNA, 1382 bp, Homo Sapiens
gggctccacgcgcggcctggcggcggcggccactctaaccagcgcaaaatgtccctggaacaggaggaggaaacgcaacctgggcggctcctaggacgcagagacgccgtccccgccttcattgagcccaacgtgcgcttctggatcaccgagcgccaatcctttattcgacgatttcttcaatggacagaattattagatcctacaaatgtgttcatttcagttgaaagtatagaaaactcgaggcaactattgtgcacaaatgaagatgtttccagccctgcctcggcggaccaaaggatacaagaagcttggaagcggagtcttgcaacagtgcatcccgacagcagcaacctgatccccaagctttttcgacctgcagcgttcctgcctttcatggcgcccacggtatttttgtcaatgacgccactgaaagggatcaagtccgtgattttacctcaggttttcctctgtgcctacatggcagcgttcaacagcatcaatggaaacagaagttacacttgtaagccactagaaagatcattactaatggcgggagccgttgcttcttcaactttcttaggagtaatccctcagtttgtccagatgaagtatggcctgactggcccttggattaaaagactcttacctgtgatcttcctcgtgcaagccagtggaatgaatgtctacatgtcccgaagtcttgaatccattaaggggattgcggtcatggacaaggaaggcaatgtcctgggtcattccagaattgctgggacaaaggctgttagagaaacgctagcatccagaatagtgctgtttgggacctcagctctgattcctgaagtcttcacctacttttttaaaaggacccagtatttcaggaaaaacccagggtcattgtggattttgaaactgtcttgtactgtcctggcaatgggactgatggtgccattttcttttagtatatttccacagattggacagatacagtactgtagtcttgaagagaaaattcagtctccaacagaagaaacagaaatcttttatcacagaggggtgtaggcgtgagttttaggtgaatttatgtggttcctgcttgaaaaccttcccctctccaggttcggtttagagaactttgccacaggtcttctggggaccccagaggtgtctgtgctgacaaggcgacttcagattccatactgagatcgttcccaggctggcgtctctggggtttttaaggctggctggagaagacagtgggagggtgccccgtctgacacccctggggttgctgagggaacggttggagtggggatcggcctgcgaaaggatactgtgaaatcactaattaactaataaacctgtctcaagttgaggatttg

SEQ ID NO: 263186 - DNA, 1150 bp, Homo Sapiens
  misc_feature (1113)..(1113): n is a, c, g, or t
ggcctgggtggcgaattcggcacgagggggcggcgggcgggctggggtgcagcgggcgcgcgcggaggagccgtcgcacctccgcatcccaaaggaaccagccgcgcgggcgagcgctggaggcgcgcaaggatctggcgcttggtgggagcccaacgccccctcaagctccccacccatgccgctcgcgcccttcaggcccggcttgcgtgggccgcagtggcagcaggggagggcccacgggcgcccagccctaggagtcgtcccccaggcaatccccagtactcctgatgctggagagccagccacactgcacagtgccccgggggcggtttctaccaccctaaggggtattcttggctccaggcatcagagtccatgtggcttgtggggccctcatttctttcatgcccactggggaaggttccaccagcagggctgttactggcggggtcctctgggaggggggcaagaaggccacccacaccaaggcaactggaagctccaccactccctggaccttcgaattgcacggcccgtccgtggccggcgtcctgccgcattggcggcggcgacatcggcagagactgcgcgaagcagcctctgcctagggagggtagaccggccaaccgcaccgcagcctcaggaggagcgcgcctcgtccgagcctccactgccatcgagccccaaaggcgcacggacgcaaactaagtacctagccccccagacgacaacgcgtcacaggagcggaaggacagcacaatagcccagcacagagcgcccacggcggacgggactcagtcgaatcaggcgcgaggccccaagagtcagctcccggacgattgagtcacaatgccagcacaacgcacccaaaactcaccggcacccgccatcacccgcgatcgtgcgagaagataaataaagagaaacgcgggacattagcagagagagacgggcacgaccaatggccgcgcgaaacagctgaaggataggcatacagtcgcacaagagtacatcgacacagaaagcagaaagcgcgcgcgggggcggtatcgacgtgtaaacccgtacggcacgacaccacgcgcggtgagcgaaggcagcggcgaatgncgaagcatcctcactaatagacagagatgtgagtcac

SEQ ID NO: 263187 - DNA, 1550 bp, Homo Sapiens
  misc_feature (181)..(181): n is a, c, g, or t
  misc_feature (355)..(517): n is a, c, g, or t
  misc_feature (565)..(625): n is a, c, g, or t
  misc_feature (855)..(855): n is a, c, g, or t
gaaggggggaatagcggcgtgggggtagggcgggaaagagggggataaaaactagcgtgggtcgcacggcatacgcggtcgggggacgtgaaataaccatgcggggctgaaggagagcataagcggcgggtagtttcgccgcggggtgccggacaatcgcataagatgacgtgataggganctgggagggggtggcgggcaaaagctccggaggaaaagcagacggggcggagagggggcggaagggagcggcggagcgcggcgagaaaggggcggggaatatatgggtgtgatggggggaacacaaggatagggtggcgataagggggttggaggggtaaataatatggcgacnnnnnnnnnnnnnnnnnnnnnnnnnnnnnnnnnnnnnnnnnnnnnnnnnnnnnnnnnnnnnnnnnnnnnnnnnnnnnnnnnnnnnnnnnnnnnnnnnnnnnnnnnnnnnnnnnnnnnnnnnnnnnnnnnnnnnnnnnnnnnnnnnnnnnnnnnnnnnnnnnnnaataaacggagtttcggtcggaaaggggcgggggcgcatgcgggcgannnnnnnnnnnnnnnnnnnnnnnnnnnnnnnnnnnnnnnnnnnnnnnnnnnnnnnnnnnnncagggagccgaaggagggagggggagtgcagggagcgcgagccccgcccttcatgatggagccaatgtagatgccgcggtctccacggtcgttgctctgccccacgatgctgatgcccagaaagtgatgtctttccatggtgaggcgtgacagtgaacgatggtgaaggggacatggtgggagtcgggttatgctggctgaaggagggaggccccgtccgccctgccganaggcgctgcttcctcccgccggcgtttgtgcttccggatgagtctggatgaggtgctctgctccgtggagctgctgagcctgctcgtgctgccatcctcgtccgagtccacaaagctgctggactcaagctcgctgctgagggcggtggacgcgctgtctggggggcagcccccacatccccgccgtcggtctccccttgggtgcccattggtccgggcggcctcctcgcggttccggcgtcgggcacgctcccgccggtgactgaccatggactccgtgcctgtctcgttgtccatcccgtcacggctgctggccacattcgggtggaaggaggggggccgggagtccccgatgccgcctgtccgctcaagaggcgggggcaggtctgtgtggctgtccgtgccctgggaccccgcatccgagtgagcaccctcagccaggaccagccaggagaccacgcggccgttgaagcagggaagcttggcattgtcatcaaagatctcctccttcaccaccccgaagtcctggtccatggacttaaagaagaatttgtaggcgtgcacgggccggttgctgagcacgttcttgaagtcggccagcgtgacgcgctcgggggccacgggcagcttgaccaggtacggcgtctcctcctcgtccagtggtcctcgtgccgaatcgccacccaggcctcgct

SEQ ID NO: 263188 - DNA, 1227 bp, Homo Sapiens
  misc_feature (49)..(57): n is a, c, g, or t
  misc_feature (121)..(147): n is a, c, g, or t
  misc_feature (202)..(210): n is a, c, g, or t
  misc_feature (625)..(633): n is a, c, g, or t
gccccccctcggaggatattttgggccaattttggggtgtttttgtgtnnnnnnnnntcaaaacacgtccggccgttaagccccaaccgaagaaacaaattcccctccctttggaaaaacnnnnnnnnnnnnnnnnnnnnnnnnnnnaacctccgggaaggggcgtttttttgggcgtcataaagggttcccccctccattnnnnnnnnncagtacaagcgctgcggtgtcacctctgtgcccgacatcagacgctgccagctgaccccccaataacaggttccattttgttgccctgtgatgggctcttcaaggtctttaccccagaagaagccgtgaacttcatcttgtcctgtctcgaggatgaaaagatccagacccgggaagggaagtccgcagccgacgcccgctacgaagcagcctgcaacaggctggccaacaaggcggtgcagcggggctcggccgacaacgtcactgtgatggtggtgcggatagggcactgaggggtggcgcgcggccaggagcacgcatggtattgacttaaaaggttcattttgtgtgtgtgcacattgtgtgttttgtgtactcctgtgggactcccatggttgtaaataaaggtttctcnnnnnnnnnctaggacctcgttatattccaatatttatattcttgtcggccgccctcggcccccgtaaaaactttctaaaacgattcctttggagccgcggccccagtagggaacgggaaccctgggccctatgctgtttccctacggaaatcccgggccatggactagtggtttggaattcctcacccacataaaaaaacggtccgggcgggaaaactggagcgatcctgtaaaataatccccgaaggggaccttcgtgcgggtccgtcactgggcattctactccgacaaggaagctccgattcccgagccccaaatatccaggaattagcgcccccgggcccgtgggccacttcctttcatccaataacttgggctacgacattcgactttaaggcacattttctgtcccaaaactggcggaaagcccctgtcaatatatattggcttgttggaattgtactcccttggtaaatccgtacccggtgggggcagttctcgtgcgaatatatttggattattctctttcgcgctccccttaccaatacacttattgcgcaccctgctggcgcccacataaaactggtgtccgatctcggtac

SEQ ID NO: 263189 - DNA, 932 bp, Homo Sapiens
  misc_feature (693)..(693): n is a, c, g, or t
  misc_feature (809)..(809): n is a, c, g, or t
  misc_feature (915)..(915): n is a, c, g, or t
ggcctgggtggcgaattcggcacgaggcttcctttaaccaggtcctagggctgaggttttaagccagggctggagggcaaaggtcataacctcaccagccacctctgaggtcatggaacctgggaacagaagcctcaacccccacaagaccaagcatcacatggagtgtagggtcactgggagagcagaggtcacagcctctagagaagggagaggggcgtgtgcatgggagtgtggctcatctcgggggccatggggcctcctgaggtacacctttgccccttgtaagagccttctaagccctgggcctgcctccccaagggctcactaaaccagaggccaaagtgccccctcccgttcacctaccacccaagtcctcaggccctccgagggctgggggaggaggggctcaaggaaggggggttccatgcacatatttatcacccctttcacatagccccaagaccttttgtacatttttacaagggtgcccctcccaacagttcccttcctggttaattaaaccctcagactggtgctgtgttcctagcctctggcctctctgtggggaaaggggactgcagggggaagagccgggaagggacagtcaggcttctccctgggaaggtggggccagcaggagatgaccaacagggggcaggacctggggacctgggctggagggaagggcanaagcttcctacttggctgacagccccggttcccccaacatgttcccgttcactctggccccacccccaaaggctcagcctctaaatctcagactccaccacctcttaatggctcantccccttcaccccatttccaaagtgcccccagggactccctgggcccctgctttcccctgaaaccctgtttctcccaaaaaccctggcccccaggccttaaggggnggggccaagaagaaagg

SEQ ID NO: 263190 - DNA, 846 bp, Homo Sapiens
ggcctgggtggcgaattcggcacgaggcagttacccactggacctagagggcggctcagagtacaagtacactccacccacacagccccccatctcgccaccataccaggaggcctgcacgttgaagaggaaggggcagctggccaaggagatccgcccccaggactgccccatcagcagagtggacacgtttccccagcccctggccgcccctcagtgccacaccctgctggcccctgagatggaagacaatgaaatgagttgttcaccttaacccattacgctggcaaactgatacaactcagaaactgctcaatgtcaggaaaaccggaacttgttgatgaacttgttttcaaaatatcatctcatcaacgaggcctggacaaacaagccctgaggagggatctgcaacaaccctgaagacaacaaggaaagaaaccatgaaagtctgtctgtactgcagtgggaattcttgagtgaggtcttacctcttctttaaacctcttcaggagtgtcctgattatgtccagaattttccctaaaggcagggattcttaacctggatagaagccaggggtaaccatgaacttgatggaagaaaatgttacatctttattttcagcaatgaaactgaaatttagccttactcccaagttataaatgctggcaacaaatcacagtagtaaaagcagtacctgggattttcccaccaatacaaaccagttacagcaactgtaatgtaacataaaaagggcatcttgaagtattgttcatatttgtcacctcttggaatgataccagatcctgtaagttgatgtattaattaaaaagcccatatattactgc

SEQ ID NO: 263191 - DNA, 1161 bp, Homo Sapiens
  misc_feature (900)..(909): n is a, c, g, or t
  misc_feature (968)..(976): n is a, c, g, or t
ccaggatgtgccctgagcctgttctgaacagctgtaaccccaactcccccacacaatgtgtctgcctgggaggtaagtaagtccagactgggtgtccaggagctggaacccagagagcgtcctgtccctaaccagccactgcagccctcccagctctggccctcagctgcttgacaggacggactgctgggagatggcagccggttggcagggccttgccctcacaccccgctgcccaggagccaggtctgaacttctgtgcacaggcctggcccctcagactcactcctgccaagaggggccacttcttcagggtgagccccggctatcaagcagccgtgagctccagggcgggctgcagctcccatcccctgtgcgccatgtttggagtaaagggatcagtggaagtggaggagccacttgggttctcctaagaccagcccttccggaggggccggtcctggaagaaacccataatccctggagtgtgaaaaagggcaaaaagaaaaagctggcctggtttccttcctccctgattgattgattgataggcacttcctcttgctcagtgcaatacctaccagtgctgctaaaccagggactcgcccagacctcagcaggcccccagggcctctccgtgcaacactccgtagccatgacagcagctctctgctgcccgcccctgcccagagctggcagaagccctctgttgcctttcctccctcagagcagagaggccccaggggagccagggccgagtggatcctaggatggccacggagagccactcgctcccagaacaggcaccccttcccaaaccagcttttctgcagccaattgcctgttgcagctgtggccactgcctcccggcactgtggcagactccccccagaaggaaannnnnnnnnncaccaagggaggaagcccccatccgccttcaggtccgaaactttgaaaaggaagggggnnnnnnnnngggttaacttccgggcccctaaaaggttgcgggggggccccttatctccctagggggtgcctccgataccgctatccgttcccatccaaccctgggactctcatctggacaccacccccaaccctcttgggtcaggactcaggaataccttacaacctccccccttagccacgggcaccaacctc

SEQ ID NO: 263192 - DNA, 1212 bp, Homo Sapiens
  misc_feature (52)..(60): n is a, c, g, or t
  misc_feature (226)..(226): n is a, c, g, or t
  misc_feature (326)..(326): n is a, c, g, or t
  misc_feature (597)..(597): n is a, c, g, or t
  misc_feature (1032)..(1113): n is a, c, g, or t
gggaggggaaaaggccccccagggtttaaatattaaaaattctttccctttnnnnnnnnnggttccccaggattggaaaagacttttaccaggcatccaaaaattagcatttctggctgggataaaatgtgagtttaaccgggagttcctaaaaaaaataatttgtaacccctagggggatttatattctttggttaccggtatttgaggaacccacttctccctnccttgggaccaaattctggggattcccagggaaggtaagggtgccaaacctgcaatgcaggggttgggtgcccagagggggttgagcttccctgcacccnccttcccaaacccctccccgtgcgggggcgtcttggctacaaccctgactcccctggcacctccaatgcccactgggctggggacaatgagatgtcactgctaggtctgggcagtgacaaaaccatacccccatggagcgctgcctcagggatggggcagctggtgggtgaggggcaaacctccaaagcgcccacctctcacatccttcttggggtacccatctgaagcttcttgtcttttacaagacataactgtcctcactgtccattnctgtcttcgacgcagacctcggcacaggtgctggagtggtgggctgcaggaggtgatctcatttgccctctttgtcccttttgcccaggatacccccggaggtcatcgtgggtagtgaaagaggtcccgtggtcttcccatgtccctggggcagctgctgggggctttccaggacaccggctgtcactctaagtcaaggcctgtgcagctgtgttcttgagacttgctgggggccctggggaaaggggcatggttccctgaatcccccagagtgtgatgtgtgatctggaatctccccaggagcccagctgaccccccaggatggaagtttagggtatatggccttgcttcatctggacaaatgtgcaaccacctggaatactctagaatgttagtgctggcaaggcactcagagttaataagtccgacttattnnnnnnnnnnnnnnnnnnnnnnnnnnnnnnnnnnnnnnnnnnnnnnnnnnnnnnnnnnnnnnnnnnnnnnnnnnnnnnnnnngccatatactggcacacacacgtggccactccacactggcacatttacattctcatcacagatgcgggcccgtctggccttctagactctggtggatgg

SEQ ID NO: 263193 - DNA, 1184 bp, Homo Sapiens
  misc_feature (500)..(519): n is a, c, g, or t
caggctggtacggtccggaattcccgggatatcgtcgaccacgctgtcggtccatcccttatgtaatagtggtttcccgcccaaagtgagactttccttttaattggagaagggtatagaggtagtccaggtgggaacgccagaagtgctgattgcccagccattgggaccacctgttcttgccccactaccctctagtgggaggccaaagtaaaggctggctggtgggtgtctgtggattgaggatgtggcagggactggtcctcccacctccctctggccaaagatgggctttgcccgctgtgtgcctgtcaccacccaccagcagtcatgccctgggcttcccaaatggagaggtagcaggcaacgtttttaaaaagaaagaaaacaggaaactgtattgtgtcgggggaggcgggagggagatgaggaaacggtttggatttgtgtgtgggagggtatttcctcgggggtagttgtctgtaactttcctaagtgcnnnnnnnnnnnnnnnnnnnnaaagtacgttgcaggctttggcttggaaaaccccaggggaatggggggcagaaacctgaggctgctgcccctttatctgcttcacggtactgtccccttcccccagctcctccctgaacccatgggccaggcctcagaccttccagctaaccgcttcccatgagccactactctgatgtcagcctataaccaaaggagcggggggggtccaggcctggtgaccaacctttctcagcccactcaatcagggtgctccccacctgcaggcaggaggcaacaccctatctgctaccatcagccccttccagagcccatctgccccgcccagccctgccctgcccagccataccctgctctgccccatctgggggtgccctgctcagggatgggctggcagggctgtacccagcctccctggtaagcagagactcaagaaacctctggggtcctgttttctggtcgtgtgatcccaggggtgcacatgggccccttgggtgtctgaacagaagggcatgggagggagggctgcacccctgcagtcttactctgctggtgtagcgggcagctgcccactcccaccccaccctgcaccgcgggctcctgagtcggcagattaagcattttataaattgtattgtaaatacatgttttaaacttggtcgatg

SEQ ID NO: 263194 - DNA, 436 bp, Homo Sapiens
  misc_feature (395)..(395): n is a, c, g, or t
  misc_feature (410)..(410): n is a, c, g, or t
  misc_feature (422)..(422): n is a, c, g, or t
tctggttctcgctcttcgtggattaactttccctgatgccgacgcccctgccccctgcagcaataagatgctcggattcactctgtgaccgcatatgtgagaggcagagagggcgagtggctgcgagagagaatgagcctcccgccagacaggagggaggtgcgtgtggatgtatgtggtgtgcacatgtggccagaggtgtgtgcgcgagaccgacactgtgatccctgtgctgggtccggggcccagtgtagcgcctgtccccagccatgctgtggttacctctccttgccgccctgttcacctttcaccttcctgggagttaagcagcgagggaagagcagcactggttcccaaggcagaggctttgccttgttggggaccccggggagttnaggagcagcccaagnttcccagggttncagggaatttcaga

SEQ ID NO: 263195 - DNA, 667 bp, Homo Sapiens
gagcgctctctgtgtgccagagagccagagacccaagacagggcccgggctctggacctgggtgcccccctgccaggcgaggctgactccgcgtgagatggttggttaaggcggggtttttctggggcgtgaggcctgtgagatcctgacccaagctcaggcacacccaaggcacctgcctctctgagtcttgggtctcagttcctaatatcccgctccttgctgagaccatctcctggggcagggtccttttcttcccaggtcctcagcgctgcctctgctggtgccttctcccccactactactggagcgtgcccttgctggggacgtggctgtgccctcagttgcccccagggctgggtgcccaccatgccccttcctctttctcctcctacctctgccctgtgagcccatccataaggctctcagatgggacattgtaggaaaggctttggccatggtctgggggcagagaacaaggggggagacacaagtagacctcaggtagaacgacactgggcggagccaccccagggcctgctcccagggagtgctcgaggcgcatcaggcccgttttttaccagtttatatcacggtcttcatttttaaaagtaacgctaactttgtacggacgatgtctcatggattaaataatattctttatggc

SEQ ID NO: 263196 - DNA, 1195 bp, Homo Sapiens
  misc_feature (918)..(927): n is a, c, g, or t
ccattcgaagcctgtcatttgtgccaggcaatgactttgagatgtccaaacacccaggcctgctgctcatcctgggcaagctgatcctgctgcaccacaagcacccagaacggaagcaggcaccactaacttatgaaaaggaggaggaacaggaccaaggggtgagctgcaacaaagtggagtggtggtgggactgcttggagatgctccgggaaaacaccttggttacactcgccaacatctcggggcagttggacctatctccataccccgagagcatttgcctgcctgtcctggacggactcctacactgggcagtttgcccttcagctgaagcccaggaccccttttccaccctgggccccaatgccgtcctttccccgcagagactggtcttggaaaccctcagcaaactcagcatccaggacaacaatgtggacctgattctggccacaccccccttcagccgcctggagaagttgtatagcactatggtgcgcttcctcagtgaccgaaagaacccggtgtgccgggagatggctgtggtactgctggccaacctggctcagggggacagcctggcagctcgtgccattgcagtgcagaagggcagtatcggcaacctcctgggcttcctagaggacagccttgccgccacacagttccagcagagccaggccagcctcctccacatgcagaacccaccctttgagccaactagtgtggacatgatgcggcgggctgcccgcgcgctgcttgccttggccaaggtggacgagaaccactcagagtttactctgtacgaatcacggctgttggacatctcggtatcaccgttgatgaactcattggtttcacaagtcatttgtgatgtactgtttttgattgggccagtcatggacagccgggggacacctnnnnnnnnnntgtgtgtgtgcgtgtgtggacaaccttagaaacttgactgttgcccctttatttatggcaaaacccacctcagaaaccagtttacccctgtggctgtcagcttctcccttgggggaaaaagcctctcctggtatctctctccctcctttcaccttcccctccctcaataacctcaagaccttttctgggtccctgggcctccaccttaactccccttgaggacccctaccccacccttccttttaaaagaaaaaacctacggcctaac

SEQ ID NO: 263197 - DNA, 868 bp, Homo Sapiens
  misc_feature (405)..(405): n is a, c, g, or t
gggagtaataaagtttgtacgagttcagtggaggagaccgcaagttgagtggaggaggcggcggtggggccccggaccaggtgcctccatggcaggctctgaagagctggggctccgggaagacacgctgagggtcctagctgccttccttaggcgtggtgaggctgccgggtctcctgttccaactccacctaggcccagctactccagacttctatgctttggtggcccagcggctggaacagctggtccaagagcagctgaaatctccgcccagcccagaattacagggtcccccatcgacagagaaggaagccatactgcggaggctggtggccctgctggaggaggaggcagaagtcattaaccagaagctggcctcggaccccgccctgcgcagcaagnctggtccgcctgtcctccgactctttcgcccgcctggtggagctgttctgtagccgggatgacagctctcgcccaagccgagcatgccccgggcccccgcctccttccccggagcccctggcccgccctggccctagcccatggagctgaagccggcgcgtggccgggctggggggcaccctggccggactcagcgtggagcacgtgcacagcttcacgccctggatcccaggccacgggggctgggagggcatcctggctgtttcacccgtggacttgaacttgccattggactgagctctttctcagaagctgctacaagatgacacctcatgtccctgccctcttcgtgtgcttttccaagtcttcctattccactcagggctgtggggtggtggttgccctacctgtttttgccaaaaataaattgtttaaaacttttcttattaaaaacgttatatta

SEQ ID NO: 263198 - DNA, 325 bp, Homo Sapiens
cataaaagtctggagttagctgggccaggctctaaaccatagcaggggcggatgggcagagagcaaggccgaggggactcagagggggctgctcctcgccccagggagcagggaagacatcttcgaaggcggctcaggaagtctgttggctcttcttgggcagggcttctaggtggagttggaacaggagacccggcagcctcaccacgcctaaggaaggcagctaggaccctcagcgtgtcttcccggagccccagctcttcagagcctgccatggaggcacctggtccggggccccaccgccgcctcctccactcaactctgg

SEQ ID NO: 263199 - DNA, 978 bp, Homo Sapiens
  misc_feature (241)..(241): n is a, c, g, or t
  misc_feature (269)..(269): n is a, c, g, or t
cgctatggagccgaaagtcgcagagctgaagcagaagatcgaggacacgctatgtccttttggcttcgaggtttaccccttccaggtggcatggtacaatgaactcttgcctccagccttccacctaccgctgccaggacctaccctggccttcctggtactcagcacgcctgccatgtttgaccgggccctcaagcccttcttgcagagctgccacctccgaatgctgactgacccagtngcaccagtgtgtggcctaacatctgggnccgtgttagagagagcctcccagagctgcagatagaaatcattgctgactacgaggtgcaccccaaccgacgccccaagatcctggcccagacagcagcccatgtagctggggctgcttactactaccaacgacaagatgtggaggctgacccatgggggaaccagcgcatatcaggtgtgtgcatacacccccgatttggggcctggtttgccatccgaggggtagtgctgctgccagggatagaggtgccagatctgccacccagaaaacctcatgactgtgtacctacaagagctgaccgtatcgccctactcgaaggcttcaatttccactggcgtgattggacttaccgggatgctgtgacaccccaggagcgctactcagaagagcagaaggcctacttctccactccacctgcccaacgattggccctattgggcttggctcagccctcagagaagcctagttctccctccccgggaccttcccttttaccacaccccggcccccaagaagccctggggatcccaaccagagccccgggagctgggttcaacccccaggggtcccccccaacttggcatccccctgggccctttgagattttctcccatgtgggaaccccggaattaatggggggtaactgtgccaaggaattaaattggggctttgggcaaagccaaaagggttttgaggtaacaagaatt

SEQ ID NO: 263200 - DNA, 1017 bp, Homo Sapiens
gggaggggtaggagcgggagccgagaggaggcggaggagatggcgtcccagccgccacctccccccaaaccctgggagacccgccgaattccgggagccggaccgggaccaggaccgggccccactttccaatctgctgatttgggtcctactttaatgacaagacctggacaaccagcacttaccagagtgcccccacctattcttccaaggccatcacagcagacaggaagtagcagtgtgaacacttttagacctgcttacagttcattttcttctggatatggtgcctatggaaattcattttatggaggctatagtccttatagttatggatataatgggctgggctacaaccgcctccgtgtagatgatcttccacccagtagatttgttcagcaagctgaagaaagcagcaggggtgcatttcagtccattgaaagtattgtgcatgcatttgcctctgtcagtatgatgatggatgctaccttttcagctgtctataacagtttcagggctgtattggatgtaacaaatcacttttcccgattgaaaatacactttacaaaagagctttcagcttttgcattgggtaggactatacgggatctttacagacggctacaccggaaggtaggcttacgaaaaggctctgaaaatgaagacctctggggcacagagtgaacgaactgggccatgcctttggtgcctgaggaccgaaaagctaccttcggcaaaaacgtgggcaaaaaccccgggatcctttggtcgccaacacttgggggggaccttccacccattgcggaaactaatccggcgacaatggggggaattaagctaaccagaaccggtttcacccggggctaacatggcggcaggtataaaccatggtacgttccgccagaaccgaaatcatggaatctttcgctggccggaaacacggcgatccaacaaagcttctcttttcccggtgttggccgttctcgcgcccgcacttttgcacccctcatcccaccc

SEQ ID NO: 263201 - DNA, 566 bp, Homo Sapiens; identical to SEQ ID NO: 178127
  misc_feature (49)..(163): n is a, c, g, or t
  misc_feature (171)..(205): n is a, c, g, or t
  misc_feature (275)..(287): n is a, c, g, or t
  misc_feature (319)..(423): n is a, c, g, or t

SEQ ID NO: 263202 - DNA, 1157 bp, Homo Sapiens
  misc_feature (1016)..(1016): n is a, c, g, or t
  misc_feature (1020)..(1020): n is a, c, g, or t
  misc_feature (1022)..(1042): n is a, c, g, or t
ggggaagccggtggccgcggctgcggaacgggcggaggctgccggtttcgtaaccgtcgctcctcctcgctgactcgcgggctgtgaggcctgggtcggctcgggccgcaccgcgcggggccgctcggagtggaggccgcctgggggcaggcgggctagaggagcaggtacatgtgaagattttttggcagcttagcgtggaaaccattgaccaccctgctctcatttctacctgttctgtgttggcaagggagagtgcccaaatgagcaagatatcgccgcaaaacagcactccaggggtgaacggaattagtgttatccatacccaggcacatgccagcggcttacagcaggttcctcagctggtgcctgctggccctgggggaggaggcaaagctgtggctcccagcaagcagagcaaaaagagttcgcccatggatcgaaacagtgacgagtatcggcaacgccgagagaggaacaacatggctgtgaaaaagagccggttgaaaagcaagcagaaagcacaagacacactgcagagagtcaatcagctcaaagaagagaatgaacggttggaagcaaaaatcaaattgctgaccaaggaattaagtgtactcaaagatttgtttcttgagcatgcacacaaccttgcagacaacgtacagtccattagcactgaaaatacgacagcagatggcgacaatgcaggacagtagacctcaccctttccagactttagagcttgtggcttgaatgttaaaggtgtgaccaccgacaccactcatgtcaatggctgaaagttgtccatttccatgactcaaagacccattggaggctattttctgggatcagcactgaagagttgattagctaaaaatgttagccttgtaattcgaatatctggttttaaatgatagaggtttttgtgggaatcaaaatcccccaaatgttaaggtatatggtaaaaaaagaaatatctgggatcccgatgttcttaataaatcctgacttcccantaanannnnnnnnnnnnnnnnnnnnnaaaaacatgtcgggccgcctcggcccctccaagaaactttctaggaccatttcgttttggccgccgcggggccccggtagggtaaagtgaaacctgggcgcaataagctggcttt

SEQ ID NO: 263203 - DNA, 605 bp, Homo Sapiens
  misc_feature (12)..(12): n is a, c, g, or t
  misc_feature (47)..(47): n is a, c, g, or t
  misc_feature (70)..(70): n is a, c, g, or t
  misc_feature (77)..(77): n is a, c, g, or t
  misc_feature (316)..(325): n is a, c, g, or t
gatcactttaanttatttccacatttactcagaatgatcctttgggntctataaggacataaggtacaanttgccantgtctctccatttttaaaaacatacaagtcagtgtcagcttacccaacatgacattttttcagtcagttgtggtaggccagccttgaagccatcgcacagtctagaaacttgtgtagctgagtgtgcagctcacctttaagggtgaagttaggtaaaagcaattagcagaggcgttatctatgtgattatgttgcttccttgtcagtatgttgaattttatagccctttcaatgaaatnnnnnnnnnntttgtatattaccaatgtttttagtttaaataaagagtcacccttactactgttgaatttcatcccaagtgtaaatcattctataatggctgtgtctgttatagtatattacagtaactgcatgtgtcaccaagtgttctatatcaggctaggataacctagaggcagtaattttttaaatgataaaataaatctaatgaatataaactctcatgataaacctattttttccatcatcagccttttcaagtatttaaataaataactgctgtgtactgtg

SEQ ID NO: 263204 - DNA, 952 bp, Homo Sapiens; identical to SEQ ID NO: 15293
  misc_feature (545)..(560): n is a, c, g, or t

SEQ ID NO: 263205 - DNA, 546 bp, Homo Sapiens; identical to SEQ ID NO: 85157

SEQ ID NO: 263206 - DNA, 745 bp, Homo Sapiens; identical to SEQ ID NO: 97918
  misc_feature (343)..(347): n is a, c, g, or t
  misc_feature (349)..(350): n is a, c, g, or t
  misc_feature (354)..(402): n is a, c, g, or t
  misc_feature (405)..(485): n is a, c, g, or t
  misc_feature (488)..(489): n is a, c, g, or t
  misc_feature (494)..(588): n is a, c, g, or t

SEQ ID NO: 263207 - DNA, 408 bp, Homo Sapiens; identical to SEQ ID NO: 15254

SEQ ID NO: 263208 - DNA, 476 bp, Homo Sapiens
  misc_feature (354)..(415): n is a, c, g, or t
ggtacctgcaccatgcttcatggttcctgagctctttctcctgtttcatttgagcctccaaactacatatttggtcatattgcctgcctaccccatgcctgctgcagaaatattcatccaggttaaccttgatatacacagagatggtcttggagaattgtgaatgtatgtactgtattgtcatcaaggatactgtcccttatttgaaggcatctaaagagaaactgttttcagatccaagtgctcagatctaaagcctctgcaacaagtcaggtggtggtcatgtttcccttctagttttggctgacaggaagctcagttcagtaccataactacagaacctgtcatctgtannnnnnnnnnnnnnnnnnnnnnnnnnnnnnnnnnnnnnnnnnnnnnnnnnnnnnnnnnnnnnagatatagtttacaaaaataaaacgctcccctcgccctacgttcgccccaacccctcatgt

SEQ ID NO: 263209 - DNA, 609 bp, Homo Sapiens
gggccgccttcggggcccggatctcaaacagccgggaagaagcaccgtggctgctattatctgctctccgcgcctgacccctcccaggactcgtgatgccaaggccgctgcgagcggctacgaagagtcggggttgagccccagctgagccgagggctcgcactcttctggtctcccaggcccaacccacctgaagaaatgagtggtggattggctccaagtaagagcacagtgtatgtatccaacttgcctttttccctgacaaacaatgacttgtaccggatattttccaagtatggcaaagttgtaaaggttaccatcatgaaagataaagataccaggaagagtaaaggggttgcatttattttatttttggataaagactctgcacaaaactgtaccagggcaataaacaacaaacagttatttggtagagtgataaaagcaagcattgctattgacaatggaagagcagctgagttcatccgaaggcgaaactactttgataaatctaagtgttatgaatgtggggaaagtggacacttaagttatgcctgtccgaaaaatatgctcggagaacgtgagcctcccaagaagaaagaaaaaagg

SEQ ID NO: 263210 - DNA, 847 bp, Homo Sapiens
  misc_feature (822)..(822): n is a, c, g, or t
ggggcgcacgcccggaagcggcgagggtagccatgacggcctccgtgctgcgaagtatctcgctagccctgcgcccgactagcgggcttctgggaacttggcagacgcagcttagagagactcaccagcgagcgtcattgttgtctttctgggaactcattcccatgagatcagaacctcttcgaaaaaagaagaaggtagatcctaaaaaagaccaagaagcaaaggagcgcttgaaaaggaagatccgaaaactggaaaaggctactcaagagctaattcctattgaagattttattacccctctaaagttcttggataaagcaagagagcggcctcaggtggagctcacctttgaggagactgagaggagagctctgcttctgaagaagtggtccttgtacaagcagcaagagcgtaagatggagagggacaccatcagggctatgctagaagcccagcaggaagctctggaggaactgcaactggaatccccgaagctccatgctgaggccatcaagcgggatcctaacctgttcccctttgagaaggaagggccacattacacaccaccgatccctaactaccaacccccctgaaggcaggtacaatgacatcaccaagggtgtacacacaagtgggagtttaaagagatagaccttgcaggcctgctatcccttaaacaggctggccccctgaagagtacggaatgaacccagggtttcaaggtcttgccttccccccagaaatcaaggcatggctggttaataaaataactggctcttcagcccacaaaaatacaagacccgcatgatatttccngtatttctttgtgtcgcgccccgcc

SEQ ID NO: 263211 - DNA, 399 bp, Homo Sapiens
gggaggagagctctgcttctgaaaaaagtggtcccttgtacaagcagcaagagccgtaagatggagagggacacccatcagggctatgctagaagcccagcagggaagctctggaggaactgcaactggaatccccgaagctcccatgctgaggccatcaagcgggatcctaacctgttcccctttgagaaggaagggccacattacacaccaccgatccctaactaccaaccccctgaaggcaggtacaatgacatcaccaaggtgtacacacaagtggagtttaagagatagacttgcaggctgctatccttaacatgctgcccctgagagtaggaatgaccagggttcaagtctgctttccacagaatcaggcatgctgttaataaatactggttt

SEQ ID NO: 263212 - DNA, 399 bp, Homo Sapiens
  misc_feature (60)..(60): n is a, c, g, or t
  misc_feature (383)..(383): n is a, c, g, or t
gtagccatgacggcctccgtgctgcgaagtatctcgccagccctgcgcccgactagcggntttctgggaacttggcagacgcagcttagagagactcaccagcgagcgtcattgttgtctttctgggaactcattcccatgagatcagaacctcttcgaaaaaagaagaaggtagatcctaaaaaagaccaagaagcaaaggagcgcttgaaaaggaagatccgaaaactgggaaaaggctactcaagagctaattcctattgaagattttatttacccctcttaaagttcttgggataaaggcaagagagcgggccttcaggtgggagcttcaccttttgagggaggacttgaggagggaggagctctgttttctgaaggangttggtccttgttaca

SEQ ID NO: 263213 - DNA, 1020 bp, Homo Sapiens
gagataaaaagacagggacttgggttaacggtccggaatcccgggatatcgtcgaccacgcgtccgaagagcctccagaggacgaggaggaagaggacggaagggagaaggagaatgtgactgttctggacaaaacactgtcagtaaacgatgttgcatgcatggcaggtttactagaaatcattgtgattctctggaaaagtattgacagaagtatggaaaataataaagaggccaaactttacacgattaacaagtttgcctctgtgcttccagagtatctgaaagtatttaaggatgatcgctgcaagatccctttattcatgctaatgtcctttatgccggcctctgctgtccccccattcagctgtggtgtgatttccacgctgagaagccgggaggagggcgctgtggacaagagctactgcactttgttggattgcctctgctcctgggggcaggtggggcacattctggagcttgttgacaactggctgcccacagagcatgcccaggccaagagcaacacagcttctaaaggtagggtgcagatccatgacacacgcccagtcaaacctgaattggcattggtctacattgagtatctgctgactcatccaaagaaccgcgagtgcttgctctctgctcctcggaagaaacttaacccatcttttgaaagcccttgaaacgtcaaaaggcagaatctggagtcacttctggcagacaccgggtggcgaagcctcgtggatcaagtgaagaagctgcccgcgaagctttggtctccactgtcgctgagcatcatcttcaggacaagttctggtcagaagacaggtgttttgtccacgtggacgacctggttggtcaacacgcaaaattaacattattcagaatcaagaaaagcatccgagttctaaggcttttacagcaatatccactacgcggtttacattttgtgctgtgcaaggataataactaacgagggacgcaagacagtgttgcattgctcagaaatgagccaaa

SEQ ID NO: 263214 - DNA, 717 bp, Homo Sapiens
ggggtgtgattcaggatgaccatattccatttttaagaagaggtgttccagttctgcatctgataccgtctcctgtccctgaagtctggcacaccatggatgacaatgaagaaaatttggatgaatcaaccattgacaatctaaacaaaatcctacaagtctttgtgttggaatatcttcatttgtaatactctgatttagtttaggataattggttctagaattgaattcaaaagtcaaggcatcatttaaaataatctgatttcagacaaatgctgtgtggaaacatctatcctatagatcatcctattcttatgtgtctttggttatcagatcaattacagaataattgtgttgtgatattgtgtcctaaattgctcattaatttttatttacagattgaaaaagagggaccgtgtaaagaaaatggaaaataaatatctttcaaagactcttttagataaacacgatgaggcaaaatcaggttcattcattcaacgatagtttctaaacagtacttaaatagcggttggaaaacgtagccttcattttatgattttttcatatgtggaaatctattacatgtaatacaaaacaaacatgtagtttgaaggcggtcagatttctttgagaaatctttgtagagttaattttatggaaattaaaatcagaattacatgcgaaaaacatgtttttcattttaattttatttcttgt

SEQ ID NO: 263215 - DNA, 494 bp, Homo Sapiens; identical to SEQ ID NO: 7157

SEQ ID NO: 263216 - DNA, 698 bp, Homo Sapiens
gggagttctgcgcgttcacgtccccgatcgggccgtgtccgccgcggccctgcgaggtccgagggactcattctgatgaaggaaagagcgtccctgtgcagctgcgtgtccttcagttctttggctctgattccgtgtctggcttcatctaagtggcctggtccatgggcagtgaagaaatgtaaagtgcaatagccctctggaacaagacaattcatgtgagataagaaagaagagcccacaagaccaaggatgtattctcagtttacagaccactgaccagaggccactccagggtgtcaggactaagagaagtcacaaaacagcagatttcccaagagcagcggaaaatgatcccagtcacagatatcatttgaggatgtggctgtggatttcacgcctggaggaatggcagcctacttaatccctactcagaagaacttgtacagagatgtgatgttggagaactatagcaatctggttttcttggaagtctggctagataatcccaaaatgtggctccgagataatcaagacaaccttaaaagtatggagagaggccataaatatgatgtttttggaaaaatatttaattcaagcataaacattgttcatgtaggactgcgatcccataaatgtggcacaggagaaaaaagtttgaaatgtcccttttgatttgcttattccaaaaaataatt

SEQ ID NO: 263217 - DNA, 513 bp, Homo Sapiens
  misc_feature (12)..(12): n is a, c, g, or t
agccactgggcncggcccagataagtttttaaggtcccctcctgccttagcattcctgagaaatgtcctaattggtagtaagacaagagtaatagcaacctgtattgttagtatttaaccaaataggctaaaattttaatcaggtaccttatgtattaaatagaaatcggaatgtaccataataaatccaaactctcaattacgccatggtaattcagtcactaaaatatgtaaagatagaaaattttttaatttaaagaagtgtgaaacatagccattgattgatcagaattctggaatctgaatattaaaaccttacttagtgactggaatggtatatgctccctccaaaagtttatctttgtttattgattaaaggtaatccttactttctttgtattacttaggttcttaattaaaggtaatccttactttctttgtattacttaggttcttaaatttctatgataaacatgtattgctaaataataaaaagtatataaaaattgcttc

SEQ ID NO: 263218 - DNA, 112 bp, Homo Sapiens
  misc_feature (56)..(56): n is a, c, g, or t
taacaatacaggttgctattactcttgtcttactacccaattagacatttctcagnaatgctaaagcaagaaggaaccttaaaaacttatctggccgcgcccagtggctcat

SEQ ID NO: 263219 - DNA, 1172 bp, Homo Sapiens
ggtcagccaccgagagcacatccacatgaatgccactcagtgggaaactctgactgatcttactaagtggctgggcagagaaggcttgtgcaaagtggacgagacaccaaaaggctggtatattcagtacatagacagggacccagaaactatccgccggcaactggaactggagaaaaagaaaaagcaggaccttgatgatgaagaaaaaactgccaaatttattgaagagcaagtgagaagagggctggaagggaaggaacaggaggtcccctacttttacggaattaagcagagaaaatgatgaagagaaagtcacgttttaatttgagtaaaggagcatgtagctcatcccggagcaacatcttccaagtcaagtactctggggaccgagtgcactgaagacgataggaagttcagcatcagtgaaacgaaaagaatcttcccagagctcaactcagtctaaagaaaagaagaaaaagaaatctgcactggatgaaatcatggagattgaagaggaaaagaaaagaactgcccgaacagactactggctacagcctgaaattattgtgaaaattataaccaagaaactgggagagaaatatcataagaaaaaggctattgttaaggaagtaattgacaaatatacagctgttgtgaagatgattgattctggagacaagctgaaacttgaccagactcatttagagacagtaattccagcaccaggaaaaagaattctagttttaaatggaggctacagaggaaatgaaggtaccctagaatccatcaatgagaagactttttcagctactatcgtcattgaaactggccccttaaaaggacgcagagttgaaggaattcaatatgaagacatttcctaaacttgccctgagtttgaaaatttgttaacaatacattaaaatcttaaagcatcaaattggtgtttcgccaaggcattatgagactctactgtgttagggtatattcttttgtataaaacaaacaggtttttgaaaatattactgtatagttagttgttcagctaaactttgagaagaatttaattatgtctcaggaggtatcaaactatgtaattttgtccttgttatttttgtttcctttgtaatttacttgatgagtttatatcttcattaaagaatgttattata

SEQ ID NO: 263220 - DNA, 707 bp, Homo Sapiens
  misc_feature (466)..(603): n is a, c, g, or t
  misc_feature (605)..(608): n is a, c, g, or t
  misc_feature (617)..(632): n is a, c, g, or t
  misc_feature (657)..(667): n is a, c, g, or t
gtgcctgtggggccaggggcatgcgctcccccctggctgagcaccccccagagattctccctgcacccttcccctcatggcccgcacgctgcctcatcccgtcctccccatgtgtgtttaagatcccatgcccattcacctgacctcacctaacaccctgcaaaatctttaaggaaaaaagctgaagggtacgacccatgcacatatgtgaccctggaaaatgcaaatttagatcttttatgatttaattgttattgtttcccatagaagttccctccctttgaaattaatatataatgtataaattctgcactgagccatggcggagctgggcagcccctaggttagagtggagacggaggcccaggcgcaggggtcacacctcatctggtttccttcccatctcacagcttagcttgtgcttctcaacaccaagtctttaagagcaataaaaactacaccatgnnnnnnnnnnnnnnnnnnnnnnnnnnnnnnnnnnnnnnnnnnnnnnnnnnnnnnnnnnnnnnnnnnnnnnnnnnnnnnnnnnnnnnnnnnnnnnnnnnnnnnnnnnnnnnnnnnnnnnnnnnnnnnnnnnnnnnnnnnannnntttgttggnnnnnnnnnnnnnnnnaaaaaaatttttaaaaatttttttnnnnnnnnnnnccccccaaggaaaaagaaaaagggtgctaatttgttcctc

SEQ ID NO: 263221 - DNA, 468 bp, Homo Sapiens
  misc_feature (448)..(448): n is a, c, g, or t
ctgccccactcccccaggcctcagtgccagaatttatacataatatattaaatttccaaagggagggaaacttcctatgggaaacaaataacaattaaatccataaaagatctaaatttgcattttcccaggtcacatatgtgcatggtcgtacccttcagcttttttccttaaagattttgcaggtgttagtgagtcagtgaatggcatggatctaaacacacatggagacggatgagcagcgtgcggcatgaggaaggtgcaggagaatctctggggtgctcagccaggggagcgcatgccctgcccacagcacagcctgccgagtgggcgggtggagggatgagatttcagatggagggaagcacatttccaaaacaacagtgtctgcaagcgtgtctcgcatggtgtcgttggtctcatctggtttcgttggtctgccccttcnacccctcagagagccgtgct

SEQ ID NO: 263222 - DNA, 494 bp, Homo Sapiens
  misc_feature (452)..(452): n is a, c, g, or t
  misc_feature (458)..(458): n is a, c, g, or t
  misc_feature (464)..(464): n is a, c, g, or t
  misc_feature (481)..(481): n is a, c, g, or t
gggcagaccaacgaaaccagatgagaccaacgacaccatgcgagacacgcttgcagacactgttgttttggaaatgtgcttccctccatctgaaatctcatccctccacccgcccactcggcagcctgtgctgtggggcagggcatgcgctcccctggctgagcaccccagagattctcctgcaccttcctcatgccgcacgctgctcatccgtctccatgtgtgtttagatccatgccattcactggactcacttaacacctggcaaaatctttaagggaaaaaagctggaaggggtacggaccatggcacatatgtggaccgggggaaaatggcaaattttaggatcttttttatggattttaattgtttatttggttttccccataggaaggtttccctcccctttggaaatttaattattattaatggtattaaaattctggcattgnggcctngggggnacttgggggcaggcccntagggttaggagt

SEQ ID NO: 263223 - DNA, 500 bp, Homo Sapiens
ggacactattaaatgcaaaaactcctttcaaaacaaaaagaactaccttatattcaacatttaatgttcttggccctctgcttttatgtctatacaatatactgagttcagtatggtgtccaagagtgccctgtgtggatagacatgtgcactccttccaggagtgggtactgattccagactccagatgcctattattagttaggcttctgagcttgcaatcatattgaatgtatgaagagcgaaatcaaattcttatttttgtacagttttgaagtttatacttagaactgaccacctccccggccacgcggagagctgtacagtgtgtaaatctgcctttatcttggattgattggtacagtatttttgcatctgtgggacctaccttttcgttcagtagtttgaactatatataaactgtacaatctgtaaagtttttatagaataaatattcagctgtgaaaactggttaaataaaactaatatttcttaacaca

SEQ ID NO: 263224 - DNA, 1017 bp, Homo Sapiens
  misc_feature (327)..(339): n is a, c, g, or t
tcttcatttcaactttttattataacatgagctaaactttaagaaacaaccctagtcttctatttcccagagctgttcaaagtctaaatgacaatataactcattatgaaaatatactgaaaagtacaagagctgatgtaaaacggtaatcaaggttccaggcatcatgggattagggtaactgaagaataaacccagccaggctgcaacagcaggcaggatgtgctggcttgatgaggtgctaaggccatcgaatgctcagaggaagccggattcacggtgatcatctcaacctgagaaatcgttccttggggtgatttctgcccnnnnnnnnnnnnngtaagaaagaggttccttcattcagtaacttagttttcccttaataaatatttcaaaaataaaaccaatcatcatcaaacaaacaggagccacttttgtaggtaaggtaaatcacaggataatgtattgggataactctgtttttttaaaataaaaaagccttacatggtcagggattgatggagtggggatgacaaatgcacatttcagactttcatcaccaatgaaaaaataaagcattttcatagacttaaaactgtcattagtgcattcggcttttggagaagggatgaaaatgtaaaatacttctacaacaataaaatgttaatagaaatcgtcatgtgctgaggtcattttagtgagctaccattgtttgtttaaatacaagaaaagtaatttcttggtccaaattagtgaaatctttaaaaagattgcctttaaagaacattatttgaggacaatgttttttcagacacattctgatgatattcaaattcacttcataacaatcacagattaacctttaattacaccttaaaaagctgtcagatttccatttcttcgggagacattttcaccagtgtgttgttcgattccacaggttaagctttcttcattattattaagaacttcatacatattagagagattgccattcattgctttctcgtcttgttc

SEQ ID NO: 263225 - DNA, 624 bp, Homo Sapiens
  misc_feature (85)..(132): n is a, c, g, or t
  misc_feature (138)..(138): n is a, c, g, or t
  misc_feature (144)..(144): n is a, c, g, or t
  misc_feature (146)..(148): n is a, c, g, or t
  misc_feature (150)..(150): n is a, c, g, or t
  misc_feature (154)..(154): n is a, c, g, or t
  misc_feature (156)..(265): n is a, c, g, or t
  misc_feature (612)..(612): n is a, c, g, or t
gcggaagatctcaaaccccagggatgttaccccgggtctgtttttgatagggtgccaattctccggggggaattggctactaggnnnnnnnnnnnnnnnnnnnnnnnnnnnnnnnnnnnnnnnnnnnnnnnncctttntttttngnnntngttntnnnnnnnnnnnnnnnnnnnnnnnnnnnnnnnnnnnnnnnnnnnnnnnnnnnnnnnnnnnnnnnnnnnnnnnnnnnnnnnnnnnnnnnnnnnnnnnnnnnnnnnnnnnnnntattgttcacattttttattgaattccaaatgtagcaaaatcattaaaacaaattataaaagggacagaaaaattaagaatcaaacatcactctggaccatgggaaccttgaaaaggcatggcagtggagaccagtaactagtatacagcttgcctgagaaggcttagtaacaaatgaattcaagtcgtattagatattctaaaccttccttaatataagatgaagtgtcatatgttagggagggtaaaaacgtaacacaaaattctggggattaagggataaagtctgggaccctgaggctcagaatgatccctaggcatctactgtggcaaatatattacagccngacattataggc

SEQ ID NO: 263226 - DNA, 557 bp, Homo Sapiens; identical to SEQ ID NO: 2893
  misc_feature (391)..(391): n is a, c, g, or t
  misc_feature (393)..(394): n is a, c, g, or t

SEQ ID NO: 263227 - DNA, 469 bp, Homo Sapiens
  misc_feature (19)..(19): n is a, c, g, or t
  misc_feature (371)..(388): n is a, c, g, or t
atgattggtgtccagacangttttccactttgtttaaaaaaagtgttggtggcccttttgtggtggtgttacaatccctctgggggccttaggaggatgttgatgcaacttttagaagcttttaatttcaaaaacaactcaaaaatctgaaggacagtcatagctgccactcagccccagttagtcaaaccccagtgacctttgcccctggttgccaagggctttgcaacatcaagcagggaaataaggatctgtctgtttagtggataccgtgtatcctttaatagaccaggtaacagttcgtgttagtttagactattgttttgtactgtactttcttgggtggcagaggaaagaaaagtaaaacattnnnnnnnnnnnnnnnnnnctgcgttctttaaattctgtattattagcaacctctgttgtacatagtgtttgataataaagtattaatttgattcttaaa

SEQ ID NO: 263228 - DNA, 960 bp, Homo Sapiens; identical to SEQ ID NO: 2949
  misc_feature (406)..(406): n is a, c, g, or t
  misc_feature (408)..(408): n is a, c, g, or t
  misc_feature (437)..(451): n is a, c, g, or t
  misc_feature (478)..(478): n is a, c, g, or t
  misc_feature (508)..(517): n is a, c, g, or t

SEQ ID NO: 263229 - DNA, 791 bp, Homo Sapiens; identical to SEQ ID NO: 2950
  misc_feature (150)..(157): n is a, c, g, or t
  misc_feature (159)..(175): n is a, c, g, or t

SEQ ID NO: 263230 - DNA, 1276 bp, Homo Sapiens
ggggtgtttggagaaagggactcaggtttaatgagttaatctcacttggtgaatatgaaaaggcagcttgttatgcagcaaacagtcctagacgaattcttcgaaacattggtacaatgaatacatttaaggactgacattttctgaggaggctggggatgtgatttgtgattatggggagcaggatacttataacaaggccaagtgcctggctttagctcagattatctacagtgaatgtggcctgcacaagaaagctattctttgcttgtgtaaacagggtcagactcatagggtcatggagtacatacagcagttgaaggactttactaccgatgacctgttgcagctattaatgtcatgtccccaagttgaattaattcagtgtctcactaaagagttgaatgagaaacaaccatctttatcttttggtcttgctatacttcatctgttctctgtagacatgaaaaaagctggcattaagctacttcaagaaatcaataaaggtgggatagatgcagtagaaagtcttatgataaatgattccttttgctccatagaaaagtggcaagaagtggcaaatatatgttcacagaatggctttgacaaattatctaatgacatcacgtctattcttcgatctcaggctgcagttacagaaatttctgaagaggatgacgcagtcaacctaatggaacatgtgttttggtagttctatatcttaaccagctgagggagcttgtacaacaccttatgtatgctggttgggaaaaactgattttaacgtaactaacttataaataaatctagagtaaggaagatctcaggaaataaatcacacttttgttatgatgacatttaggatttgtctttgaaatatttatactattggcttgccttttccccatatggtcatttcttatattgaatcttgataaaatccaagattataactttgtgtgaaacagtgtagggcatttttatctaaggacataagctaatgtccagatatattactttctggtgatgtaatatgatagcaagaactgaggaaggtgtgggtagtatcctgtgtgttagactgtcttcccaaacatgaaatgctacaagcctgacttgaccagaaaagcaggaaatcatttcaaggttggacttgctggcaaaaacctagagtatataattttgtactgctgatttaaagatgcgccccatgcttgatatatataaatatggcaaagcttaggcttctagtataaaagctgggactcttggcatg

SEQ ID NO: 263231 - DNA, 692 bp, Homo Sapiens; identical to SEQ ID NO: 2962
  misc_feature (498)..(498): n is a, c, g, or t
  misc_feature (500)..(500): n is a, c, g, or t
  misc_feature (502)..(502): n is a, c, g, or t
  misc_feature (507)..(507): n is a, c, g, or t
  misc_feature (515)..(515): n is a, c, g, or t
  misc_feature (517)..(521): n is a, c, g, or t

SEQ ID NO: 263232 - DNA, 636 bp, Homo Sapiens
ggtattgaagaattaatagagaaacttcagtctggaatggtggtaaaggatcagatttgtgatgtgagaatatctgacataatggatgtatatgaaatgaaactatccacattagcttccaaagaaagcaggctacaagatcttttggaaacaaaagctctagcccttgcacaggctgatagactgattgctcagcatcgctgtcaaagaactcaagctgaaacagaggcacggacacttgcctagtatgttgagagaagttgagagaaaaaatgaagagcttagtgtgttgctgaaggcgcagcaagttgaatcagaaagagcgcagagtgatattgagcatctctttcaacataataggaagttagagtctgtggctgaagaacatgaaatactgacaaaatcctacatggaacttcttcagagaaatgaaagtactgaaaagaagaataaagatttacagatcacatgtgattctctgaataaacaaattgagacagtgaaaaagttgaatgagtcactcaaggaacaaaatgaaaaaagtattgcccaattaatagagaaagaagaacagagaaaagaagtacagaatcagctagtagacagagaacataagctagcaaatttgcatcaaaa

SEQ ID NO: 263233 - DNA, 373 bp, Homo Sapiens
gagtgagccactgtgcctggccaatttcttatagctcctaaatttaaaaaacgtaccactttttcaacttgattaaaccgaactgcttttgtgaaacattatgctcaagaaaagggaagccattccaaatatgatttaaagtttaaaacaataaggaggaaaataaaaaagcaaacaaaaccactcatggcttccaaaataaatacattaaaaatagaaaatgtattaaataagaagccacttacttgctagcttatgttctctgtctactagctgattctgtacttcttttctctgttcttctttctctattaattgggcaatacttctgaagttattaaaaaaaatagaagaaaacattaatgaaccatat

SEQ ID NO: 263234 - DNA, 725 bp, Homo Sapiens; identical to SEQ ID NO: 2974

SEQ ID NO: 263235 - DNA, 958 bp, Homo Sapiens
gagggtaagaagtttgtcccacgaggtttctcttactttgcctccgcagtatacacgtacatccaaagccggttctaccgatccccagaagtgatcctgggccacccctacgacgtggccattgacatgtggagcctgggctgcatcacggcggagttgtacacgggctaccccctgttccccggggagaatgaggtggagcagctggcctgcatcatggaggtgctgggtctgccgccagccggctttcattcagacagcctccaggagacagacattctttgattccaaaggttttcctaaaaatataaccaacaacagggggaaaaaaagatacccagattccaaggacctcacgatggttgctgaaaacctatggacaccagcttcctgggacttttctcagaaggtgtttggtatgggaaccttctcttcgcatgaccccggaccaggccctcaagcatgcttggattcatcagtctcggaacctcaagccacagcccaggccccagaccctgaggaaatccaattcctttttcccctctgagacaaggaaggacaaggttcaaggctgtcatcactcgagcagaaaagatgagatcaccaaagagactacagagaaaacaaaagttagccccacgaagcatgttcagcattcaggtgatcagcaggactgtctccagcacggagctgacactgttcagctgcctcaactggtagacgctcccaagaagtcagaggcagctgtcggggcggaggtgtccatgacctccccaggacagagcaaaaacttctccctcaagaacacaaacgttttaccccctattgtatgacctttgctgagggtatgtcctgctcctttccaccagtgatttgtattaagacagcacttatattgtacaatacttcagactgttttttttaaatacataaaactttatgttaaaaaactagaaaa

SEQ ID NO: 263236 - DNA, 877 bp, Homo Sapiens; identical to SEQ ID NO: 178149
  misc_feature (514)..(515): n is a, c, g, or t
  misc_feature (517)..(518): n is a, c, g, or t
  misc_feature (594)..(638): n is a, c, g, or t
  misc_feature (645)..(656): n is a, c, g, or t
  misc_feature (672)..(736): n is a, c, g, or t

SEQ ID NO: 263237 - DNA, 580 bp, Homo Sapiens
gggagactagcgaacaatacagtcaggatggctaaaggtgaccccaagaaaccaaagggcaagatgtccgcttatgccttctttgtgcagacatgcagagaagaacataagaagaaaaacccagaggtccctgtcaattttgcggaattttccaagaagtgctctgagaggtggaagacgatgtccgggaaagagaaatctaaatttgatgaaatggcaaaggcagataaagtgcgctatgatcgggaaatgaaggattatggaccagctaagggaggcaagaagaagaaggatcctaatgctcccaaaaggccaccgtctggattcttcctgttctgttcagaattccgccccaagatcaaatccacaaaccccggcatctctattggagacgtggcaaaaaagctgggtgagatgtggaataatttaaatgacagtgaaaagcagccttacatcactaaggcggcaaagctgaaggagaagtatgagaaggatgttgctgactataagtcgaaaggaaagtttgatgggtgcaaagggtcctgctaaagttgcccggaaaaaggtggaagaggaagat

SEQ ID NO: 263238 - DNA, 475 bp, Homo Sapiens
  misc_feature (367)..(367): n is a, c, g, or t
  misc_feature (410)..(410): n is a, c, g, or t
aaacatcttaaacaacagaaaacagggttcgagagtagagaactggtctgaccacaaatttaccagggcagagttttgccccaacctagtaattctgagggtactgcaggagaccagggcgtatctcagtccttatctcaaccccataagacagacattcccagagcggccatttataggcctccccccaggaatgcattcctttcccacggtattaatattaatattccttgctaggaaaagaatttagcgatatcttccctacttgcacatctgtttataggttctctgcaagaagaaaaatatggctttttttgcccaaccccgcaggcagttcagaccttatgtttgtcttcccttgttcccnttaaaaattcggttatttctgttctttttcaaggggcactganttcatactgtttcaaacacacgttttacagtcatttgtacagttaacacgttatcacgtgggtcc

SEQ ID NO: 263239 - DNA, 846 bp, Homo Sapiens
  misc_feature (698)..(698): n is a, c, g, or t
  misc_feature (713)..(713): n is a, c, g, or t
  misc_feature (736)..(736): n is a, c, g, or t
  misc_feature (752)..(752): n is a, c, g, or t
  misc_feature (784)..(784): n is a, c, g, or t
  misc_feature (791)..(791): n is a, c, g, or t
  misc_feature (798)..(798): n is a, c, g, or t
  misc_feature (818)..(818): n is a, c, g, or t
agcagaactactagtaagggtctaacaaagatcacatgcttctgagggaacaggacaaagggcaaaagcagaactacttataagagtccaacaaagatcacaaggcaaagggcaaaagcagagctactgataagggtctatgttcagcagtgcacatattgtcttaataaacatcttaaataacagaaaacagggttcaagagcagagaactggtgtgaccacaaatttaccagggcggagtttttccccaccctagtaagcctgagggtactgcaggagaccagggcgtatctcagtccttatctcaaccgcgtaagacagacattcccagagcggctgtttatagacctccccacaggaattgcattcctttcccaggggtattaatatttatattccttgctagtaaaagaatttagcaatatctctcctacttgcacatccattttataggctctctgcaagaagaaaaatatggctggtttttgcccaaccccacaggcagtcagaccttatggttgtcttcctttgttccctaaaaattgctgttattctgttcttattcaagatgcactgatttcatattgttcaaacacagatgttttacaatcaacttgtacagttaacacaattatcacagtggtcctgaggtgatgtacatcctcagcttacgaagataacaggattaagaggttanagtaaagacagggcntaaggaagttattaaaagtattnatttggggaactgatnaaatggtgccttgaaaatcttgccacaatttnatggttncctgtgnccgtgggttccaggccggtnccctccgtttcgggggtccctgaatttt

SEQ ID NO: 263240 - DNA, 521 bp, Homo Sapiens
aagcctatagaaggatgtgccaagtaggagaaatattgctgaattcttttccccagcaatggaagaaccctggggaaggaatgcaattcctgggggtaggtctatagatggccgctctgggaagtgttggtcttatgccggttgagataaggattgaaatacgccctggtgtcctgcaagtaccctcaggcttacttaggattgggaaattccagccgggtaaattctagtcagagtggttctctgttctcaaaccctgtttcctgtgaagatgtttatcaagacaatgtgtgcacagcaggacatagaccctcatcagtaattctaattttgcctttgccttgtgatctttactgccctttgaagcatgtgatccttgtgacctactccctgttcgtacaccctctcctcttttaaaatccctaataaaaacttgctggttttgcggctcggggtcaccatcacagtcctaccaatatgcgatgacacccccagaggcccagctgtaaaatttaaaaaaa

SEQ ID NO: 263241 - DNA, 890 bp, Homo Sapiens
actgaggcctgcatcagtgaagcaacctatccaagactacatagagaaggcagtaaatggcagggttagtctcagaacaggggagggtctgttccccccgcagtgggcagtcctaattctgaacttcacctatctgggggtgatagaggggaacaagaggaagcctgctgaagagaaaacctaaacatctgttttgtcttacgtatgacttcctctgcttgtggggagagaagggaagggaaagggaacacattgtttgttcagccccacaaccccaacagaattaaaccctggggagcaggtttgaacagcagaggcttccctcagatcaaggagccaggagcagatgatctatctctgtggccacacagagagatgtcaccttatgcaatttgcatatcatattcaattcccccaactgctctttctaatttattcaactggggaccaggctggtctcatgccaacctaggagatgtaccatagcagtatgagcagaattcctcaggaggaacaattagcaaaaactgcagttgcctctcgataggcctgagcagagagaggaacaatagctctcacgtctctcctcatcagattctaactaagcagatgttctcatgcttttttcttcttcctatgttctgtatactgacacctcttctcagtggcatatgaaatatgaaatgtcatgtgttgtgagtttgtataaatataaaggaatatatatatacagtagcaaaagagaagatctcatttacaaatatctatggtgtttccttgttctgtgttgatctgttttattgatacaaactgaattttcttaatgtatcttctatctctattatagtggcaatgatggtatatgcattaaagttcttctgaattgcaaa

SEQ ID NO: 263242 - DNA, 457 bp, Homo Sapiens
  misc_feature (62)..(62): n is a, c, g, or t
  misc_feature (83)..(178): n is a, c, g, or t
gagtttaagcgattcttctgcttcagcctcccgagtaaaaggcatgcatcaccacacctggntaattttgtagttttagtagnnnnnnnnnnnnnnnnnnnnnnnnnnnnnnnnnnnnnnnnnnnnnnnnnnnnnnnnnnnnnnnnnnnnnnnnnnnnnnnnnnnnnnnnnnnnnnnnatcagccactatgcccggctgggatcatatgttccacacatgtttgttcaataagcatggactgcaaccacctacatgaatattcatagctcctcctgtagcctgttgaatatgtatgtttagccaacctcttcagcataaagctcctgcccaaacccctcctgctcctaaatgtctgtctctggtgttaaccagaggctgctcttcccaggctgctggatggctaccttgcaggctgtcacccttaacaagaaataaagtgtcctttgcaaatgcata

SEQ ID NO: 263243 - DNA, 825 bp, Homo Sapiens; identical to SEQ ID NO: 97859
  misc_feature (499)..(499): n is a, c, g, or t
  misc_feature (578)..(593): n is a, c, g, or t

SEQ ID NO: 263244 - DNA, 697 bp, Homo Sapiens
ttttaacatcgtagagggcaatgctggcaaacaggggctcaatttcaatctcgaacctcgtccactgatgggtaaagggcaaagagctcggcctgcctattggtcctccgggcctcctcgttctgcttctcaaagtcctcggcactcacttgctgcaggaggttttctagccgcttgtcaggctgcaggctgcggaggtcaaagtcacaggcagtgacggggcctttcccagacacgtcgcacagcacgtttaagtggcgggggcctgcctgagcagcgggttcactgcactccaaggtttccgactcaaacgtctgtttcggaagcgtcttgtgaaaatcttttcgagatccagtctttttaaagccacagatttctggacttccttggtttttccggatcacgattagccactcacggatgtaggtctgaacacagtccctgacatgagggtccagttcaaccccttcctccggcaaagagggctgcaaagtcctacattcctttgtcgtgaacaccacgtccaagtcgtcatcagtgaagtccccgagctcctgggcaagctgcacatccaggctgttcaggtgtgtcatcagaagtccttcaaagtccactggctccacagggtcataaaactgaggctttgaaagattcacagttacacggcgcgtaaattgttacaggagacaaaatgccc

SEQ ID NO: 263245 - DNA, 1425 bp, Homo Sapiens; identical to SEQ ID NO: 3535
  misc_feature (699)..(699): n is a, c, g, or t
  misc_feature (701)..(701): n is a, c, g, or t
  misc_feature (848)..(848): n is a, c, g, or t
  misc_feature (850)..(851): n is a, c, g, or t
  misc_feature (866)..(885): n is a, c, g, or t
  misc_feature (1219)..(1227): n is a, c, g, or t
  misc_feature (1266)..(1297): n is a, c, g, or t

SEQ ID NO: 263246 - DNA, 930 bp, Homo Sapiens
  misc_feature (726)..(726): n is a, c, g, or t
ggagggagtttaagtttgcagttacaggccagttctccagctctccatcttagagagacaggtcaccttgcaggcctgcttgcaggaaatgaatccaagcagccaaactcgaatccccctagggctcaggcactgagggccctggggacagtggagcatatgggtgggagacagatggagggtaccctatttacaactgagtcagccaagccactgatgggaatatacagatttaggtgctaaaccgtttattttccacggatgagtcacaatctgaagaatcaaacttccatcctgaaaatctatatgtttcaaaaccacttgccatcctgttagattgccagttcctgggaccaggcctcagactgtgaagtatatatcctccagcattcagtccagggggagccacggaaaccatgttcttgcttaagccattacagctgcacatgaattctctagagacgcaaaacgctcaccccaaacaattcttgccgagcggctttggccccccgtggaaagctttttttagacctttcggaccttgccagccccggcgcgccgctcagtcccaacgccgtacccttgtccctttccgccgcccctccccttatgacgcaccgctggaatccctgcccttaacccgatttggccattcccctctctcccccgtactatacacccccgccccgccttccttcccgcctttgtgcgcctgtccgatcatantttccgcccatggtccacgttctccgccgcgtaacctatatcctggattctcttcccgccccgcgtgtgctacccccttattgccattttcccgttacgcggagttcgcccgaggcccggggctttgtcgccgcgtactttaggccccgccccgcctaagttccgccttcattataccgcgctgtgccccgcgccgtattaccc

SEQ ID NO: 263247 - DNA, 870 bp, Homo Sapiens
  misc_feature (63)..(63): n is a, c, g, or t
  misc_feature (120)..(120): n is a, c, g, or t
  misc_feature (123)..(123): n is a, c, g, or t
gggcttgactttcgaatgtaaaactgactgtgccttagcatcaccctgtccagtgcccctggnagcctggtagtgtccagaagaatggacacctgctccagatttagatgcccatctggnttnttgtttgatttgcggcgttcctgtcttctgtaaagctagtgagttgtcccaagagactgatgccacagcttgttcgcagtttacacaaactcagctttaaaattccaaatagaatctgacttgcaaactctagctgcagcatgtggagcttctagatgtttactaccttgaatggttgtcagtgtcactgaaccacaggggagaggagtatggggtagagcaatggtctgggccaaggaatggtgagcttagggtcttcctctgactccttactcctcaaggaggcagttagggtccctcttaagcaggcttctatttcttaccactaaattggtttcctttttcatccagaagttagaactccccagatattcacactataggatctgaattccgagattctaaaatatcttaaaccacaagagagaaaatctagttctgcctcagccccagtcagcaggccatctgtcccttcctctcctctgagtcagacagctctggcaagcaaggctccttggctagttcctaatgcactgacaggagccctcccattaaggacgacttctactcaaaatgcgactctccctctgaacttcagatgcctctgttagcaggaaaaggcattgattggattggatatatttatgtgactgcgggcatttgtggctgtagaatccgtgaccgtaatgttatatgtaatgggaactatcttataaacttgaaaaaaataaagtttttattttctat

SEQ ID NO: 263248 - DNA, 653 bp, Homo Sapiens
ggtacggtccggaattccgggatatcgtcgacccacgcgtccgggcccagcctccccaccccaccgcgccccaggggttggaggaccttgtctgtgtcaggacagtgtccctccctgggaatgtgacatgagggccgactggggccaggctcaggggcagaggctgggacacaaggggctggcgagggctgcgaggccagggaagccctgagtttctggcggggctgagcagtgggggagcattgtgttgtgggtgtctgtgtgtgaggtcaccctcaaactgcaccgccggccagataccctcctgaccccgaggacttggtctggtctctctggtggctacaaccccagagttttaaggacttggaaaggaaagcacaatcagagaagaaaacagcccccgaaccagcaggagtggcctggcacatggaccggcctgagcgatgtgcactccacccaagccaggctcccagggggcctgatttctctctcactgtctctttttttaaaatggttgcacggctctgccccatggggggccttttttacacactgcgaggcccagctttctaggggacttttgcacatgtcatgcagctcagctgggagctgcttaggtggaaaactccaaataaagtgcggctgtcgcagaa

SEQ ID NO: 263249 - DNA, 1303 bp, Homo Sapiens
  misc_feature (982)..(1016): n is a, c, g, or t
  misc_feature (1042)..(1042): n is a, c, g, or t
  misc_feature (1222)..(1222): n is a, c, g, or t
taccggtcccgaagttgggatatcgtcgacccacgcgtcgcctttgccgtgcagctgaacggtgcccggggcgtgattgatgcccgggtgcacacaccctcgggggctgtggaggagtgctacgtctctgagctggacagtgacaagcacaccatccgcttcatcccccacgagaatggcgtccactccatcgatgtcaagttcaacggtgcccacatccctggaagtcccttcaagatccgcgttggggagcagagccaggctggggacccaggcttggtgtcagcctacggtcctgggctcgagggaggcactaccggtgtgtcatcagagttcatcgtgaacaccctgaatgccggctcgggggccttgtctgtcaccattgatggcccctccaaggtgcagctggactgtcgggagtgtcctgagggccatgtggtcacttatactcccatggcccctggcaactacctcattgccatcaagtacggtggcccccagcacatcgtgggcagccccttcaaggccaaggtcactggtcccgaggctgtccggaggccacaaccttcacgaaacatccacggttctggtggagactgtgaccaagtcctcctccaagccggggctccagctacagctccatccccaatgttctcctcagatgccagcaaggtggtgactcggggccctgggctgtccaaggccttcgtgggccagaagaactccttcaccgtggactgcagcaaagcaggcaccaacatgattgactggtgggcgtgcacggcccaagaccccctgtgaggaggtgtacgtgaagcacatggggaaccgggtgtacaatgtcacctacactgtcaaggagaaaggggactacatcctcattgtcaagtggggtgacgaaagtgtccctggaagccccttcaaagtcaaggtcccttgaatcccaaaagtgcctccccagcctcagcccccacctccagcnnnnnnnnnnnnnnnnnnnnnnnnnnnnnnnnnnnaatgtgccacacccagacacgcacanaatcagacactacaaacacctgccttgggggtgaagtgaaggcccagcctccccaccccaccgcgccccaggggttggaggaccttgtctgtgtcaggacagtgtccctccctgggaaatgtgacattgagggccgactggggccaggctcaggggcagaggctgggacacaaggggctngcgagggctgcgaggccagggaagccctggagtttctggcggggctgagcagtgggggagcattgtgttgtgggtgtctgt

SEQ ID NO: 263250 - DNA, 521 bp, Homo Sapiens; identical to SEQ ID NO: 3587
  misc_feature (360)..(382): n is a, c, g, or t
  misc_feature (384)..(388): n is a, c, g, or t

SEQ ID NO: 263251 - DNA, 839 bp, Homo Sapiens; identical to SEQ ID NO: 3590

SEQ ID NO: 263252 - DNA, 1099 bp, Homo Sapiens
  misc_feature (17)..(17): n is a, c, g, or t
  misc_feature (22)..(22): n is a, c, g, or t
  misc_feature (80)..(80): n is a, c, g, or t
  misc_feature (89)..(89): n is a, c, g, or t
gcccccagcagaccccngctgnaaagcagtgctgacccaccctcttggcgccacaaacaagtcctagcccagcccagctnaaacggacncccatgagtccctctgagaaatcaaggaaagtattcccgaatatttcggcagtgggaatctctgtgcctcatgctgaaagatactcccagcgcccttccctggagatagctggaatgagagtgactttttgaaaaattaaggctgagttcctttcggtcagctgacactaagtttttcctgttctgggttaatcataaggagccccctgccatagcaaaggcagtgagtgtcaactatctgcatctggctgagagagacccgtttcctttcagggatgtggacagggtaagggcagcaagcatggttctgttaaaggagtgtggggttaacagactagaaggaagactaaggacctgaccacccatttcagcatcttcaatgtggagcagtgttctgaggactcttctatcctaggactatgacagtgtgtattaataaaatatttgctaagtaaaaaactaacccacaactacaattaatgggccgtgtcgggccgccctcgggcccttcgaaaaagtttttcctagaccaattccgatttgggcgcccccggccccccggtagggtaaaggggaaacctggggcccaatagcccggttttcccctaggggagaaatcccttgggcccacttgaacctaaagggcctttgggggaattccctaccaccaatttacaaaaacaaccgcccccgggagggggcaaacccccggaggcgggtttcctggaaaccaaaacatcccagggaaggtgggagctctcctggaagagggccattttaacggggggagtccttacccggcgccaggggaagtgccacaagcggagagcttccgaaataattcaacaattagggcccccgccgccaacgtgcccagttgctattcggaagggaacccgggcaccgcaagattgtcaatggaaaagaccaattctggggcgcgaaacagtggggaagaccctcttcccaaataagcgggggattgggtccacaactcctggaagcccccc

SEQ ID NO: 263253 - DNA, 740 bp, Homo Sapiens
  misc_feature (68)..(68): n is a, c, g, or t
  misc_feature (74)..(101): n is a, c, g, or t
cccagatgaattttaaactgggagttgcaccaactgtgagacagcctcaaccccaatgttatatactnccagtnnnnnnnnnnnnnnnnnnnnnnnnnnnnaaagactgaaaacagttctctctggaaaacgatccaccaacctttttatgggaagaaggtcttctctaacactttaacttaagggaagaagtgatggagaggaagaaggaaagtacactggccaatactctgaaactgactgacttgggtatctgtggtccaaagaggatcccgaaagacagtgactctgtctcaatgattattcccatcccgaattaaaagtcataatgacagcatttacattcacacagggtctctttccaagaagtttggtgagtcacctacatgtcttcaattctcaaggcaacagtgggggcaacaaggaggttgacagccaggtcctgtgagagctgtttgtcaaagccccactctcagtgagtcagtcccctggaagttgggttcagtgcacggaggcagggccactgactggcttagcaacgtgtccatcatgctgattttagcatcttgcttctcaatgtcctcatacggagtccaggacaagtcatgctgtagtttgcaggcaccaaggaagtcatgtggacaacttgtcccccattcctagagaaggcaaaggaggcagttcccatcagcgtgggttgtaaacaaactgagctcatttcctaatcaactgtgccgaaa

SEQ ID NO: 263254 - DNA, 382 bp, Homo Sapiens
  misc_feature (15)..(15): n is a, c, g, or t
  misc_feature (22)..(22): n is a, c, g, or t
  misc_feature (44)..(44): n is a, c, g, or t
  misc_feature (65)..(65): n is a, c, g, or t
  misc_feature (121)..(121): n is a, c, g, or t
  misc_feature (125)..(125): n is a, c, g, or t
  misc_feature (139)..(139): n is a, c, g, or t
  misc_feature (228)..(257): n is a, c, g, or t
ttggggatggggaanaatccantggagacagagtcacctgtccnttccgggatcccactttgggncccacagataccccaagtcagtcagtttccagagtattggccagtgtactttcccntctncctctcccatcacntcttccccttaagttaaagtgttagagaagaccttcttcccataaaaaggttggtggatcgttttccagagagaactgttttcagcccnnnnnnnnnnnnnnnnnnnnnnnnnnnnnnactggtagtatttaacattggggttgaggctgtctcacagttggtgcaactccagtttaaaattcatctgggaacgagaatgttgagtaatggagggtgatttaaaaaacaacaacaactcactc

SEQ ID NO: 263255 - DNA, 648 bp, Homo Sapiens; identical to SEQ ID NO: 4082
  misc_feature (425)..(473): n is a, c, g, or t

SEQ ID NO: 263256 - DNA, 1208 bp, Homo Sapiens
  misc_feature (1004)..(1034): n is a, c, g, or t
aattcggcacgagcggcacgaggccagatgccaccccgttccaggaaggtttgaggaccttcgaccagctggacgccatatctagtttgcccacacccagtgacatctttgtgtcctactctactttcccaggttttgtttcctgggagggaccccaagagtggctcctggtacgttgagaccctggacgacatctttgagcagtgggctcactcttgaagacctgcagtccctcctgcttaggggtcgctaatgctgttttcggtgaaagggatttataaacagatgcctggttgctttaatttcctccggaaaaaacttttctttaaaacatcataaggccagggcccctcaccctgccttatcttgcaccccaaagctttcctgccccaggcctgaaagaggctgaggcctggactttcctgcaactcaaggactttgcagccggcacagggtctgctctttctctgccagtgacagacaggctcttagcagcttccagattgacgacaagtgctgaacagtggaggaagagggacagatgaatgccgtggattgcacgtggcctcttgagcagtggctggtccagggctagtgacttgtgtcccatgatccctgtgttgtctctagagcagggattaacctctgcactactgacatgtggggccaggtcaccctttgctgtgaggctgtcctgtacattgtgggatgttcagcactgtcccttgcctcaatgccagtaacgcgtcttcctgagtggtgccaaacaaaaaggttctcaggtgttgccaaatatgtcctggggtataaaactttcctcgcctgacaaccactggtctgtagggatttttggctacacacaaaccagtatcgctcatagatcagcaaaccggggcctactagagtctgaacagctgtaatctatgaattctaagtgaaattttaaaaattgttaaatttttcctatattgcattaattttaaaaaaataaatcctgaggcttnnnnnnnnnnnnnnnnnnnnnnnnnnnnnnncccttggccggcccgcctcgggcccttcgaaaaaccttttttaaaaccttttcctttggggccgccggggccccccaaagggtaaaaggggaaccagggggccaataagctgggtttccccaaagggaaaaacccccgggggccatgggaaaaaaaggggcgttggggagtttt

SEQ ID NO: 263257 - DNA, 397 bp, Homo Sapiens
  misc_feature (62)..(62): n is a, c, g, or t
aaaaggttaaaccccctgctcctaagagaacaaacacaagggaatccatggggaacaacaantcaactagccccctggacccagcccactgcctcaaaaaggcccacgtgcaaatcccacggcattcatctgtcccctcttccctcccactgttcaagcacttgtcgtcaatctggaagctgctaagagcctgtctgtcactggcagagaaagagcagaccctgtgccggctgcaaagtccttgagttgcaggaaagttccagcctcagcctctttcaggcctggggcaggaaagctttggggtgcaagataaggcagggtgagggccctggccttatgatgttttaaagaaaagttttttccggaggaaattaaagcaacccaggcatctcgtgcc

SEQ ID NO: 263258 - DNA, 491 bp, Homo Sapiens; identical to SEQ ID NO: 178169

SEQ ID NO: 263259 - DNA, 336 bp, Homo Sapiens
attttcagaggttattgtatgaaattgtcctattgatagtacttttatgactgtaaatactctggctttctccgtgtgaattctcacattagactttaattcgagcgcgtgtgaactgaacgctgatcagtattttttatcaacacctgagaactgttacaccttttattttgtcttttaggaaatccctgtctttccattttttcatgtaaattttgcacagttacttgttcatatgtaaatattttactttcagaaatgaagtttttaattgctattgttttatataggattgaaagaaaattaactcctttattaaaaacaaatttatctgta

SEQ ID NO: 263260 - DNA, 931 bp, Homo Sapiens; identical to SEQ ID NO: 177658

SEQ ID NO: 263261 - DNA, 449 bp, Homo Sapiens
cgagactttggtgagttctaaatttcagaacgttttgttcactgagccaaaaaaacagatgaaacaaccacaggccaggacttcaagtgaggaggacgcctttgtttgccgtggttggtgggagcacacgccggagcccggtaacgtgcctgtgggagtgaccaagggccacccgcccaagggaaaatgttcattcttcatcagctttgctaattctgctttgaggcagtaaaatgcaaaagaccatagaatttgtatttctttttttaaaatacaatttataacattatattttgtactctttatattagaatttgtaactagattgatgtatttaactatttctgaaaaagtaattcaatgttttagttgtgtgataaaaatatttagataaaacatattcattctattggaatttgaaataaataaaaacatcttggagttctgaa

SEQ ID NO: 263262 - DNA, 665 bp, Homo Sapiens
ggggggcaactccgcccttgaaagactgggaattatgctagaaggtcgtgggcactaaagaaagggagagaaagagaagctatatagagaaaaggaaaccactgaatcaaagagagagctcctttgatttcaaagggatgtcctcagtgtctgacatctttcactacaagtatttctaacagttgcaaggacacatacacaaacaaatgtttgactggatatgacattttaacattactataagcttgttattttttaagtttagcattgttaacatttaaatgactgaaaggatgtatatatatcgaaatgtcaaattaattttataaaagcagttgttagtaatatcacaacagtgtttttaaaggttaggctttaaaataaagcatgttatacagaagcgattaggatttttcgcttgcgagcaagggagtgtatatactaaatgccacactgtatgtttctaacatattattattattataaaaaatgtgtgaatatcagttttagaatagtttctctggtggatgcaatgatgtttctgaaactgctatgtacaacctaccctgtgtataacatttcgtacaatattattgttttacttttcagcaaaatatgaaacaaatgtgttttatttcatggggagtaaaatatactgcaatacc

SEQ ID NO: 263263 - DNA, 1581 bp, Homo Sapiens; identical to SEQ ID NO: 4146
  misc_feature (1480)..(1480): n is a, c, g, or t

SEQ ID NO: 263264 - DNA, 1408 bp, Homo Sapiens
  misc_feature (587)..(587): n is a, c, g, or t
  misc_feature (778)..(778): n is a, c, g, or t
  misc_feature (814)..(814): n is a, c, g, or t
  misc_feature (821)..(836): n is a, c, g, or t
  misc_feature (1370)..(1370): n is a, c, g, or t
  misc_feature (1395)..(1395): n is a, c, g, or t
gggggtcggccgccatagccccagtaggacaaacgggctcgggtctgggcagcacctctggtcaggagggtcaccctggcctgccagtctgccttcccccaaccccgtgtcctgtggtttggttggggcttcacagccacacctggactgaccctgcaggttgttcatagtcagaattgtattttggatttttacacaactgtcccgttccccgctccacagagatacacagatatatacacacagtggatggacggaccacacagctacatatctatcaacccacacgctctttcccctcttcctcgcgtccgctcctacgcgcgcctttccggccgcgcggttcctccttctcctgcacctccatcccaccctccatctcgcgcgcgccccgcacgccgcgcccgcatccacgcgcgcatcctccgttcccctccggatcgctcctctcctatccatcccgcccgcccggttttacctcgcattcccctcggcgctttccccacgcacaactcttctccttcattataccttcctgcgttccgttgtgtgcgcgcagcattgcgggatccctccggctacctccnaggtacgctagctagtccgaacccatgccggtgtgatcccccccgacgcttgtgttactcctctgccctatgtcccgcgcacgatcccctccgcccggcctttttctcctccccatacgcctacccccccgtgccctgacctccatgttttgggccgacaataacccgtactaccgccttttcgccgtcgnctctttcctctgttctcaccatctgtcccaatttcnttctctnnnnnnnnnnnnnnnntttcgcccctctttgttatacctccccgcacgaacgctttcggccctttttctgttcccctccgggatacgtcatcctcatacctctaacgtcgttccctccgccgggtgtaccgtgacgggcactcgcctgctcatcttctgcacgggtgggacggttttccatattctgcgcgcgcgtcacggctgcaggtacgtcccgcgcactcacatctgtagacgccgcgcgaaaaatcccccctaccccccggcgcccgcgcccgcaataacccctcatttcccacgtaaccgcagaaccgccgctatattcttttataccgccgaccccgtatcctgattattcctatctcgtaactattccatattgtgccgtcattattttcatctcgcgccccccgttgatgtgccgtgtgtaccgtttaactcgataatcacgatccgtagcatactcccgcgtgccgtttcgacccatataatgtcttgcgtcgcgcatatttgttcatcgaccgacatcgcctcccgatttcccggtgtngcggactagatctgcgctgttgctnatccgccgcttac

SEQ ID NO: 263265 - DNA, 1172 bp, Homo Sapiens
  misc_feature (359)..(376): n is a, c, g, or t
  misc_feature (536)..(537): n is a, c, g, or t
  misc_feature (949)..(974): n is a, c, g, or t
ctatacaaggggaaggtcgggacgggtgagcggccgaaagggaaatacgtcgtacaaagggtagtgttccgccggcgcaatagaccggctgggcggaaaagaacgagaggggacagaacacgcggagcggcaacggggggatgtgtggggtatcaagggagagggggcgtcgaatgaccgtatgtagcgcgtctcgcgcgggtgtggcgaaggcgggacagcgcgcacacggatgatatataaagcgcgccgcgtacagacaggtataagtcgccccatttgggggaagacaaacgtattgtgtgtagcgccaaagaagcgcgcgcgtatcgcggggggtattgtgcgaacggcaatcnnnnnnnnnnnnnnnnnntatttcgtatatacgaggggcgcgcggcaaaggggggagcggaactcgcccccagcaaaaagcggcgttgtggtaatcgttacccggctataaagggtaccgcgcgggaaggtcggtggcgccatagggcgggagaaaacgcgaatatctttatgttatnncggccggcgcgattaacaaccgtgtagcattggtacggaggggcgaccgcgaagcacccgcagggaacgagaatgcggttgcgttgaagagaaatgtttggggggaggtggggagcggaacgcaaaaccagggttatgtgggtggttcggcgggggtgactgtaggggtcgcggatcggttatttcgtggatgcggagaagggggaggcggggggagaaaaagaagaaaggcgacggaacggagagggaaggtcaaagctcctcattccacttctttatttcggtttatgtgaatattagagctacgggacaggtgagatcagaataaggcccgttaacaatgaaactgaagcagaggacttagtcctgatttctgtctcttgctttctcttttctctttttttaatatgcnnnnnnnnnnnnnnnnnnnnnnnnnngacaacacaacatcagaaagacatttttttaacttcattcgctacaacagtcacgaactggttgaactctacctgccatccaactttaagaaacgaagacccggcactgtgaaaaagaaacaaaacccaaacaaaacaatgatacaaagcaactgcgaattaatgtaaaaatggagtgcaaatgcgactacagattgc

SEQ ID NO: 263266 - DNA, 988 bp, Homo Sapiens
  misc_feature (77)..(77): n is a, c, g, or t
  misc_feature (86)..(86): n is a, c, g, or t
  misc_feature (88)..(88): n is a, c, g, or t
  misc_feature (110)..(110): n is a, c, g, or t
  misc_feature (112)..(125): n is a, c, g, or t
  misc_feature (856)..(895): n is a, c, g, or t
cgatgagatggcagctgtgatgggcttctctggctttggttccaccaagaaagagttactgaggctttctgtgcttngcctgactntngcctatgctggacctaactttncnnnnnnnnnnnnnnagtagggggtcatttctttttgggtaatgggaaagttcttaagagtgtcaatggggagggatagagggtgggggctcatggtttccctctactttgggagagggcacagattgcagaggtaatgctgtggcatattgcttctgcctcagtgtatcactggagtcacaggaccctgcccacctgagttcccaataaagaaaaacctccccttctgaggctgctttcccaaaactccccctgcatctttatctcttcatctatcccacctcttgtctgaacatcccacctttatcctgtgttctgcctttgttttaattttaactcatgttcatcctgcaacagaagcattctctaggtcccagtttccagttgattgcatatccttgatcagccctttttcccatcctgccctatggttctctagccacctgtgcatgcatgtgtatttctgcctggttctatggtgtgtggatgtgtgtgcatgaatctgtcatatagagggggtccgagctggaatcctagagcattgctgccctggggcctgatgttcttggcttcctcagagcatgtaacaggaaattaaatgggatgagtgtttggtgtggtttgtgtctgatgagttttttaacattcaggtgtagattgtttcagcttctcttgtttcattttcctgaagatttatgtttttgtctaccttgtgagcaggcttttggaagaacctgtttgatgcnnnnnnnnnnnnnnnnnnnnnnnnnnnnnnnnnnnnnnnncttattatgggagcccgtcggtcttagaagctgtttgacatgtataataaatggcattgactgggcctgttttacatttggtgagaacattcc

SEQ ID NO: 263267 - DNA, 1035 bp, Homo Sapiens
  misc_feature (413)..(522): n is a, c, g, or t
  misc_feature (611)..(620): n is a, c, g, or t
  misc_feature (841)..(841): n is a, c, g, or t
  misc_feature (976)..(987): n is a, c, g, or t
cctgcagacatcccacgcataagagcctaggccagaccgcccgctccgttgaagtcttgtgattggacaagacacagtgtggagaaagacccctaagcctaacagagatgaaggtaggctgggtccagacacggcacctacggagagccacggaccgaagccagagagcctttcctctgcaagtgggactgaaactcttgacagatgctgctcaatctgactggtatagcaggacagttaattccagggacgatatggatgaaaagacaaccctacagctgccaaattcctttgattaaatgtgtgagctggttgataggcatgagtgtgatacttctcaggcaagatgtgttaagaataccggggactgtaggcctatggtaataataaacacgtattttatgaaatgaccnnnnnnnnnnnnnnnnnnnnnnnnnnnnnnnnnnnnnnnnnnnnnnnnnnnnnnnnnnnnnnnnnnnnnnnnnnnnnnnnnnnnnnnnnnnnnnnnnnnnnnnnnnnnnncaacacaaaccacacctacaccttcttctttgccggcgcccttcgcccctaaaaaagattttttaaaaccctctttttgtgggcccggnnnnnnnnnntacgcgacagcggaacccgtggccctactccttttcttcccaaaaacaacccccccggccaaaaaccaccatccccccttttgccaccttcccctccacaccaaaatacaaaacccaacctcccccgtcgcgagaaaccccactatagaattccttcttttaaacacacaaaccgctccaaaatccgggatgcccttttgcggcgacctcatacttggggnagtttctaaccaacaccgggggtgttctcccccgcggcgcgccccccaaacctaaaatttttgcggactccccggtccggcgtctatccttatctacgaaaaaagcgccgggaaaaccccctatataaccccttnnnnnnnnnnnngcggacgctctccttatcacaaccgcttttttcccacaaccttacttt

SEQ ID NO: 263268 - DNA, 549 bp, Homo Sapiens
  misc_feature (23)..(23): n is a, c, g, or t
  misc_feature (34)..(34): n is a, c, g, or t
  misc_feature (54)..(54): n is a, c, g, or t
  misc_feature (59)..(59): n is a, c, g, or t
tgcctccagtattttggagtccnatgattagganttgaccccgccctgttaacnggaanaaagttgagaagtccaggcccttgaaaagaggatagaccccaggctgtggaggagtggaatattgagaaggctgaggaactcagcaacccagctagctactcgagagcttggtgtaaaaattgccaaagcagttgcctgccacaactttgtaaaagccaaaaaggaggttgaaaattcacaggctgcccgaaaaaagaagaaacttgcatgggggtttgaagcaaagaagagatgggaaaccaaaagcaacatgggatacatgtaacttgccagagtgcttcaagacatttgtagactcaaatgctcaatttactgagaatgttttcctgcctatgttaatatgtcagaaaattgatagcactaaaacaaaaataagcataaaatttgggattttgattatcagctcttttcagtctttctttaaggactttgtcctattgaagtgaataaaatgaagcattctgttattcgtataagaaatgtaagaaa

SEQ ID NO: 263269 - DNA, 1051 bp, Homo Sapiens
cggcgcttccgagatgaagatgggtttagaaaaaagttttttccgagggttcccgaggggtccggcacgagggggtggaggccccccgtgctatctcttgtcccctttccccggcgaaagccttatttcttttagaaggcgcggaacagggggtccctgggaaagattcgaactgaggttgggtgaaaaaaaggtgggaaattggcctataaagtgggaatagtgtcccagggaaccatgggggaggggggtttccattattgggaaatcccccatgaggggggcgcatttctggtctcgtaccccacagaggtatttcccgagagctggacttcgcagtttgctacccatcttacttttcttggggggggattataccccttccagccgccctgagaatggggggtcaagctctttagtataaagggaaagccatggccagccctaaaggcccacccgtcccctcacccccccaatcgtctcgtgaaacgtaaaaacagtgggaatataggaaagggaaccaaatctcattaattaattgttctcccccattaccccactgaatgaatggccatacaggctaagctgaataatgacaaagttgaaaggaccaatacagccccttttataaggattttgaatgttttgcaaatgtattggtccctgtgttgtattttgtagccttttcctgggcttcagctcccctacttcttgtatgtgtatgcatactgtagctaaccattaaagtcatgacacacacatgagtccactgtgcctttctcagtagcagcagccagtgctggtggtgaggaggaaaagtggacaatccagccctgcagaccttggggccatggggaaccaccaactaacttcttgctgaatgattgattgattggattgataggtcattcctactactaagctggcatgtttaaggaaattgtatttttcttcctatttatttcaacactggacaaatgctggagcaggtttatctggttaaggctgagtttaaaatacccaggttttaatatccttttcccccagggga

SEQ ID NO: 263270 - DNA, 1033 bp, Homo Sapiens
  misc_feature (438)..(469): n is a, c, g, or t
  misc_feature (509)..(527): n is a, c, g, or t
  misc_feature (557)..(557): n is a, c, g, or t
  misc_feature (1010)..(1010): n is a, c, g, or t
gcgacccgcaccagagaagacacgatgcggggctgggtggggcgagagagtcggcgggcggtgaaacatcgcgaggggagaggaaaaagggcccgcgtcaacaaacgtggtggggtaaagagaggaaaagtgctcgcggcggggcggcgatgatagcatgtaggagatcggaggggtaatccagcgagggtgagagcgagacaagccaatacactggggggtcaaggacgagggggttactcatggtgtgggagaaagaggcggcggcgataaagcgattgactgggcaggccggtcagctcaggcgagcggcggtcacccgcggagccgactggtctggttgggtggagggaaattggggtgggcaagccggggctattcacacagcaagacgagggggcttacggcgcggtcaaacctctgcggagcaacgcacannnnnnnnnnnnnnnnnnnnnnnnnnnnnnnnactagttgattagtggggtgggtcgtagtgcggcactgtnnnnnnnnnnnnnnnnnnnacagaggtgttggatggggtttgattttcngggtttgcttagagaaaatgttttattttcattagttgacaactagttgttcagttgaatggtaagtttcacactgcatcctaaaataagacagatactctgctggcaagtagaaaatagactaatttcattttttatctgttaagctctcttgataaaaaaggcaaaccaggccagttttaaatttaagaaacagaaacattgtcagtgcttcttgtatcaacacacttcatattcagaactactcccaagagataacatattatctccttttcaaagatggggaaactgaaactgggcattatctataatcgaccaaaccacatagtaagaggcacaagccagcattagaattcagatcttacttgaaagtgtacagcttaaaattttttaaaaaattccttccattataaatggtagtacctggttactggagaatgtttgggaaaagcngtaagaaggaagaagatgaactc

SEQ ID NO: 263271 - DNA, 641 bp, Homo Sapiens; identical to SEQ ID NO: 15357
  misc_feature (456)..(465): n is a, c, g, or t

SEQ ID NO: 263272 - DNA, 419 bp, Homo Sapiens
gactacataatcacgcctcttaaatgggaggtgatgacagctacccttgaggacccttagagagaactgatttccttagtaccccagcctcacaaatagtgcatcaccttcatggagttatgttgggataaatgtgtggagaagccccagggaatcgccctagactctcgcactgaaaattgtctctcccagctgtgtagaccgcttcattgacacccactcttgccatcaccagtcggtttgcccagattgtacagaaaggagggcagtaggccatcccccaggagaatgacagaagcaaaggacttgttactaagcagatttaagggtcagtgggggaaggctatcaacccattgtcagatcagcatcaggctgttatcaagtctgttggtgctaaaaagtaaaagatgaaatgttc

SEQ ID NO: 263273 - DNA, 441 bp, Homo Sapiens
  misc_feature (381)..(401): n is a, c, g, or t
aatagatagatggtgtttgcatgtaaattgcagagaaaacaaaaccaaagctgattggaaacaattaattgtgggtgtctgagggggaaggtcgcagctttgggcagctttgagaagcggtacaagagttctgtgcctgtgtgtccagccctggagccagccagtgcatttattttaagctcttagaagcaactccttggcccaggaatgcgtgacccctgagatgggtccacgcatctctctacacttccttctctccgtgggatactggactcgtgcctctgcgcccattctcttctcacgcatatccatgagctttaatttcactttctgatcacggtacgtccataaagccagtattacacttaaatgaagtattcnnnnnnnnnnnnnnnnnnnnnagaaggtaaacaaatttaataaagctaccaataatgcaaa

SEQ ID NO: 263274 - DNA, 1071 bp, Homo Sapiens
ggaggggcggcttggagctgggggatgcgggcgcagcggggcagctggttcttacgaacccttggaacataatgataaagcaccggcaggtgcagcggaggggccgccgctcacagatgacaacaagtttcacagatcctgccatctccatggatctcctccgagctgtcctgcagcccagcatcaacgaggagatccagactgtcttcaacaagtacatgaaggctaaactgctcttttcagatggagaaaaagtaatacccagattgacccatgagcttccaggaataaagcgtggccgtcaggcagaagaagaatgtgcccatcgaggaagcccccttcctaaaaagaggaaaggacggcctcctggacacatcctgtcaagcgaccgggcagccgccggcatggtatggaaaccaaaatcctgtgaaccaattcgccgggaaggccccaagtgggacccagctcgcctgaatgaatctaccacctttgtgttgggatctcgagccaacaaagccctggggatggggggcaccagaggaagaatctacatcaagcacccacacctctttaagtatgcagctgacccccaggataagcactggctgggctgagcagcatcacatgcgggcaacagggggcaagatggcctacctcctcatcgaggaggacatccgggaccttgcggccagtgatgattacagaggatgcctggatctgaagctagaggaattgaaatcctttgtcctaccctcctggatggtggagaagatgagaaagtatatggagacactacggacagagaatgagcatcgtgctgttgaagcacctccacagacctgaggccgggtcccctggccacacttggcagccctcctccaaagccctcttcctcacgtggctgaggccaccgctgggactgctcctagatggatctcagcggcattaagctgtgcctgagcgagtttgtagtgactcactgcacagcacccccagactagcatgtggttctatatttgtaaagttattgggataagaaacaattaaacagtttgtagtaaacacagaaaa

SEQ ID NO: 263275 - DNA, 342 bp, Homo Sapiens
  misc_feature (200)..(208): n is a, c, g, or t
tatttagaaaatttattttatttaaaaggtatatatatacataagtcccaagatataaagttctaaacatagatttaaaaagagcaaaatggaaaaaatataaatatgttgctgttcctgtttatatctcttgtgcatttattgtcttttctaaggttggcatttttctttattttgcaatttgatccatacttacagtnnnnnnnnntctaaatattatagaaaggtataaagcaaaaagtaagaattcccttcactccatcttctcctcagatattggtgaatctcctcccaaactttcaaccacatagatgcatttttgttttcaaaccagaaagcccc

SEQ ID NO: 263276 - DNA, 542 bp, Homo Sapiens
aaaaacccactctcataacagaagtgcagactcattgctagattcagtgcccttgagtgtgccagaggtcctctgtgtttgagacaatcctgtgtgtgccaggaggctccgtgtgcaccaggggctctcagaatcccgcttacccagctggagaccatgcctctggcagccccatctcagccagccctgctctctccctcttccctccaggtgaggcaaacttcataggaatctgtacctgaatgtgagctcctgataataaaactctgaggctttggtgagcgcatttcgaggcctttcccttgtatgcagggtgccagtgggagctgctatgtctcctgtgcagccagacaccctgggacgaggcccttcccacctccccctttcctcacggcttcttcagcaccacatgtggaatgcctgtgggtcagtccatctgtccatgggcaggggccgctgtgagagaccccatgcgcgtgggatgtggtagatgctgattatggggccagccacccatacaggtctatcaggtcgcaatggag

SEQ ID NO: 263277 - DNA, 379 bp, Homo Sapiens
  misc_feature (30)..(30): n is a, c, g, or t
aggtggcgaagatgcagctgaaagtactanaactccgacgtgcaccgcgccgcctttgtgctgcccgagtttgcccgcaaggccctgaatgatgtgagctgagcccaggcgccaccactgatgccacccaggacctcggaccttggagcctgcggggtgcctcggcccctccagccccgggccggacctcctggctggctctcgcccaccaaccaagtgttacaagccccagaatgctgcccggccagccctgctgggcggactgtctgtgtgtctgtctctctggcgttccacctccaagcctataccagctgtgtacagcgccatctctctgccttctgttgcccctcactcaccaaacacgtgtatttatagcaaa

SEQ ID NO: 263278 - DNA, 426 bp, Homo Sapiens
gcctggctcacaggaagtgttcagtaaaagtatgcactgttagattactgataacgcggatagatttttgtttacccataaattgttccagatttatattaatggaaggaagtgtgcatttattagctattactcaactttacaatgcaaacatcttatttctcatctttaaacatgtcgaccagtttaattgaaaagtattctgagactgcaaaatggggtgttaaaaaatactgcagttacggagctgtgtaaaccagtttctcattgcataagatacagatgtaaattgcatggagaggttgatatgcacctgtacagtaattcactcccccatttcacatctttgtcagagaatagttcttgttcatactgagtgttctaaatttgaagttatatatacaaattaaaatattttaaaaattc

SEQ ID NO: 263279 - DNA, 334 bp, Homo Sapiens
  misc_feature (22)..(22): n is a, c, g, or t
  misc_feature (30)..(30): n is a, c, g, or t
  misc_feature (63)..(63): n is a, c, g, or t
aaatggaataatgttaagcccntcctgatnggaccctcatagcctattttagttaaccttttntttgtcttttagccttacccaccttttaaaaaatttgttattctcccagaaacagtaaataggtgagtaggggtggtgcaagtgaattcgttttcatttagaagcccctctgtacagataatcaaaattcaaagttgaaagaatcaaaagcagccacagttatgtaggtctgatttgaatgtcataattgcagtgacaggacattgccaccaactctatcctactaccatcaatgttgtgtttattccgtcaataaaaaagacttgcttcc

SEQ ID NO: 263280 - DNA, 765 bp, Homo Sapiens; identical to SEQ ID NO: 63304
  misc_feature (252)..(261): n is a, c, g, or t
  misc_feature (589)..(605): n is a, c, g, or t
  misc_feature (607)..(616): n is a, c, g, or t
  misc_feature (699)..(699): n is a, c, g, or t
  misc_feature (729)..(729): n is a, c, g, or t

SEQ ID NO: 263281 - DNA, 985 bp, Homo Sapiens
  misc_feature (20)..(20): n is a, c, g, or t
gccagtaattcggcacgagnatttgccttggctcagaaggcctctgggggccatccctgaccactaggcttcccacttagacctgctccagcagcaccacccctcgccactgcctggtcctttccttcacccttgattctgtcttcttttgtccttctccaggtcttggcagcacctgtctcctttcaccccagggcctgagcctggccagcctacaatggggatgttgtgtttctgttcaccttcgtttactatgcctgtgtcttctccaccacgctggggtctgggaggaatggacagacagaggatgagctctacccagggcctgcaggacctgcctgtagcccactctgctcgccttagcactaccactcctgccaaggaggattccatttgcagagcttcttccaggtgcccagctatacctgtgcctcggcttttctcagctggatgatggtcttcagcctctttctgtcccttctgtccctcacagcactagtatttcatgttgcacacccactcagctccgtgaacttgtgagaacacagccgattcacctgagcaggacctctgaaaccctggaccagtggtctcacatggtgctacgcctgcatgtaaacacgcctgcaaacgctgcctgccggtaaacacgcctgcaaacgctgcctgcccgtaaacacgcctgcaaacgctgcctgcccacacaggttcacgtgcagctcaaggaaaggcctgaaaggagcccttatctgtgctcaggactcagaagcctctgggtcagtggtccacatcccgggacgcagcaggaggccaggccggcgagccctgtggatgagccctcagaacccttggcttgcccacgtggaaaagggatagaggttgggtttccccccttttatagatggtcacgcacctgggtgttacaaagttgtatgtggcatgaatactttttgtaatgattgattaaatgcaagatagtttatct

SEQ ID NO: 263282 - DNA, 850 bp, Homo Sapiens; identical to SEQ ID NO: 9194

SEQ ID NO: 263283 - DNA, 577 bp, Homo Sapiens
tgagactgcgcatcttcgctgcccgcatctatgattacgaccccctatataaggaggcgctgcaaatgctgcgggatgctggggcccaagtctccatcatgacctacgatgagtttgagtactgctgggacacctttgtgtaccgccaggaatgtcccttccagccctgggatggactagaggagcacagccaagccctgagtgggaggctgcgggccattctccagaatcagggaaactgaaggatgggcctcagtctctaaggaaggcagagacctggggttgagcagcagaataaaagatcttcttccaagaaatgcaaacagaccgttcaccaccatctccagctgctcacagacaccagcaaagcaatgtgctcctgatcaagtagattttttaaaaatcagagtcaattaattttaattgaaaatttctcttatgttccaagtgtacaagagtaagattatgctcaatattcccagaatagttttcaatgtattaatgaagtgattaattggctccatatttagactaataaaacattaagaatcttccataattgtttccacaaacaaaa

SEQ ID NO: 263284 - DNA, 978 bp, Homo Sapiens
  misc_feature (495)..(521): n is a, c, g, or t
atggttacctaagaagccaatgaggctggacaaggagacactgccagacctggaggagaatgactgctacactgcccctttcagccagcaaaggatccatcagtgagtgttccatgttaaagccccatctcactaaggatgtgcagctgtggtagagcctcaccctgcacgcctttgattcctgggcatgaggaaggaacagcatagtgcccttctcccctaaaagtcttgtgagtgttcatatcccttttatttcagtcaggggaagataactgctgtaaccaacaatccctgcatctcagtggcttaagatgatacaatgcttgctcatgtgtgtgttgggtaaatgatcttctccacagaaaggcagtgacccaggctctgtcattctcattgctctgccaactccctgtgcacggagccccctgcaggctcatctgcatctagccagcagacaggaggagtggcctacaccttttcccattgaaaagaggnnnnnnnnnnnnnnnnnnnnnnnnnnnatcttggttcacttctcagttcccctttcttcagcagttcactgggttgccttaggaaaagccacatcacctggcagcccacttgctgagtcatctgtcagattgtctcagaatggttatttgtcacttttgacatggggggaggaaaaacaagttggctaagtcactgagcctgtgaggaactgcaaaaatgaaagagaatttactctgaagcttctgagatgacaagaaatgatggctggatgcagggcagggcaggcaggaggacagaaaagcctgccgtgtgctggagactgtaaacaataggagaaacacagcctctcagtggaggcagagatcaggtcagccccacctcccttgcaacaagatcaggaattccgggccctcttgctccagcagtagtgacagcctccataaaaatgacttacctggagggaagaaaagggtgatggattta

SEQ ID NO: 263285 - DNA, 823 bp, Homo Sapiens; identical to SEQ ID NO: 4621
  misc_feature (669)..(670): n is a, c, g, or t
  misc_feature (676)..(677): n is a, c, g, or t
  misc_feature (679)..(680): n is a, c, g, or t
  misc_feature (687)..(687): n is a, c, g, or t

SEQ ID NO: 263286 - DNA, 399 bp, Homo Sapiens
ggacaaagcgttgggtgagactcctcttgctcgtcatgtctggccgcggcaaaggcgggaagggtcttggcaaaggcggcgctaagcgccaccgtaaagtactgcgcgacaatatccagggcatcaccaagccggccatccggcgccttgctcgccgcggcggcgtgaagcgcatctccggcctcatctacgaggagactcgcggggtgctgaaggtgttcctggagaacgtgatccgggacgccgtgacctatacagagcacgccaagcgcaagacggtcaccgccatggatgtggtcttacgcgctcaagcgccagggccgcaccctctacggtttcggtggttgagcgtccttttctaccaataaaaggcccttttcagggccaccctactttctc

SEQ ID NO: 263287 - DNA, 735 bp, Homo Sapiens
  misc_feature (12)..(12): n is a, c, g, or t
  misc_feature (31)..(31): n is a, c, g, or t
  misc_feature (36)..(36): n is a, c, g, or t
  misc_feature (45)..(45): n is a, c, g, or t
  misc_feature (103)..(103): n is a, c, g, or t
  misc_feature (204)..(204): n is a, c, g, or t
  misc_feature (400)..(410): n is a, c, g, or t
  misc_feature (701)..(701): n is a, c, g, or t
  misc_feature (709)..(709): n is a, c, g, or t
  misc_feature (716)..(716): n is a, c, g, or t
accgccaggtcnaaccccacgtcacctaaanccctngccaagggnaccaccaagccaacgtggtggtcaaggcccctagcctaaccctatccaaagacccttncccgttgattaaccctattttccatatttataaaggagtccttaatgttctgccccccataagactttcaaccttgtggttgggagtggggctggttttgntaagccctagggcctgcttctatgtatttatcaacatgtgatacattcaattggttaaatggtttatacagggactgatttgcttcccttcctgccatggctggagctttgggaacagtctgtccttacagagctgcaataagaaataaccaaagatgaagctggtcaaatattttcataacttgcttctgttgannnnnnnnnnngtaaaactttcccaagacattttcagacttaaaaataaagtcagtgttacaggtgctggtcagccttcttacttgtacctcaaacactgggataaaggaggcggtccagggcaatgcagtgatgtctgtcaagacattccccctcccctaaactcagtagcagttgaggatgacatttcaggctagagagacccaaaatacctctgttccacctgagagcaaggtgggaagttgcatcagctactgccccaagtgagcttcatcttctgattgtggggctttgggagggancgagaganctggctnttggccacttttgaggggt

SEQ ID NO: 263288 - DNA, 653 bp, Homo Sapiens; identical to SEQ ID NO: 4635
  misc_feature (452)..(469): n is a, c, g, or t

SEQ ID NO: 263289 - DNA, 1195 bp, Homo Sapiens
  misc_feature (38)..(38): n is a, c, g, or t
  misc_feature (43)..(43): n is a, c, g, or t
  misc_feature (471)..(532): n is a, c, g, or t
  misc_feature (574)..(591): n is a, c, g, or t
  misc_feature (752)..(762): n is a, c, g, or t
  misc_feature (905)..(917): n is a, c, g, or t
ttttaaaaactggaatataggtgggagaccataggaanggaangaaaggacttaaaaccgggagtggacaggacaaataatccattacttttccaattccatgactgctttatattccatttgatgaaaccatttgtatacaaaccagggagagttttctttacacccttgacaatatatcacatactcttcaagatcataataatatcattaatataaatttaaacaacatggcttgttagaaaatatgctaattgctatggtctcattatgtttgcttagcttttatttgtttttctgtgaacagttagagagctaatttttttcaaaggtgattgtaagtcatattttatatagcattttgcttgattatttgctctgtactgaatttgtactctattgccattagatcttacaataatgttccactctgcaaatttttaaggttcaaataaagtttaattgtttgcnnnnnnnnnnnnnnnnnnnnnnnnnnnnnnnnnnnnnnnnnnnnnnnnnnnnnnnnnnnnnncacaacaaaacaaaccaacggaggaaacgcccccaaaacggnnnnnnnnnnnnnnnnnntgcttgtgcgggccgccccgccccctaaaaaaacttttaaaaaacttttcgtttggggcgcggggccccccgcataagaaagtgaaaacagggcaaaacctgggtttccaaaagaaaaaaccggggcataggcaaaaagggggttgggcgttccccccccnnnnnnnnnnnccccccggggggggaacaccgggcggttttttgaaaaaaactcccaaacggggcgtttctcggagggggtctttcgggggggtctcatccacacaagggggggtccccaggggacggccccccaaatattaaaaattatacannnnnnnnnnnnnggggacatttgtttcccagaaaaaaacggggggggaaaattttcttttaacgaatattcttttcgccgataagggggaagcccccccctccacaaaagcgggtttgtgggggaacccctgtaaaatccgccccaggggggaaataccacgcacacttttggtcgccccctctgtggggtataactaaaatttgggccccacacgcgggggaacaaaaacggcgcgggccacaaaaaaataatatgtgccctcactatttttgggccaccaccctctta

SEQ ID NO: 263290 - DNA, 896 bp, Homo Sapiens
ggggctccgactgcggcggcatccgggacggcgggcgggctggccaccacgggacaggaaggcacagagcatggagaatgatgaacttccgtcagcggatgggatggattggagtgggattgtatctgttagccagtgcagcagcattttactatgtttttgaaatcagtgagacttacaacaggctggccttggaacacattcaacagcaccctgaggagccccttgaaggaaccacatggacacactccttgaaagctcaattactctccttgcctttttgggtgtggacagttatttttctggtaccttacttacagatgtttttgttcctatactcttgtacaagagctgatcccaaaacagtgggctactgtatcatccctatatgcttggcagttatttgcaatcgccaccaggcatttgtcaaggcttctaatcagatcagcagactacaactgattgacacgtaaaatcagtcaccgttttttccctacgattacaaaactgccagtcctatatggagtctgatcacaagactgcagtttcttcacagatctcaggaagttgtcgtggggcagaggctttttaaaaacatgtgattagggagctatctttatctgaataataacgaatttttaggtaaaacctgagatagagtactacaaaatcatgttgatgacttcagattttggaagttaaatcatgtctgttatttgcattctttagaaacttgactaagtacctgaattcatatttctattctactgtgcaacatagtgatgattcagaaatttttcctttggggaaaaaaatgaatatgaacatttccattgtgttaagtgtaaaaaggtccagacatgatcataaaatttaaattttatacaattataatt

SEQ ID NO: 263291 - DNA, 415 bp, Homo Sapiens
agtagtggccctccccaaaatgccccatgtccctaatccccggaacctgtcaaaattaaccttgtatggcccaaaggggctttgcagatgtaatgaagttaaggatctttcgcccaggaagattatcccagcttgttcaggagggcttgatgtcctaacccgggtctgtataacagaagagcaggtgacgggagaggaggttggaggtgtagcgatggagcaggaaactggagttgaggagggcagctcaagccacagagtccaggccacctcagagccaggaaatgcatcctcccacagagccctggaagccccagccctgctcccacctggactggctcagtgaggctaattttataattctggctgattttagaactctaagggaataaatttgtgttgttttaagtcaaaa

SEQ ID NO: 263292 - DNA, 221 bp, Homo Sapiens; identical to SEQ ID NO: 5014

SEQ ID NO: 263293 - DNA, 765 bp, Homo Sapiens
  misc_feature (136)..(136): n is a, c, g, or t
ggcacgaggcggccagcttcccgaggagctctttctgctgctccagtctttggtcatggctacccacgaaaaggacacggaagccatcaagtcgctgcaggtggagatgtggccactgttgactgctgagcagaanccacctccttcacctcgttctgcaagaaaccatctccccctcaggacagggagtctgatccatcccattcacccagtgacttctttttgcccaggccgggactttttgcatcagtcacgttaaccagatgactttgcctgttaccaaacctcatgcatccacgtttgcgtctggggaggaataaaaagacatcgttcccgcttctgcgttttgttattcctactgccgccataggaattatttcgttggctgaacgttaccagcaccccgagaacacattttgatagaatcagagtagaggacatggctgtcttctaaaaagccacgacatgaaaatgacaatccctttcgtctccttcctccgctgcttccacccaacgcagcctcctgcctccgcctttgtttcatagtgaggattttattttgcacggcgccctccctctaaatacctaccctagatgatttcatcctgcccctcacttcttaacatattcctgtgtctttgtaatggccaaatttctccttccactcgtccgcacggtacgtcttcatgggagtcattttattccttacagcttccttgtaaccacagccctaaatccatgataaagctactcttgtactcctta

SEQ ID NO: 263294 - DNA, 812 bp, Homo Sapiens; identical to SEQ ID NO: 5029
  misc_feature (91)..(124): n is a, c, g, or t
  misc_feature (655)..(655): n is a, c, g, or t

SEQ ID NO: 263295 - DNA, 777 bp, Homo Sapiens
  misc_feature (128)..(136): n is a, c, g, or t
  misc_feature (172)..(172): n is a, c, g, or t
  misc_feature (223)..(223): n is a, c, g, or t
  misc_feature (230)..(230): n is a, c, g, or t
  misc_feature (237)..(253): n is a, c, g, or t
  misc_feature (263)..(265): n is a, c, g, or t
  misc_feature (268)..(272): n is a, c, g, or t
  misc_feature (274)..(276): n is a, c, g, or t
  misc_feature (278)..(280): n is a, c, g, or t
  misc_feature (282)..(350): n is a, c, g, or t
  misc_feature (352)..(352): n is a, c, g, or t
  misc_feature (354)..(355): n is a, c, g, or t
  misc_feature (736)..(736): n is a, c, g, or t
gtttaggaattaaacccccgtgtttgtaagaaaacggagttatttttgttacaggagcagacacgtttgcagtggtgttcaaggaagcccgcggggggggcgccccccgacacaccgatgtggggttnnnnnnnnntctacatagggggcgagggcccccccaccaccggangggaacaaaaggggggccaatttatggaaacacgtttgggggcccgggggncaaatanaaaattnnnnnnnnnnnnnnnnngtggttgttnnnttnnnnntnnntnnntnnnnnnnnnnnnnnnnnnnnnnnnnnnnnnnnnnnnnnnnnnnnnnnnnnnnnnnnnnnnnnnnnnnnntntnntatagtattcagaacatcactttataaactgttgccaaattaccacttaaacactaatatccaaatacagaatttagaaaattattttaaattttaactctaccatccccccgagctctcggctatgaatttagtctgggaagagggctccgtaataggccactgaggtcctctgtcccaccacatcatcctcccccgaaaactagctgcccgactgctctaccagacttgggctagaatttggcttcacggtgggcaatggggaccacctggggccctacagtgtgggcaaaatcaacttgcccacaaaccccatcccgggtgctggggatgctaacacactgaaggtgaaagaccacacttgggtttttggccacaggnttcaaggtggcattttgactagggcaggcccgtttctttaa

SEQ ID NO: 263296 - DNA, 398 bp, Homo Sapiens
gggaaataaggatgatcatagctacctcacggttacattgcaaagccttactctaaaagctccccagcctcccagaggctcctcaatgaagagtcaccttcatgggtcgtcttcagggaacagggacggatgaagaaggggtggggttaagactcaggggcacctgagggtctgagcccccttatgagtacccaagaaggactgtctatgcatgcacacccacaagcctatacaccatttatatacctacacgcacgcaagagacgcggagagataggcgatgcagactcgcgattcaatgatcgatatgctcataaaagtgctcaattatattttctgtattttgtatgctgtattttccaagacgtatattattttactattaaagaaaaaaatca

SEQ ID NO: 263297 - DNA, 840 bp, Homo Sapiens
  misc_feature (404)..(437): n is a, c, g, or t
  misc_feature (608)..(609): n is a, c, g, or t
  misc_feature (611)..(611): n is a, c, g, or t
  misc_feature (614)..(621): n is a, c, g, or t
  misc_feature (623)..(703): n is a, c, g, or t
gtgaggctcttagtggatagcaaagatgatgagagggttcctgctttgaatttattaatctgcttggttagcaggtattttgaccaacgtgatttagctgatgagccatcttgatgtagctgatctctcagggatagaagatatttctcatgaaggcagcctaactctgaggaaaacaatgccaattcaagtacagatttcaacacatcttcaacactatgtgaagggttcacatcttaacctgtgcaattcagattgatactcagaatatgggttgatttgaatatctgaaatatcaatggaaaatcccactcagtttttgatgaacagtttgaacagttttctgtaatcaagcagcttgcatagaaattgtatgatgaaattttacataggttcttggtgcnnnnnnnnnnnnnnnnnnnnnnnnnnnnnnnnnntatttacttatatacatataaaattttattgaaaatatgttttggttactaaaattttgtttgactcctaacaaaagacaatggatggccttagcatcagaattaaaataatctggattaaatggcaatgtgttcatagtcagcaataaaattaaacatttttccctttannanaannnnnnnncnnnnnnnnnnnnnnnnnnnnnnnnnnnnnnnnnnnnnnnnnnnnnnnnnnnnnnnnnnnnnnnnnnnnnnnnnnnnnnnnnacactttgggggcccccttcgcccctcaaaaattttttaaaacctttcttttggcccgcggccccaaaaggaaaggaaaaagggccaaaccttttcccaagaaaacccggaaaagaaaagggttgggattccccccc

SEQ ID NO: 263298 - DNA, 336 bp, Homo Sapiens
cccggcctgaactctcagttctaacgcagggattcaggaattgggctttcagactccttctgcagtgtcacagtccagactttttttaaatgaaggacaccccgcagtggctcacagtgggtcccagggctagcaggagcgtgctggggagccggctctgtctttgttcgcagtgggtcccggtgctggcaggagtgtgctggtgagccggctctgtctttgtaaatccttcaggggtcctacggctgactccaaccggacagcccgtcctgggccgtgttaagcaccttttgtagaaatcgtatttttattaaaacatcaaatctgtgttcctgt

SEQ ID NO: 263299 - DNA, 861 bp, Homo Sapiens
  misc_feature (463)..(463): n is a, c, g, or t
accaagacaggcatctcaaatcggctgattctgcatctggaaactgccttcatcttgaaagaaaagctccaggtcccttctccagccacccagccccaagatggtgatgctgctgctgctgctttccgcactggctggcctcttcggtgcggcagagggacaagcatttcatcttgggaagtgccccaatcctccggtgcaggagaattttgacgtgaataagtatctcggaagatggtacgaaattgagaagatcccaacaacctttgagaatggacgctgcatccagggccaactactcactaatgggaaaacggaaagatcaaagtgttaaaccagggagttgagagctgatggaacttgtgaatcaaatcgaaggtgaagccaccccaagttaacctcacagagcctgccaaggcttggaagttaagttttcctggtttatgccatcggaaccgtactnggatcctggccaccgactatgagaactatgccctcgtgtattcctgtacctgcatcatccaactttttcacgtgggattttgcttggatcttggcaagaaaaccctaatctccctccagaaacagtggactctctaaaaaatatcctgacttctaataacatggatgtcaagaaaatgaccgtcacagacccaggtgaactgcccccaagctcccgaaaccaggttctacaagggaggctgcacccactccatggttacttctggcttcgcttttcccctaacccaaccccccggcaataaagaacaaaccaattcaacccccgaaaaagggaagttgaccctaaaacatggtaacccatgccccctaccctggtaaccctggcttagctcgaaaata

SEQ ID NO: 263300 - DNA, 499 bp, Homo Sapiens
  misc_feature (238)..(262): n is a, c, g, or t
  misc_feature (365)..(384): n is a, c, g, or t
tgtgaatcaaatcgaaggtgaagccaccccagttaacctcacagagcctgccaagctggaagttaagttttcctggtttatgccatcggcaccgtactggatcctggccaccgactatgagaactatgccctcgtgtatccctgtacctgcatcatccaactttttcacgtggattttgcttgaatcttggaaagaaaccctaatctccctacagaaacagtggactctctaaaaaannnnnnnnnnnnnnnnnnnnnnnnngtcaagaaaatgacggtcacagaccaggtgaactgccccaagctctcgtaaccaggttctacagggaggctgcacccactccatgttacttctcgtcgctttnnnnnnnnnnnnnnnnnnnnataaagacaaaccaatcaaccacgacaaaggaagttgacctaaacatgtaaccatgccctaccctgttaccttgctagctgcaaaataaacttgttgctgacctgctgtgctcgc

SEQ ID NO: 263301 - DNA, 580 bp, Homo Sapiens; identical to SEQ ID NO: 5048

SEQ ID NO: 263302 - DNA, 597 bp, Homo Sapiens
ggtatttttaagcctcatacttgctcattctacagctttttccacctcattattggtataattatatcctgaagctctcgttcattaattttagtcctgtgtagcagaattcaattacgggaactaccataatttatctgttctccagttgaaggcatgaagttgttgccagtttctgtattataacactgtagtggaacattcttctgcattgggcgcactgcgtgttacctaagacgtatcacagaataaacacatttagccttatagacattgccaaattgctcttcaaagtaaatgtgagtttttgtgaattacatgagtatggaatggtgttttattatgactttagtttgcattttcctcaattctcgttaaatccttcattctaatggacattttattgtgaagaacctgttcatatcctgtgctcaactttgtattgaattatttttctctgaataatttttaggagttcttttattctagacatcaatcatttgtcagttttatatgttgcaaatatcttctagtctatcttgtgacttttctttttactttatgggattttgttgaataaaggtttaatgtagccaa

SEQ ID NO: 263303 - DNA, 737 bp, Homo Sapiens
  misc_feature (17)..(17): n is a, c, g, or t
  misc_feature (25)..(25): n is a, c, g, or t
  misc_feature (124)..(124): n is a, c, g, or t
  misc_feature (391)..(391): n is a, c, g, or t
  misc_feature (393)..(490): n is a, c, g, or t
  misc_feature (628)..(637): n is a, c, g, or t
aagcgctggggaagccnccgtaaanagtcggatggcccagttttgggaagattccccccatgcgttctgacccctctgttccgtctctttccctctccccctttccttcaagaaggaaattgancctagtgatttcagcccatgcattaaacaggaaacaataataaatttgtagaattcatatttttctaaagggaacttaaaaactgctgctacatgttatgtacaaaactggtttatgccacatgaacagagaatcacaagtttggttttggtactttttgttcctctttgtattcagttgtatagaacttccaaattcagaatgagaagaaagctgttctgtatcaaaccatttaagcaataaatgttatattttaaaagctgcaanannnnnnnnnnnnnnnnnnnnnnnnnnnnnnnnnnnnnnnnnnnnnnnnnnnnnnnnnnnnnnnnnnnnnnnnnnnnnnnnnnnnnnnnnnnnnnnnnntggggggcgcccttggccccctaaaaaattttttaaaaccttctctttgggcgccgggccccaaaaggaaaggaaactgggccaaacgtgttcccaaagaaaaacccgggaaaggaaaaggggttgggaatcccaccnnnnnnnnnnccccggggggaaaccgaagcgttttgaaaaaaaacccagagggggggtccgggagggcctttccggaatctttccacacgggggccccaggggggctccc

SEQ ID NO: 263304 - DNA, 323 bp, Homo Sapiens; identical to SEQ ID NO: 5059

SEQ ID NO: 263305 - DNA, 893 bp, Homo Sapiens; identical to SEQ ID NO: 5060
  misc_feature (476)..(482): n is a, c, g, or t
  misc_feature (484)..(500): n is a, c, g, or t
  misc_feature (504)..(508): n is a, c, g, or t
  misc_feature (511)..(511): n is a, c, g, or t
  misc_feature (513)..(591): n is a, c, g, or t
  misc_feature (615)..(618): n is a, c, g, or t
  misc_feature (629)..(645): n is a, c, g, or t

SEQ ID NO: 263306 - DNA, 498 bp, Homo Sapiens
  misc_feature (29)..(29): n is a, c, g, or t
  misc_feature (290)..(290): n is a, c, g, or t
  misc_feature (358)..(358): n is a, c, g, or t
  misc_feature (395)..(395): n is a, c, g, or t
  misc_feature (412)..(412): n is a, c, g, or t
  misc_feature (432)..(432): n is a, c, g, or t
  misc_feature (475)..(475): n is a, c, g, or t
agacagcaaactcacctgcgcgggctggngggcctggctcctgaccttcgccgccctgccctccgccgctccgcctgagctccccggtttgcagaatggaggagggaagttgaaggagccacctcctctgtctacccacccgtccccttcacgcccttgacactaaggagtggggggccctggactgccccttcctcccccatcgcccgcccccagaacccctgatgctggttaggaaccgctcaccccaacatgtgtcttaaggcaggacgacttggaaaaaaaggccngcggacagttggccagaagggatggagacttggtggggacgcccccggcctccctgtcccccgtttcnacacactggacaccatcacctcttttgggaacttgcnagacccttgggggtccncagttgaagcaaaaggtctngtccttggtcccttttgtcttgtctggtgaataaaattgtgangttcgttgaaaatccaaaaaagg

SEQ ID NO: 263307 - DNA, 558 bp, Homo Sapiens
gggatcatctgcatagtcctctcctctaacgggaaacacctcagatttgcatataaaaaagcaccctggtgctgaaatgaacctctttcttgaacatcaaagctgtctcccacagccttgggcagcatggtgcctcttagtggatgtgctgggtccaccctgagccctgacatgtggtggcagcattgccagttggtctgtgtgtctgtgtagcagggacgatttcccagaaagcaattttccttttgaaatacgtaattgttgagactaggcagtttcaaagtcagctgcatatagtagcaagtacaggactgtcttgtttttggtgtccttggaggtgctggggtgagggtttcagtgggatcatttactctcacatgttgtctgccttctgcttctgtggacactgctttgtacttaattcagacagactgtgaatacaccttttttataaatacctttcaaattcttggtaagatataattttgatagctgattgcagattttctgtatttgtcagattaataaagactgcatgaatgcaaaaaccaaaccaac

SEQ ID NO: 263308 - DNA, 1095 bp, Homo Sapiens
  misc_feature (896)..(896): n is a, c, g, or t
  misc_feature (966)..(966): n is a, c, g, or t
  misc_feature (976)..(976): n is a, c, g, or t
ggggcagttcagagttcaacaacaagcttccaagatgccgcccaaaggaaaaagtggttctggaaaagcggggaaagggggagcagcctctgggagtgacagtgctgacaagaaggctcaaggtcccaaaggtggtggcaatgcagtaaaggtcagacacattctatgtgaaaaacatggcaaaatcatggaagccatggaaaagttaaagtctgggatgagattcaatgaagtggccgcacagtatagtgaagataaagccaggcaagggggtgacttgggttggatgaccagagggtccatggtgggaccatttcaagaagcagcatttgccttgcctgtaagtgggatggataagcctgtgtttacagacccaccggttaagacaaaatttggatatcatattattatggtcgaaggaagaaaataaaatcatatgaaagagaccggagacgcatcccgcccccgggccgccctgcccatccccttgttcggccctgccttccgtgctcccccaagggaggtcttttccccagaaaccctttttccttttggcgcgcgccgcgggggcccacggctaaggctgagaggggcgaaccccttgcgcgccacgtcaggtgtttggcgtttgtcccatagaggggagacatacccccgtgcgttccccacttgtgcacactaagcgcgggggtctttggggaaactctccctctccgccccgatgtgtgagggctgggagcccgcccccctcgtggtcccggcgcaaaacctccgaggggccgttgccgcgtggggcgcccgcgagaatgcggcgacggaaagggggagacttcatcctcgacgagccacgccctctgatcgcgctggccgcgctaccctcgtagtcgtaaaagggngggacgggtgtctccggacggcgcacgaggcgcggccaggttacctgtggtacatggtgctgttggtccncccccgggtncccccgttgggcacatcacgtccgaggttttcgcacgccaacagttcgctgtcgacgacctaaaccctgctcccatatgggatgggagccctggtaccccggcccgccccatcgatttc

SEQ ID NO: 263309 - DNA, 518 bp, Homo Sapiens
tggttctggaaaagcggggaaagggggagcagcctctgggagtgacagtgctgacaagaaggctcaaggtcccaaaggtggtggcaatgcagtaaaggtcagacacattctatgtgaaaaacatggcaaaatcatggaagccatggaaaagttaaagtctgggatgagattcaatgaagtggccgcacagtatagtgaagataaagccaggcaaggggtatgttgctcttattatttataattttctctgcaaggtaaggaaagcaaagtaaaaatgacaaataataaaataagataaaaattctccatcctccacagaagaaacacagaagtagggatcattcctttgttcaaccattggttgtagcgatattttggtttaaagatctcaaaagcagaaatgtccaacttgtaaatagtagaataagggtcatctatgtcaaaacctatgcatgaccaaacttgcacggctaacttcaaagtccagcagtgttgagagtacttatgtgttcagtcta

SEQ ID NO: 263310 - DNA, 945 bp, Homo Sapiens
  misc_feature (107)..(107): n is a, c, g, or t
  misc_feature (306)..(306): n is a, c, g, or t
caaacaaataccttggctcacgggttatggagcccatggaggtccagtcagactttaaggccaacttagaccagagcctcccatttttcggtcatcctgggcagganaccaatctccctgtgttataaaatgaccttctgggtactgtctggaatcttggctccctcatctgtaaagtgaggctaataccgcttactcatagttttgttgtgaagatgaactaagagcaggacatattacccgttttaaaattgtacacacagaccctgctttaacccagatgcctgcaaatgctcaggttttccnttctacatatagaaaacaatttctcagctgccagggctgaagccagcagatatgcactaaacgacagaacaacggattgtgccaataaagtaggcaaagcttccttgcccagaatataaatcaaactgagtaaaaactgggtatattggctccaggaaaaggagtaaggacacccagctttcaggcaacctcgaattctctctgtttaggattcaccaaccccaaggtccaccgggtccttcaatctgagggtccatccaaggccttccttcctggggttgggtatggctagctgcctgatggagagaccccaggctgttcagcagcaacgcctggcacagccgaggcagcctcgtagtctgcgatgcggcgctgtaccagggcaggcatgagctgcacgtaagcggccatgaggcggtggttggaatggatcagcttcccagcacagctgtgcagacaggcctcctcctcagcgtccagagctcggtggtgcaagctgggcacacagcgctggaagcagagttctgtcatccgattgtagaccaacaggaagtcacgcaggtttcgcagttgctgttgctgctgctgctgccgctccatcacgccaccggcgcatgccgtacgccacttccgtttccc

SEQ ID NO: 263311 - DNA, 1294 bp, Homo Sapiens
  misc_feature (1253)..(1253): n is a, c, g, or t
  misc_feature (1275)..(1275): n is a, c, g, or t
gggggtggcgtgatggagcggcagcagcagcagcaacagcaactgcgaaacctgcgtgacttcctgttggtctacaatcggatgacagaactctgcttccagcgctgtgtgcccaagcttgcaccaccgagctctggacgctgaggaggaggcctgtctgcacagctgtgctggggaagctgatccattccaaccaccgcctcatggccgcttacgtgcaagctcatgcctgccctggtacagcgccgcatcgcagactacgaggctgcctcggctgtgccaggcgttgctgctgaacagcctggggtctctccatcaggcagctagccatacccaaccccaggaaggaaggccttggatggaccctcagattgaaggacccggtggaccttgggagttctgctggatctagggaaaggaggagctatcgaagtacaacggatcaaaaaaccacagggcttttgggcactgcctccttgggaagttagtggccacagaagagagatgaaacctgtaagaagtctggagtcttttggaacttcagccatttccccaggttgttactttcttagtatgtacagtcttctcaggatgagcagtaaaacctttgaacaaaggtctgtgtggttgtcttcacgggcaatcaggaagggagagagctggggaccatattctgcaatgcagccaaatccgaggaagagaaactgaagggagaagtagatggcaatggttatgataaaaaagggataaaactaaatcttcgggacttctttaatgctacgttaatgtttcactgctcgtctagaaactcctaaatccagctttctatcatctgccccacattggtcccattgagtacattctgtgatttctaattccagcctctccattcttttctcattattgcctcccccgccccccaactttgtgtaatttacttctgtattcagcagcctggatagcatatcattccatcaccccattttcttgccaccattggccatctttttgtatcattccacttattctgtcttttccattccttcattcaaactgctagagaaaaacagttgtgtaatgaatgccactaaatattcaaggcctccaacctcagccaagtcctcacaccaacacgcagtcacaccaacacacacctttatggggttctgggtccatttccttctctaattaccatgggcagttatttttacacctgttactggctgttccttgaatcccattaccccaccctncattcagggttggaccctggtntttcctttttttggaggaa

SEQ ID NO: 263312 - DNA, 590 bp, Homo Sapiens
gggcccctaggaaagggaatactctctatgtatatggagaagacatgacacccacccttctccgtggggccttctctccttttggaaacatcattgacctctccatggacccacccagaaactgtgccttcgtcacctatgaaaagatggagtcagcagatcaggccgttgctgagctcaacgggacccaggtggagtctgtacagctcaaagtcaacatagcccgaaaacagcccatgctggatgccgctactggcaagtctgtctggggctccctcgctgtccagaacagccctaagggttgccaccgggacaagaggacccagattgtctacagtgatgacgtctacaaggaaaaccttgtggatggcttctagggaacagagctggattccttgtgcctcatatgccccaatgctggtctcagtaaaacactgaggtggaagcttacacatctccctcagcctctggtttttcagcacttgggattggggttaaacctttaaaaacggctgtcaggtttgatctcagtgtaacaacatggccagtgcctgttccccactcccttgccccaaaaggatctggaacac

SEQ ID NO: 263313 - DNA, 552 bp, Homo Sapiens
gggcctcctgcgtttgcccagggtcggcccgcagtgatggaggaggaggcggagaccgaggagcagcagcgattctcttaccaacagaggctaaaggcagcagttcactatactgtgggttgtctttgcgaggaagttgcattggacaaagagatgcagttcagcaaacagaccattgcggccatttcggagctgactttccgacagtgtgaaaattttgccaaagaccttgaaatgtttgcaagacatgcgaaaagaaccacaattaacactgaagatgtgaagctcttagccaggaggagtaattcactgctaaaatacatcacagacaaaagtgaagagattgctcagattaacctagaacgaaaagcacagaagaaaaagaagtcagaggatggaagcaaaaattcaaggcagccagcagaggctggagtggtggaaagtgagaattaaagtccctcgccgcttggaaagtgcagccttctacaggtagagccacctagaaatgcatatggctgcaaaggaaactttgaagggttaaatagagattta

SEQ ID NO: 263314 - DNA, 447 bp, Homo Sapiens
  misc_feature (59)..(140): n is a, c, g, or t
agggaatgaagagacaagagctctctttatgccacgtgaggatacagcaaggccccaannnnnnnnnnnnnnnnnnnnnnnnnnnnnnnnnnnnnnnnnnnnnnnnnnnnnnnnnnnnnnnnnnnnnnnnnnnnnnnnnntccaaaatgcatatgtatctttggaagaaactctgaagtaaaggccggaatattctttgtttaaaacattaaaaacaaaacagaccaaagcatcaagcaagaagtttcctggcaataaactaagcacagcattattttttaaggaacacaaattaagtgttcaacctgtggcaaatttgtactttctccctgaattatgttgttatcaaagaaaaaaattgggaagcatggcaaaatatcatcaaaactgaaactagaattaaacaaaactaaattaaaatgaaataaaatgatgtccattcttaaa

SEQ ID NO: 263315 - DNA, 1355 bp, Homo Sapiens
  misc_feature (765)..(775): n is a, c, g, or t
  misc_feature (1200)..(1200): n is a, c, g, or t
  misc_feature (1314)..(1314): n is a, c, g, or t
gggcagccagtgtgacatttggtacatgaggttttctatggatttctggcaaaagatgcttgcattgggcaatcaagttggcaaactttatgtttgggatttagaagtagaagatcctcataaagccaaatgtacaacactgactcatcataaatgtggtgctgctattcgacaaaccagttttagcagggatagcagcattcttatagctgtttgtgatgatgccagtatttggcgctgggatcgacttcgataaaatacttttgcctaatcaaaattagagtgtgtttgttgtctgtgtaaaatagaattaatgtatcttgctagtaagggcacgtagagcatttagagttgtctttcagcattcaatcaggctgagctgaatgtagtgatgtttacattgtttacattctttgtactgtcttcctgctcagactctactgccttttaataaaaatttatttttgctgcccccgccccgacgcccgccgaaaaagctgcgcgcctggaacaagacgcaatggcccgcgcgcacaaatgcataaaccctgtggggtcggcctctcggcccctcaaaaaaaacttttctaaagaacatttcggttttgggcgcgcggcgggggccctccgatagggcaacaggggaacccctgggtccccataagccttggtttctccctaaagggaaaacccccgtgggtgccgatggactataagcgggcccttgcggatattcttctcacccccgagataataaaaacaaannnnnnnnnnngggggcgagcgaccacacactgccgaagcggcgtgttctctctgtgagatacacacaatatactctcccccgccagagtcggtgaggacgtcttctctctgagagagggggcaccccattatgtagcgctgtggggaattatcgctttgtcccgacaaccgcggggatgagtcgtacgcatagagagcgcgagagagctgcccccggatcatatttctcgacaattgtgttacggggctaccccgcgcgctgcaccgtggggcgggcaacatgctcactttcgcggcactaacaaaacaactgcgtgggaggtggggaaaaatctgtccattctctagatcacacgcatttttactctgtcgcgccgccgacaacatgttgtgggaagaagagccccgtctcccctcagcaagaacgcgggtggnataataggaatatgagacacaaccgctgggaaaatactcgcggcacgcacggcgggcggtattattttcttcacgagcactccccttgcgtggtgtcggacggcatgtggttgncggacgtataacaaaatcatccttttcgcgctgcccgcagg

SEQ ID NO: 263316 - DNA, 409 bp, Homo Sapiens
  misc_feature (46)..(46): n is a, c, g, or t
gattttaatggtccctgatttaaattggccttggagtagaattccnggcattgatatcctttaaaaactcccccagtgttgagaaacaaatttagagagttgagaagtaggtatattaaattacagaatcttactgagttttggtagactgataatacaatttgctttgcttttcttaaatttgcattgagatgggatttgaagcatattgtgctcttgtgaatgttgaagttgcattgtagaagtttagaagctctggctatgggttgcctaaattgatgttttgaggaagcatattaatgttataaacttcgctgactttgaaggttgtgttgtagcatgaggaacacaaataaaacaattctaaatcatgccgtgaagaaagctttagagagatatggaactgtgt

SEQ ID NO: 263317 - DNA, 416 bp, Homo Sapiens; identical to SEQ ID NO: 178218

SEQ ID NO: 263318 - DNA, 502 bp, Homo Sapiens
  misc_feature (11)..(11): n is a, c, g, or t
ttcaaaagcanctacaccaaaagaagcctccagacagccctgagatcacctaaaaagctgctaccaagacagccacgaagatcctaccaaaatgaagcgcttcctcttcctcctactcaccatcagcctcctggttatggtacagatacaaactggactctcaggacaaaacgacaccagccaaaccagcagcccctcagcatccagcaacataagcggaggcattttccttttcttcgtggccaatgccataatccacctcttctgcttcagttgaggtgacacgtctcagccttagccctgtgccccctgaaacagctgccaccatcactcgcaagagaatcccctccatctttgggaggggttgatgccagacatcaccaggttgtagaagttgacaggcagtgccatgggggcaacagccaaaataggggggtaatgatgtaggggccaagcagtgcccagctgggggtcaataaagttacccttgtacttgcaagaa

SEQ ID NO: 263319 - DNA, 418 bp, Homo Sapiens
gagacaagttatagtaccccaaaagcaaaacaagcaggagatgcaagagatgccccaaaaggacaaagcaacaattttctgttgccacctttataccggaagactctgttgtagaagaaaagaaggctttggtgcaccttatgtgggaggaggaggggcagggcatgctgatgctgagcgtacaggcagacaagagcgtagcctgctgttgcctccatcactatgaaatgacttattttacctgaaggacccatggtttatgttcctctaattcctttcactctccctaagccctctgagagagatgaagatagatgattttattgctactaaattgaagggagcactatttctttttgtcttttgttagcaaaaaattgcaaaaagaattgtacattcttgctaaaaataaataaat

SEQ ID NO: 263320 - DNA, 740 bp, Homo Sapiens
  misc_feature (55)..(91): n is a, c, g, or t
  misc_feature (266)..(266): n is a, c, g, or t
ggctcccaaactcagcctcccaggtagctgtggctccaggcgaactactgtatannnnnnnnnnnnnnnnnnnnnnnnnnnnnnnnnnnnnggtcttatagtcctgggctcaagcctcccagagtgctgggattacaggcatgggtcaccgcaccaagcccgcatttatattttgagttaccaaaatgatcatcatctgtgaagcatcatggtagcttccaagcatttgcggcccactggccagtgcatcccaaaacacattccanggaaacccgagagttgtaaagttgcacatgtgtggcctacagtgacttcccatgtagtaacagggctgagcaaggcaggctctccaccagacttaaagcattcaaccactctgcccccaggccgacactgacatgtgttcactgtcgctgccacagctggccacctgtgttcagtctccatgaaggattcaccttctgctctcactgacatctccttggctacacaaatgtgcaggtgtctcttgtcaaagctaatttttcttttctaaataaacatcctttaattgggggagaacgaacagagcggagaggaaaaattgtcgggccgcctcggcccctcgaaaaaacttcccaaaaccatttccgtttgggggccgcggggccacggtaggtaaaggtgaaattgggccctaggctggtttccctaggggaaacccggggccatggaacagagggcttgggaattcccccccc

SEQ ID NO: 263321 - DNA, 562 bp, Homo Sapiens
ggacaccaaactgttgatggtatttaaatgtgacttcaagttagtatttctgtatatattatagattactggtttgtttttagatatgtaagtctgttctaatctacagttcacatatcgacagttactctggtaataatagaatgttagtgatgatcacttggtggatgttgattaagtgcctgtgttttgtttcctcctctggataccaaataggtgtatgctacttttttggtgaacttatttcttggaagatttggctatgctattcagggtttttattcttatgtttttcttctaaatttaagtagcatcctgctgctaccatattaaagctaaaatttaacttttgctgaagaatcagctaattcaggtaatccaaatatttgtggaaaaacatctggataatttattgaacacattagtattgtgttagacagctttgatcattcccatttcataggtttttattgtggaatagtcaacttaatatagattcactttcaatttgcatgtataaagtaatactcaataaaatttttttcatttatttttcaaaaaa

SEQ ID NO: 263322 - DNA, 468 bp, Homo Sapiens
  misc_feature (389)..(389): n is a, c, g, or t
tacaccaaaattaacaaggatttaattcctcagttaaatttaccatggctatatccaacagtatatctacccaattctaatcttctgaaaattatttagaccttgatgcttggggtattcatgaacatactttcaggaagagcctccaggtttaaagccctcagttaacaacttactctagggcaagggggtctattttcccaagagaagtacatgggcatttataatggggagcccttttattggggagagaggggaagaggaacacagggtgaggggtgaagggtgaaatatggaaggaagcctcaggaggcacacctttgtttccctctggccgtgtttaatccattgccgtgccatggcttcccagcccttcacaaggggggggnaccccattccccacaccggggcaggggaggctttttaaaggcattcttccacaacagtttttttaaagcttttttgggg

SEQ ID NO: 263323 - DNA, 753 bp, Homo Sapiens
  misc_feature (12)..(12): n is a, c, g, or t
attcggcacagnatatcaactagcgcaagtgaatactgaagatttcttagtcagtttttaggggattttcggggaggggaaataggtaatgtatggagcattttcacttctaaatagttagatacagaaattaagtgcattgtatctttttcataatggtactatttagaagcccagttagtcttactgagcttatgcttcactcctttatgtttaaccatgtgtctacaagaataagtttgttttggaaagttgagctatagctacagctctagctatccagcagacttttcattatgacttacatgggcaggagctctaattatgctttaaaaatctgttgtgggagattgctttaaatgctccctgcctggtgtggggatggggtccccctctttgtgagggctggagcatggcacggcatggattaacacggcagaggaacaaaggtgtgctctgagcttcttcatatttcaccttcaccctcacctgtgttctcttccctctctcccaataaaagggctcccattataaatgccatgtacttctcttgggaaaatagacccccttgcctagagtaagttgttaactgagggctttaaacctggaggctcttcctgaaagtatgttcatgaataccccaagcatcaaggtctaaataattttcagaagattagaattgggtagatatactgttggatatagccatggtaaatttaactgaggaattaaatccttgttaattttggtgta

SEQ ID NO: 263324 - DNA, 868 bp, Homo Sapiens
  misc_feature (493)..(509): n is a, c, g, or t
  misc_feature (511)..(512): n is a, c, g, or t
  misc_feature (514)..(514): n is a, c, g, or t
  misc_feature (519)..(520): n is a, c, g, or t
  misc_feature (584)..(586): n is a, c, g, or t
  misc_feature (684)..(684): n is a, c, g, or t
  misc_feature (690)..(692): n is a, c, g, or t
  misc_feature (792)..(792): n is a, c, g, or t
  misc_feature (804)..(804): n is a, c, g, or t
ggggagtggaagaaacgcggaaccatggccgctgtggttgctgtttgcggtggtctagggaggaagaagttgacacacttggtaacggctgctgtcagccttacacatcccgggactcacacggtgctttggagaagaggttgttcacaacaggtatccagcaatgaggacctgcccatttcaatggaaaatccttataaagaacctcttaagaaatgtatcttgtgtggaaagcatgtagattataagaatgtacagcttttgtcccagtttgtttctccatttactggatgcatttatggaaggcacattacaggtctttgtgggaagaaacagaaagaaatcacaaaagcaattaagagagctcaaataatggggtttatgccagttacatacaaggatcctgcatatctcaaggaccctaaagtttgtaacatcagatatcgggaataaattctatcacgttaccactaataaacttattttacagtannnnnnnnnnnnnnnnngnnanagggnnagtcagaggagcaaacacagcccggagcccccccgtgccgcaccacccacgaagtgcggggggnnncgtgggcgggagcgttgacgccgccagcacgcttcgtttccgccgcgcccttccccgcccgggaaacaaatttttttattacctttctttttcgtctngccgcnnnccccccagaaaaacacaacgcgtcgagacacgtgatggtgttgtctgcgtgctgtgcggctcgcggcgccgtccgcccgtaatagttctctttctcaccncgagaatcagangcccgcggcgggcgcgccgcgccgaggtgttgagataatacacacctactctcaggaatgtgcc

SEQ ID NO: 263325 - DNA, 590 bp, Homo Sapiens
ggggtggaagaaacgcggaaccatggccgctgtggttgctgtttgcggtggtctagggaggaagaagttgacacacttggtaacggctgctgtcagccttacacatcccgggactcacacggtgctttggagaagaggttgttcacaacaggtatccagcaatgaggacctgcttttgtcccagtttgtttctccatttactggatgcatttatggaaggcacattacaggtctttgtgggaagaaacagaaagaaatcacaaaagcaattaagagagctcaaataatggggtttatgccagttacatacaaggatcctgcatatctcaaggaccctaaagtttgtaacatcagatatcgggaataaattctatcacgttaccactaataaacttattttacagtaagtggttgtatgatgccaatactgactcaaaccaacctttggatagaaaagtgtttgaggagtgaggtaaagaatgacacttccccttcataccaatgtccattaagcagattgcttatttaaaatgttaacactcatcacattttatctatgttgaataaaagtggttctgtgtgaaacaacg

SEQ ID NO: 263326 - DNA, 971 bp, Homo Sapiens
  misc_feature (98)..(98): n is a, c, g, or t
  misc_feature (233)..(233): n is a, c, g, or t
  misc_feature (237)..(237): n is a, c, g, or t
  misc_feature (239)..(239): n is a, c, g, or t
  misc_feature (241)..(246): n is a, c, g, or t
gggtgccgggcgcgccgcccacacacagaaaagaggttgtttttaaaaaaatttcttttgtggaggggccacgagggggccccccaacacacttagcnccacatgttccggtgagagtttggggtcgtaggggcggggagcgcagaggtgggtgggtgggggtggcgaagcgccaacaccgtatgcctggggggcgcgcgcgccagtttgcgatgtagtggtagcttaggtgngatntncnnnnnnggggctgaccatttattgggactgacttgaccagggctggtaaggatggacacaaaacttcaagtctttcgtaatgaaaggattgattcaaaataaatattctaaaaattatgtcaaacactaatgaataagtgacatttacaaatagtttataagagaatcatttgggtgaacaattttcatttcacaaaataaatagctcatatccaaaaaagacacctctccttaagcagggaaaaaaaagcccaacaaaaataaagtcatgcccgtggcacagccctaatgttagttttagggaggaaaacaccaacactgagacatacaaaagtatttgaggagaattacatgttattaaatttgtcctagaacctgggggagagttcagggaaagagaacagcgggtatatttaaagaaagatttaaatagaaaacattacacatgagagcaaaatagtcccatttctcttaagaaaaccaataaacactcacaaactttcatttttaggttttcagcaatgtttttttcacattagtccaactgccaccccaaaatccaaccagccagcatgacaattaaggtgacaacaggtccagttggccatactccctgtgcacccttggatgcttttcaagccaatgagggtaacatttgtggtgcaggagccagagtcaagggagaatcacttctcttcactcaggaggaaacctccctcttgagcacttcg

SEQ ID NO: 263327 - DNA, 700 bp, Homo Sapiens
  misc_feature (493)..(521): n is a, c, g, or t
gagaattttagagctaggtatagtgaccgtgaactttctaacgcataatattctgtgatacagccattccgtacatgtgtgaagtcctgcataactttcgaactttgttaaatgttggcactaggagtcatcagatctaggcttcatcattttccagtgagaagcagagacccaaagggcctgttacttgtgcttggtcaggggactgtctgtcatgcctggaggctcttcggcacacttccccatctttcccttctgccactgtggcttcaagcacctctgttcatagagcgtctctgaaattgagtctcggtcatgacttatcccgaagtagagcaatgtgtttcctctcattgtagtttcaggactttgtcagtacaagctctgccctaggcttgttactttatactcatatcctgaaaagatgtgatttcatctatgaaggggtaaaatattggtttgtatttaattgtttgaaataaaagtgatcccnnnnnnnnnnnnnnnnnnnnnnnnnnnnnacatgtcggccgcctcggcctctagaatggtcgtgaggtgagtgggcatctgtccagcctggaagaggggcactaggtgactccctcccctgctgttgtaaatactgtaattatcggagaatttaaattattctcatttgtaactgcgtttccgggtcgcgcccaagtcatttggtact

SEQ ID NO: 263328 - DNA, 468 bp, Homo Sapiens
tagtaccaaatgactctggcgcgacccggaaacgcagttacaaatgagaataatttaaattctccgataattacagtatttacaacagcaggggagggagtcacctagtgcccctcttccaggctggacagatgcccactcacctcacgaccggtagggccccaggctctaggcagttatggattctcctggcatgagcaggtagaggtggtggcatggcctgttttacgcagtgtcctaactttggcccaccaccccgccctacaatgctgtgaggtctctggagctttttctgacctgtgggccctccctctccttgcgctgaactgccattggcccttggagtgttctgtacagtccagctgcacttagggcaggagggacctccccacccagcttcccctgagactggccccaagaccagaaatgagtcagtgcagaggccggtgcactccaggacagtgagca

SEQ ID NO: 263329 - DNA, 398 bp, Homo Sapiens; identical to SEQ ID NO: 5586

SEQ ID NO: 263330 - DNA, 311 bp, Homo Sapiens; identical to SEQ ID NO: 5590
  misc_feature (140)..(243): n is a, c, g, or t
  misc_feature (254)..(268): n is a, c, g, or t

SEQ ID NO: 263331 - DNA, 806 bp, Homo Sapiens
  misc_feature (500)..(508): n is a, c, g, or t
  misc_feature (628)..(628): n is a, c, g, or t
ggggcttccgcgttccggttgcggatggtgagtgtgtcggggggcttggcggcttttctcctcagtctttctggagtgctttggaggagaggactatggcagccagggacgccacttcaggcagcctgtcagaggagagcagtgctttggacctgccatcagcgtgtgacataagagattacgtcctgcagggacccagccaagaagccaacagcgaggctttcagttctttggaattccattcttttccttattcttctgatgtggatccagcagatctctgagaatgcttcattgtcttaggcagaaaaacatcttacctaagcaaagctttcaggaggaacttcaaaggacagcttacctggcacagcaatgacaaggagctgtttcctggatgtctttttgttattgttgctgttaatctcaggtctctttctaatctccctcaaaatgaattcagaagcaggggaatatttggttcaacaaagagagagtggaannnnnnnnnggtttgttcttttaaaacttcagaaaatagcaatgtgggcctgttatgtgtgatgagtaataaaaatagagaccttttaaaacacccaccccagaaataaggacaagcacgaacaaaaanacccttgtcggcccgccttcggccctcaaaaaacctttctaaaacctttcgttttgggggcccggggcccccgtaagggaaagggggaacatgggcccataagcttggttctcctaagggaaaatccctggggcactggaacaaaagggggctcttggagaattcctccccccccaac

SEQ ID NO: 263332 - DNA, 762 bp, Homo Sapiens
  misc_feature (365)..(523): n is a, c, g, or t
  misc_feature (533)..(545): n is a, c, g, or t
  misc_feature (571)..(579): n is a, c, g, or t
  misc_feature (617)..(678): n is a, c, g, or t
ggggtcgaagacatgttggaaacattgcagatcacccagtcttaaggtttcaaaaactctttgacattagatttcacaactgcacaattgaacttattggcctgtaacttatttactaaatgctcagtgctatttatatactacagtaattttctgttaagaaggcagttgtaaagaatgtgtttatataaacctaaaaatgccttttactgctaagtggggagatgggggaaatccatggaagagagatttaagacttattgattgtacatcagtctcttcatatcacatatacatgtatatatataaaactctaatgtagtataaccttgttaaataaaccatgatgatttattaaacttgcnnnnnnnnnnnnnnnnnnnnnnnnnnnnnnnnnnnnnnnnnnnnnnnnnnnnnnnnnnnnnnnnnnnnnnnnnnnnnnnnnnnnnnnnnnnnnnnnnnnnnnnnnnnnnnnnnnnnnnnnnnnnnnnnnnnnnnnnnnnnnnnnnnnnnnnnnnnnnnncttggggggnnnnnnnnnnnnnaaaaaattttttaaaacctttttttnnnnnnnnnccccccaaagaaaagggaacggggccaaatctttcccnnnnnnnnnnnnnnnnnnnnnnnnnnnnnnnnnnnnnnnnnnnnnnnnnnnnnnnnnnnnnnccgagggtttttaaaaaacaccaaaagggatttctgggggttttttcggggaacctttaaaaaggggggccccaagggggcctc

SEQ ID NO: 263333 - DNA, 730 bp, Homo Sapiens
atacagtaaaaatacaatagctggggccaaggggaagttttcaggacagctcattccatcaggaactcatggccttgaaccaagcttgccaggaagtggggaaaaggcagtgctttccttgacatcacgctagcaagtttctgtcgactcttatgcaggatggtcagaacatcgagtccaggaatacttcgagtgggcagcgcaggtggtgaaggggcttcagggaacaaaccggcaactggaagaggctctaaagcatctgttcaagcagcgggggctgacaatctgatcagtgcttgaagctatccagaggcacaactccagcctcgttcaggccggacaggattcatacgccatcttttctgtgtctcctgagctccctccatccttcccagatattagaggccaaaaaaagacttgcattttttctcagtctgaaggtctcctgctaactaagctgagccccgcgtggtgggaatcagatgtacccatccatttctgatgcactcaccgcctctccccaagtcttgggtctgtttgctattttgcatggtgggatctctggcccctcagggacttgagattatttaagtactagttcctaacacgttctggaaaataaaaataactctgggttaaggtttaagctgctgctgctccttctccagcctccgactggtgggctgcatatctttccttcagcaaagcaggactaattgtgtgtcccgga

SEQ ID NO: 263334 - DNA, 604 bp, Homo Sapiens
ggtacccggtccggaatttcgggatatcgtcgacccacgcgtttcgggcaacgccgaggcgcttctgcatctgtgggccgagcattcttcaggtcatctgaaccttctgagaaaacatggtcaacgtcttgaaaggagtgcttatagaatgtgatcctgccatgaagcagtttctgctgtacttggatgagtccaatgccctggggaagaagttcatcattcaagacattgatgacactcacgtctttgtaatagcagaattggttaatgtcctccaggagcgagtgggtgaattaatggaccaaaatgctttttcccttacccagaaatgaaaatactcaatatggaccatttaggaattataagcagcaactgtgaaagacttgccactcaatatcttaggtgactgattagacatagagggttgttttaggagcatgccacgggaaagactgagggatcatgatcatttgttcagaaaaaaagcccctgaactgattttgttaccatagaatttaaccacaaaaaaaagctttaacagtttggctgtaattgggcttatataatcctttattaaaatacaactgtcaccacaaaaaagatg

SEQ ID NO: 263335 - DNA, 335 bp, Homo Sapiens
ttaattctatggtataacaaaatcagttccaggtttttttctgaacaaatgatctctttggtctttcccgtggcatgctcctaaaacaactataaacaaccctctacgtctaatcagtcacctatagatatcgagtgtgcaagtctttcacatttgctgcttataattccttgaatggtccatattgagtattttcatttctgggtaagggaaaaagcattttggtccattaattcacccgctcgctcctgggaggacgttaaccatattctgctattacaaagacgtgagtgggcatcaatgtcttgcatgattaacttcgcaggcttccattt

SEQ ID NO: 263336 - DNA, 517 bp, Homo Sapiens
gggactgccgcggcgccttgagtctccgggccgccttgccatggctgcccgtggtgtcatcgctccagttggcgagagtttgcgctacgctgagtacttgcagccctcggccaaacggccagacgccgacgtcgaccagcagagactggtaagaagtttgatagctgtaggactgggtgttgcagctcttgcatttgcaggtcgctacgcatttcggatctggaaacctctagaacaagttatcacagaaactgcaaagaagatttcaactcctagcttttcatcctactataaaggaggatttgaacagaaaatgagtaggcgagaagctggtcttattttaggtgtaagcccatctgctggcaaggctaagattagaacagctcataggagagtcatgattttgaatcacccagataaaggtggatctccttacgtagcagccaaaataaatgaagcaaaagacttgctagaaacaaccaccaaacattgatgcttaaggaccacactgaaggaa

SEQ ID NO: 263337 - DNA, 1162 bp, Homo Sapiens
  misc_feature (39)..(39): n is a, c, g, or t
  misc_feature (87)..(87): n is a, c, g, or t
  misc_feature (104)..(104): n is a, c, g, or t
  misc_feature (122)..(122): n is a, c, g, or t
  misc_feature (578)..(649): n is a, c, g, or t
  misc_feature (805)..(829): n is a, c, g, or t
  misc_feature (953)..(965): n is a, c, g, or t
aggtgcattaggcccaagaatccggccccagcacaaaanccctctctccccctcccccacacacacccctgaatagatatttttaantatatttaactgtaatnggcatcataagaacattnctaggatatgtagaattgttcattaaagaaaaatatgccagtttctaaaattcttaaatttttagttcaagaagcaaatttttcatgattttattctaatacattgtaaagtatcacaaatggaatatatcagtacctctcaagctagtgtttctagctaaataaatgggtgtatataattttatggtggaaaagaactgtactgtctgttatgatttccttcaatgtgcataatgataaaataaataattttaatattcttttgtttccatggttgcctgacctaaattagataaattgtagggctttagctttcttatttttgtcaaaagttggtgttgacatacattccctctaatttgaactggtattgtttacgtttgatacaacattaaggaatttgatgattttcatttcatgaaaatgacattaaatgcaataattttacttatcctnnnnnnnnnnnnnnnnnnnnnnnnnnnnnnnnnnnnnnnnnnnnnnnnnnnnnnnnnnnnnnnnnnnnnnnntaaacacaaaaatttgtcggcccgccttcggcccccaaaaaattttccaaaacatttcgtttgggcgggccgggccacataaggcaaaggtgcccctgggcccttaccgcgttcccaaggaaaaccctgggaattgtgacaaggggctttgaattnnnnnnnnnnnnnnnnnnnnnnnnngcgggccaaacccgaagggcctgtgaaacaaaacccaaattgggagtctcttaaggcccctttccttggatccttttcaccccgggaattccaaaaagcgaggctccctatccccaaattatannnnnnnnnnnnnttggaccacttttttccaagagaacgtggtttgatattctccttttagcgtctcctccccccgaaactgtggtaaaccccctccccaccaacagggtacatggacgcaaaccctgaaaattcgcccaagcggacttttcacacacccctttggctcaccccctgtccggcattaaaataactccggccgccgttggg

SEQ ID NO: 263338 - DNA, 626 bp, Homo Sapiens
  misc_feature (596)..(596): n is a, c, g, or t
ttcgagaaagctttgaatgccggcttcatccaggccactgattatgtggagatttggcaggcataccttgattacctgaggagaagggttgatttcaaacaagactccagtaaagagctggaggagttgagggccgcctttactcgtgccttggagtatctgaagcaggaggtggaagagcgtttcaatgagagtggtgatccaagctgcgtgattatgcagaactgggctaggattgaggctcgactgtgcaataacatgcagaaagctcgggaactctgggatagcatcatgaccagaggaaatgccaagtacgccaacatgtggctagagtattacaacctggaaagagctcatggtgacacccagcactgccggaaggctctgcaccgggccgtccagtgcaccagtgactacccagagcacgtctgcgaagtgttactcaccatggagaggacagaaggttctttagaagattgggatatagctgttcagaaaactgaaacccgattagctcgtgtcaatgagcagagaatgaaggctgcagagaaggaagcagcccttgtgcagcaagaagaagaaaaggctgaacaacnggaaaagagctcgggctgagaagaaagcga

SEQ ID NO: 263339 - DNA, 684 bp, Homo Sapiens; identical to SEQ ID NO: 99386

SEQ ID NO: 263340 - DNA, 580 bp, Homo Sapiens
  misc_feature (469)..(477): n is a, c, g, or t
gggaccttagtagcaacatccaatggcacccagattgcagttcagcttggagaacagccatctctggaagaagccatcagaatagcgtctagaatccaacaaggagaaacgccagggttggatgattaatcctcagaacaatggagcaataaagcagaaggagtctttcatcttctggcagcagaaatccatgaagcccgggcccaggaaaattagaagttttccattcctgatacactgtacacatttttatgcgagagtggagaacattttattcttgacacttttgtgtatataacccttggaatagattctcagagtgattcattgtgtacaaggaagtatgaaattagggcaatacagtaaattttcatgttactcttttatcagatcacaaactcctagagtctacatgcaagactagtaaagtcttatggagtcttatgatggatttttaacttcccgtggnnnnnnnnntaaaggctgtatctaaaatatcaaaggttctatatgtcacacaatcgtaattccaaaagccattatggataataaagggtgtaaagccttcacctatttcccc

SEQ ID NO: 263341 - DNA, 240 bp, Homo Sapiens; identical to SEQ ID NO: 6105

SEQ ID NO: 263342 - DNA, 1355 bp, Homo Sapiens
  misc_feature (16)..(16): n is a, c, g, or t
ttgacagctcgagtantagcaggctggtaccggtccggaatcctgggatatcgtcgacccacgcgttccgctctcctcatcttcgacattttgaaaaaactgattggaactttcaccgaaaaagatattgaactgatcttgttaatgctgaaaaacgtgggtttttcattgaggaaagatgatgctttatcacttaaggaattgatcactgaagcccagaccaaagccagcggggcaggcagcgagtttcaggaccagaccaggattcggtttatgctagagacgatgttggccctgaagaacaatgacatgcgcaaaattccaggctatgaccccgagcccgtggagaagctgaggaaactgcagagagctttggtccgcaacgccggctcaggttctgagacgcagcttcgcgtctcctgggacagtgtcttgagtgcggagcagacgggtcgctggtggattgtggggtccgcctggagtggggccccgatgatcgacaacagtcaccatacgcacctgcagaagcagcttgtggggacggtcagttcaaagatcctagaactcgcccggaagcagaggatgaacacagacatccggagaaacatattctgcacaataatgacaagtgaagattttttggatgcttttgaaaagcttctgaagcttggacttaaggatcagcaggagagagaaatcattcacgttctcatggattgctgccttcaagagaaaacttacaatcccttctatgctttcctggctagcaaattctgtgaatatgaaaggagatttcagatgactttccagttcagcatatgggacaaatttcgggacttggaaaacttgccacctacgaatttctctaatttgcgtccatcctgggggcccacttgttgaagacaaaatcgctttccctttccatcttaaaggtaagttgaattcagggaattggaccaaacccagagtccgggttttttacgaaaagtattaagtatcctattaatggaaacagaagttgaagacctcagtttaattttcacaagagtatctgacaacccaaagctgggggtgttacgtgagggtttgaagcttttcatcagccacttcttgctaaagaacgcacaggcccacagaagcgccgacgaagccaacgtgctgagagagaaagctgaccttgcaacgaagtgtctgcaaggaaaagcttccctgagaatgtagtcagggaaggaaggagggcaggtggccctttgactgtaaaatgtccttggtaaacccaaaggcttattctgttgcctgcgtgtgaatgtttggtagagctatatcattgtctgttaatgtattatattttgaga

SEQ ID NO: 263343 - DNA, 344 bp, Homo Sapiens
tgctatcatcgatacatactgttaggttgtctttttttaaaaaacctaatgtaatttgttcatctttttatatctataaatatagctcaacacagttatattctttttgtgaatgtattatatctacaatttaccttttttcttagattttacatgcattttcccaaatctttgtgtttgcctatctgtaaaggtaatacattctgattacaaaaaatgaaaatgttacatagaaatgtaccgttatccatctaccagataactattattaataatgtgtatttatttttccaggaattaaaaaacatctatcatataagtattgcaaataaaacttaaaaacc

SEQ ID NO: 263344 - DNA, 1296 bp, Homo Sapiens; identical to SEQ ID NO: 178237
  misc_feature (360)..(451): n is a, c, g, or t
  misc_feature (585)..(585): n is a, c, g, or t

SEQ ID NO: 263345 - DNA, 900 bp, Homo Sapiens; identical to SEQ ID NO: 6131

SEQ ID NO: 263346 - DNA, 862 bp, Homo Sapiens
  misc_feature (46)..(46): n is a, c, g, or t
ggggccttttgctggctgagcagggaaagacctatagacacagggncattgggcaggagctagaacagccctccctagagcactacataaagcagccaatattttgcaaagcatagggaagagtgaaagtcatccggggcatttgcagacacagcactaagaacttggtgacaacagccctgaagcaaaacagcagcatgtactgggcagggcttgggagataagacaggacatctgaagctaaacatggatcccctctgaaagctacaatcaaagtgtcatccacaaaatcttatctcaagccttgactagagaaggacccacttccaagaccacagagttgaatgaattcagtccttgcagcccgttgaactgagggcctccccaacatgctcacctgcttcatcaaagcctgcgagagagagagtccactagcaagaggacattgcagtcttatctaatgcaatcactgaagtgacatcctgtcaccttggtcaccttttctattctattcattataaatgagtcccaagtcctgccacactcaagtggaggggattacacagggctggagtaccagcggtggggataatttggggtcatcttagagttcttccatcacacgggaattctcagctcaccaaatctgggattccgcatctggccattccttaagctgaaggcctggcatatttttgagtgtccatttggatcagctaataaacccagggtttgtctactggctggaggagtaagaactataaggctaattgaaatgaatctacttaaaatagtgacctgatttttctaataattactggaaggtaagggttgattgagactttaaaataaaaccaaaaat

SEQ ID NO: 263347 - DNA, 446 bp, Homo Sapiens
  misc_feature (23)..(23): n is a, c, g, or t
  misc_feature (73)..(73): n is a, c, g, or t
  misc_feature (95)..(95): n is a, c, g, or t
  misc_feature (118)..(118): n is a, c, g, or t
  misc_feature (124)..(124): n is a, c, g, or t
ttccaaaaggggcctggccaaanggaactgaaaaatccaaatccaaaactcctggtgggtccctggggaaaantggggtccccttcctccctaantccaaaggccttgaagaataaanaatttngtgggaatgaacactttgaattggtaacctttccaagagggggatcccatgtttaagccttcaagaatgtccctgtccttatctccccaagccctgccccagtacatgcctgcctgttttgccttcagggctgttgtcacccaagttccttagtgctgtgtctgcaaatgccccggatgactttcactcttccctatgctttgcaaaatattggctgctttatgtagtgctctagggagggctgttctagctcctgcccaatgccctgtgtctataggtctttccctgctcagccagcaaaaccaaaggcagagttttgttg

SEQ ID NO: 263348 - DNA, 602 bp, Homo Sapiens
  misc_feature (32)..(32): n is a, c, g, or t
  misc_feature (488)..(488): n is a, c, g, or t
  misc_feature (548)..(548): n is a, c, g, or t
acatgctttcaaataacttcactttatgcttntcgcacaagccggtgatactttattatataagagagttgtcaaaaggacagtttcatttctgtttcagaatccccacattccagtgatccatctgttgacacaattaacataaactatttgctgatatttactgagtgcttgcaatgtatcagagtcattaaataagatgcaacttctactgtgaaaactggaatcttcattaggacacagacttagaaaaggcccagtttcaaggattctgacttgcacagactgagcactcccatttccagaagttcgaatacctcctttcttatctcgggaatgtccatcattctcctcaacttctgatctctccagttccagtcaaaaaccagaaattttaaggggctcaaattaaggccaccttgtttaacaagttctttaattctccccggagttcctacacccaggtggcaccacacgcttctccagcnacttttacctgcgcctggacctttatggtgctttggcaaataattttataactttgcggnctccctctggaaggtggtcatcgacctaatgagctccaggggccgggagggccg

SEQ ID NO: 263349 - DNA, 1311 bp, Homo Sapiens
  misc_feature (846)..(846): n is a, c, g, or t
  misc_feature (884)..(884): n is a, c, g, or t
  misc_feature (949)..(984): n is a, c, g, or t
ttaagcacaagatctaaagctcttgaaaatgcccgtgaagagaagactgaatgtgttaatgaatttaatgagtctggcaaaagttgcaaattatatgcaagtttgtcctatcgcttataaatgtagtgtttcattggatttattttatgctaggttatattaagttgaaatagtctgtgattaaatgtcctcatccatgcacagaatatgaatggcagcaaatctttgtgcaagaaatttgaaacttattgggaaaagcctcccagtagattaattgttcatatcaggagatttagggtaagtcatgggttgaggtgtcagatagtaatatctatttgttttgtacatgtatatatctaggaactttgtaacaacacatctttaataatgttaaaggttttttcatttttaatattttaaactaaaaactgtacttcaatctcagtttctaaaattaaaaataatttatactgatctataataattttttctttttgaaagatttcattaaaaactgatggggaacttttcaaatgaggggccatggaaccaatatttggggatgcattgagaacccccagggatccttgtggtatttggaaccttaattgggttggaaaaggggaatttttcttgaacgcggacccggaacccaaattttgccctccccacggggaagggaaaacccccttctcccctttttcctcccgtggcccctttccccggagacaacacccccgggcccctcttttaagatttatttctgccatatatatattcttttttacaaggcggtgcctcttttgcgacacacaaaaaaaattattccggggccaaggtcgcccncaacaacatttgggggcggacaacaagacaaatcctcncccctctttgcggagccccggcggggggcagagttgaagaaaacaaaaaatagaagacgaccgcnnnnnnnnnnnnnnnnnnnnnnnnnnnnnnnnnnnncaagatcctagttccaggctggataacacacgttagcgcagcgcgcgagcagcgaactcacatatttgtaccggtaccgattgtggttgagtgcgcgcgagctatatacctcgcccacctcagctcctgtagcgtcgcgccactctccacacctaacgatcacccctgctatcccacactcgaatcgccctctcacccctcgtatcgcaaccctcctgttcggcagtactattcactgcacacaactccactgcattgtgttctcccgcgcttgcgttgccccgctccccatcagcctagcaccaccgctgtaatcgctatttttat

SEQ ID NO: 263350 - DNA, 1035 bp, Homo Sapiens; identical to SEQ ID NO: 178243
  misc_feature (320)..(320): n is a, c, g, or t
  misc_feature (323)..(411): n is a, c, g, or t
  misc_feature (416)..(419): n is a, c, g, or t
  misc_feature (445)..(562): n is a, c, g, or t

SEQ ID NO: 263351 - DNA, 428 bp, Homo Sapiens
  misc_feature (20)..(33): n is a, c, g, or t
  misc_feature (222)..(293): n is a, c, g, or t
  misc_feature (343)..(352): n is a, c, g, or t
agagtgaaactcttgtctcnnnnnnnnnnnnnntgaggtttaagacagttttgtcattactggtgggatctggtcacacaagatagcattaaacgtgacatggcacataaaattggttaaaaaattttgttttttaattacgtaatgtaaaagcccaacaaacactttatgcaagattggaatgtatcttcaaattcagatttaataaacatgtaaagatcnnnnnnnnnnnnnnnnnnnnnnnnnnnnnnnnnnnnnnnnnnnnnnnnnnnnnnnnnnnnnnnnnnnnnnnnacctggtgggcccccttcggccctcaaaaacttttttaaacctttctttnnnnnnnnnnccccaataggaaagggaactgggcaaaactggttcccaagaaaacccgggccagaactaggggttggattcccccc

SEQ ID NO: 263352 - DNA, 1019 bp, Homo Sapiens
  misc_feature (133)..(246): n is a, c, g, or t
caaaagggggtatttttttccgtagccttgggggcctttccccgaggtaagatctggggacccaccaaggccattgcgcccaaggaccgccggggttaatttttggttatttttcagtagaagacgggggttnnnnnnnnnnnnnnnnnnnnnnnnnnnnnnnnnnnnnnnnnnnnnnnnnnnnnnnnnnnnnnnnnnnnnnnnnnnnnnnnnnnnnnnnnnnnnnnnnnnnnnnnnnnnnnnnnnccaactagaactgtaattttcaaaatacagctggagaggaggagagaagacccctcagaaagctatagatgagtctgcccaattcagtagatctactttttcaagggacctggaatcaaaccactacacttacccaaattatgaggcaaaggttttctcccctctctgtgccaccacctgaggcggtattccagacaagagtacacaattttcactttttgtttttaagcaaggttttaattaagctgcatggcatccagaagagagaaatgtaccaaagaatccaacctgagaccagattatacattttagaggggggaaaaaatcaatgctatttgggagagggagcactgtaatcagaatataactccaaaataaatcatacaataaattattttctaaaagaaattgatccacatgcagacagatgaacacacacacgcacacgcgtgcgcacgcacacgtgtcattctagtcatttattcagtgttgactgtgacttccatggagggcaccatgagaaaggaaaagattagacatgtgaaaagaaggctaggccccatcttgccaccagtggaatgagatttaagaccactagagaaggaacccactaaattgccagaaacaagagtagaaagaaacagcagttatcaaggaagattttaattgcttcaaagagggaaaggaagaaagcacagaaatctaatgcaagtaaaggcacaatgaatgtggagttgaatggaaccaaacccttccttcggttaaagttatcc

SEQ ID NO: 263353 - DNA, 408 bp, Homo Sapiens
  misc_feature (155)..(155): n is a, c, g, or t
gggatttgtccaggaccctttgagatctcacctggagtgcatcgtatacaggatgtgaactcatccgtctgcccctccaccaatgatggcaattggctgttgtacgtgcaggaaaccgagtagaaaatgtgacccccccaaatggagaagcctgncaggctttgcccattgtgaaccatggtgaagtgcttggaacatactgttcactcactctaaaggcgctgagactgtgctgttgttctcgtttttatagtcaatggcttgttcatcatccagatgtggctactgacatatctacacttcgcaccggagtgtctggaattgtggctatcctgattataggattttaacttaactgaaatgcctgctttgaataaatgtgttgggttttttgtttggttttattat

SEQ ID NO: 263354 - DNA, 1548 bp, Homo Sapiens
  misc_feature (1354)..(1354): n is a, c, g, or t
  misc_feature (1382)..(1382): n is a, c, g, or t
  misc_feature (1427)..(1427): n is a, c, g, or t
  misc_feature (1441)..(1441): n is a, c, g, or t
  misc_feature (1453)..(1453): n is a, c, g, or t
ggcattcactacaggtgaaggctctcacccccatccctgggggccttgggtgagtggcctgctaaggctcctccttgcccagactacagggcttaggacttggtttgttatatcagggaaaaggagtagggagttcatctggagggttctaagtgggagaaggactatcaacaccactaggaatcccagaggtgggatcctccctcatggctctggcacagtgtaatccaggggtgtagatgggggaactgtgaatacttgaactctgttcccccaccctccatgctcctcacctgtctaggtctcctcagggtggggggtgacagtgccttctctattgggcacagcctagggtcttgggggtcaggggggagaagttcttgattcagccaaatgcagggaggggaggcagatggagcccataggccaccccctatcctctgagtgtttggaaataaactgtgcaatcccctccgccaaacaaaaaacataaccccaatcactaatcccccccagttcccctcattccccttacaaaattccgagccccttgtggcccccttgggtcctaaaaaccttttccacctattccctttggtcggcccggcccccataagtacaatgaacccttgcttccccttttgccccctctaagcgaccccctgcgttaattaccctcgctggccctggcaccttcccctacaaaatcccaacactatcccgctcgcggctctcaccccataagcgctctccccaataatataacccccatatagcgcgatctccttggcccgcccttttcacccgtgtaatctccctcgttaacactgcgctccctcaaagatgccgcgctcccacatattcacaccctttaaccgctcccacgtgtcccgttggtccctctctccacgctcgatagaacgtggtggttctgtactctacacctcataattctctctctttttcccccacttggcgggacgttccttactccgagcaccaccggcgctcgtagggacactctcgtccaacttcgcgtagcggcatagctacacttatgattcacctcttggtccgcgctcctcttgatgtatattatctacattcttacgacccctagcgaacgccaccacgcgcccggccctcctacaatactaattgtgtctctcctctcttttcgctcgcccccatttcactaacaccgccacgcaccggcggcgcgaaacaatagcttcatacatcacgccggtctcactgttgtctctatgaccaacactcaacacaacatattctatgtctcgttgtcctagtatagtacccgcccgcatctctcttcgtgctatcataataacgngctcatactatgtactactcctcctcgncgcagatcatcctgcacgcgacgcgcacgttcctcctagcaccgnactaatcatcactngttggtgtaganacacacaacacctatgtctctcagatatatcggcggcgccagcggctgttaatcacgcgcctcctcagtcgatctatgcacgcacacgattcctt

SEQ ID NO: 263355 - DNA, 633 bp, Homo Sapiens
  misc_feature (143)..(151): n is a, c, g, or t
gggacaaaaagtatactacagagagatgcattttttctcattttcagcaagactcctctaaccatttactcatttactgtattcctgctctgaagatgtggatacagaattagtcactcttgtcactttatttatttattggnnnnnnnnnaaccatctgtgtacattcctttcatagggtagagttctagtactagaagttcttattttgtttttgttgcaatgcttgaatactatttaatatccggttttaatattgcgtggatttgctacctttggacacttgtgcagtggtaaaagcaatccactttcttgtttaatataccagatacatagcaaaagcagcttggaataattatagctgtttatttggctgtgctcagttactatattaagatcttgtactgtgtaacagtaactcttttttgcttttcagtaatttaatatgttcacttaacaaaatacgaactttgagatgcactaaagttttgtttcagcagtggctcaaaaaatttcagaaattacttttgtaattatttgcaattaattgttcttttatcttacaattgtttaagcctgtgatctttcttctcccagctaagagttcttcaataaatttaagaaataaaaaaa

SEQ ID NO: 263356 - DNA, 1442 bp, Homo Sapiens
gcttgtctcttcccacactttatttttcaggcaggagagaaaaagaatgtcatgtctaacatatagtagacggttttagttacaaacagagctgaaatccttactgatcaagttgccatgaacaaccagggacctcatctttcgaaagtcttaatatatgatttcaaatatgtgcagcgactgtacaaaaatttggaaatatacacaagagtgtcactcagcatcatgcctggtatataaaaagcactaactaaatgtccatggaataaatgaatatatgaatatcattccttcactcagccaagcaaagtaggttgtcaccaaaatactcccacccatttatgagagtagtattttttctgagtctagcaagtgtgcacatcataccacaggcttgggcctgttattgttccatcaggagttcatgagtgtgtattgaagtgggattcagttagcttggaacatgatcttagaaactggactacattggctttatgcatacagttacatggaaagctgaaagtatcccgcctctgcttgcagttaacctgggttaggctctaatcaatagtagcttctctccttactctcgggacacagtgtttctatcctactagttacctaagactttataagtgaaacataaaaaataatgaaaagaaggcctggctaagttgcttttatcagtttcacaacatggctgaagctgcctgcagtataatccctctccccatctctaaaatgacatttaacctataaaaaattcaacttccccaaaccacaatatctatttaacaataatctttaggaaaaaaaggttaatagccactccagcacatctcacatcaatggcactgaaaagtgagcttcagaaacaaggtcgaaatttaagaaactcctttaaattcttggtttttgagtagcggatccttttcctggtttcccgggaagaacacggcttttgcacggttgagaaagacactcaggcctttgcttctgaccacattcccaggactattttctattgggttgtaatccttgtgttttttgtaacaccaagagggagatcacagtgaacaaaatatggccaagcagccaacggagatcagggcactgtttgccatcctttaaaggcgaggctgggtctctgtcaggaacagaaatcagggtgctcgtgagagccaggcttgtgtcatcccccagggtgaggttcacacagtacgtcccagacccattgaaggttcgtctcacagtcagcagacacatctcatccacatccacagggctgcagactgtgttctgggtgatctcgcaggtggggtcagaaatgatggtacagacctccgtgggaatgctcccttggcaggtcacgacaaagtctattagggagctttcaggccatggcaccggcatcaggacgtctgtcatctggatgatgttaa

SEQ ID NO: 263357 - DNA, 962 bp, Homo Sapiens
  misc_feature (741)..(741): n is a, c, g, or t
gggaaagaaaagaaaagaaaatgcccaaacccagactaaaggctacagtgacgccaagtccagtgaaaggcaaagggaaagtgggtcgccccacagcttcaaaggcatcaaaggaaaagactccttctcccaaagaagaagatgaggaaccggaaagcccgccagaaaagaaaacatctacaagccccccacccgagaaatctggggatgaagggtctgaagatgaagccccttctggggaggattaaaagtgatgatggtctggggagagattttattaagaaaaggagcgaaaacagagaacggagaggggggacacctcactcacccctccgatacaggggacgctggccggccccgctcggccgtcttcacaacgttgccgaaaccctatttcgattggggggcggcgggcccgcggaagggtggatgaagctgtgggccacgggtggcgccttcgcgcggagaagacgtgcggatcggccgaatgacgttgggacgtcgctcgccctagtaaaatcgtcgcggcgtgcgatgaacatggtgtagggcggccgccgccggacgccgctatgacaggcgcggtggggcggtgcgcatgcgcctcagtcgaaatggagaacgagccgcacccagtatggattccaatccatcttagagagtcgcctgcagcggcctgtggtagtgtcagccggggcggactatcagagttccggtagtcggtcgtacatgtggagaganactgtactgccgccgcatcgcactgtgtgaacgtagatcgcttacgggatcgcatcggcgtctacgtcctctccacggttcggtagcttacgcgaggcgtccacacagacgaccgtcgggcgtccgaccgtgcgccgcactggtccaaagacgcgcttctcagcggtcggagagacggactatgccgagactggcgggcggctctcacagcgctctcgccg

SEQ ID NO: 263358 - DNA, 541 bp, Homo Sapiens
  misc_feature (362)..(371): n is a, c, g, or t
  misc_feature (521)..(521): n is a, c, g, or t
  misc_feature (525)..(525): n is a, c, g, or t
gggagggctagtggaagacttaagatggcggcgtttgcacggagtgcaatcactgcgtccttacgggggttgcaaggcgtccgaagtatgagtccactaacaaaagtccagaaactcgccagttaatagtattgtgtctcttcaaaatatcggagaataatttctttctcgctgatcgcctaacttctactgacgaagcttggaagttgcagaagatggagctcgctaggagggatatatgggtcgttctttcctttttccttatttaaatgggtttttattgacaccatgtcgcgccaaaatggattccatctcctcagagctttcctaggaacagcctaacctcttgggcctaactttannnnnnnnnnggtctgcctttcatgtccagacttattagttttaattaatttggttgtaacggattcattatgcactagattaaacaatttttttctgggcccactataccccaaatgtggagttttgggcaaaaacttaaaaccaaaaaaccgcgcgcnaaanacaaccaaaaacatgg

SEQ ID NO: 263359 - DNA, 461 bp, Homo Sapiens
  misc_feature (386)..(386): n is a, c, g, or t
  misc_feature (430)..(430): n is a, c, g, or t
  misc_feature (435)..(435): n is a, c, g, or t
taaagttaggcccaagaggttaggctgttcctaggaaagctctgaggagatggaatccattttggcgcgacatggtgtccaataaaaacccatttaaataaggaaaaaggaaagaacgacccatatatccctcctaggagctaccttctgcaacttccctagcttcgtcagtagaagttaggcgatcagcgagaaagaaattattctccgatattttgaaagagactggagagagaaaaatggaatacaggccggttactcccccgactcaggccacgcgatcccaaagtgtgcagcctcgctaacggccacttctctagccaacgtgaggctcatcactcaccacaatactattaactgggcgagtttctggaattttgttagtnggactcatacttcggacgccttgcaacccccgtaaggacgcagntgtangccgtgcaaacgccgccactcgtgcc

SEQ ID NO: 263360 - DNA, 814 bp, Homo Sapiens; identical to SEQ ID NO: 174369

SEQ ID NO: 263361 - DNA, 514 bp, Homo Sapiens
  misc_feature (218)..(227): n is a, c, g, or t
gggatgcctagctcatcctgggtttgcttctgaccttgtcatgtgtgtgccaccaaacacgttattggcacctttttaaataagctctcatgatcaagatggtgatggtagagaagctgcccggaataaactgaatttcatatgttctaaaatgactagcaatggtttaaaaaggaagaagagtggaaggtgaagaaggtggtataaatgctgtcaannnnnnnnnnaacccaagtattttggtggggaaaagcaagtatctattgcttagcatatgtaaagttgtagtctatatttatggggccattgcttaaagattataaattatgtaaatacattaataaattctaagtttcatttgacattccattgaatctcgcacccagtcttgcgtatgcctgcccagttttcagcctcttaacgggagactcaagcaccatggtattgtataaaggtatagagcacttagcttacaatctttaaaggtttctctgccttcccttctacccacgcc

SEQ ID NO: 263362 - DNA, 420 bp, Homo Sapiens
gggggggggtggggagttgggctgtgttggaatgggcctgcagcccaacaaacaagggaactaggaccgacagtgacttcaccagcttgctaggtcagaatgagagactggtgggtctgtctacctgtttcttctacaagatccctatttgactgtaaaagtagctaatactcacatgttctccaatcccaggtagccatggtagagttgggtagagttgagcagctgccccaggatccaaatgtggtgtctgaaatggaaagaactaaggcaaccaggaaggcactgatctgccttataagcacagtcatctgaaagtcaggcctgctgcaggacaggatcccccagagaccccatttgcctctcaacactcagaccttcaactgttttttaataaatctactttttaaaaaaataaaa

SEQ ID NO: 263363 - DNA, 521 bp, Homo Sapiens
ggcatcacagctaggaagcttccatcattaattaccttatttccaaaagcaagtactcaaataattgtctcaagagaggaaggacaaaactgttacaagctgaaatatttggggatttgtttgacttgactagggaaccacaagtttccatataatgccctgatttaagcccctgtgccctaacagtttaaatccttaatgcctaatgttaattgccttccccagttggttgacccttataagaaaacactgtgtggtattttaatgtggtaaacatgtgaatgaaggcctgtggctcagttaatcactcccacaactttgagctgtgagttttactggtggaaggaactttaacaggtcttcgctcttgtcattagatatcaaagaactgaaattagttggaattgtaagcagtgaatagatgtgttgttagaatgattccatcacttatacattgtttaaaatgctaataaagtaacttgctttgcaaaacgacaaaacaggaaagaagagggccttgt

SEQ ID NO: 263364 - DNA, 496 bp, Homo Sapiens; identical to SEQ ID NO: 6164

SEQ ID NO: 263365 - DNA, 637 bp, Homo Sapiens
  misc_feature (113)..(184): n is a, c, g, or t
ttcctacctcttcagtgtttctttcagtgatctgaagttaaagccagggggaatatcacagaagtgaagtgcaattctcatcatgtcatatcaagagcacacactaacaaacnnnnnnnnnnnnnnnnnnnnnnnnnnnnnnnnnnnnnnnnnnnnnnnnnnnnnnnnnnnnnnnnnnnnnnnngtgaataaactgacactggaacattcaggaacttcttcatggtcatggtcacccagctagagtgtggaagccaggctgtctgattccaggatctgtgttcttaatcctatacataaggaagccataatgagtcaaccactatttttaagattcacagatgttcgggtccaattcaccagaatgccaagttatacagggttgtggaatcaaaaactgcaattagtaataaaatgtgatgctatctagaatgtttttcatacatatatatgctttttgggactctccctgcaggttaagagaaattgagaaacgatggagaatttaagtgttttagatcctacatacattagacttaaaaatagtaactatgtacatgagtatttgtaaacttaagaatgaacataacatgaaccatgtggcacctataaaatgaaaataaaatacctacaaacc

SEQ ID NO: 263366 - DNA, 614 bp, Homo Sapiens
atttcggcacagagcgcttccattgctgacctctaccgacctctacctgtggtccttcctctactgcagcagagacactgttttcttcctttgttcttccaaccccatggcacagaaacactctccactgcggccaaggattgcaggagaggtggcatcagtgattcaagactgcttttcctacctcttcagtgtttctttcagtgatctgaagttaaagccagggggaatatcacagaagtgaagtgcaattctcatcatgtcatatcaagagcacacactaacaaacaacatgacttattgctgaatattgaacttggatcaccctggctgagggtagtgtttggccagatttctctgtaaaggtgaataaactgacactggaacattcaggaacttcttcatggtcatggtcacccagctagagtgtggaagccaggctgtctgattcccaggatctgtgttcttaatcctatacataaggaagccataatgagtcaaccactatttttaagattcacagatgttcgggtccaattcaccagaatgccaagttatacagggttgtggaatcaaaaactgcaattagtaataaaatgtgatgctatcaagaa

SEQ ID NO: 263367 - DNA, 716 bp, Homo Sapiens
  misc_feature (467)..(467): n is a, c, g, or t
agcctttaatggaaatgaagtcagggagagaaaagaaaggcagaagagtaaccagataaagagaataaaaaaaagagcaataggcattttctttcctccagcaactacggacacaaactggaataaggacagtagagggggtgaaaggggttgtttttaattttcaagaagaaaagaggtgttgagggcaaagggggcaattcttcatcatgaccacaaggtggtgatattggcccagaacagtttggttgctgttttgcgggggaaggcatcaagaccaagtagccgcttgtgtgagaagatagtcacaattccaacagagagaaagatttgggaattattgcatggaaatccctaaagtcatcagccccatatgtaaccacgactctgtcactcttggagctttgctgtcctcccgaggtggtggaaaggtcctcggggatcggcatgggctcatcgccctcatnctggagtatcgcttacaggggggctttccttccctgaaacttgggacatgtcttgaccctcatcagcatccatggtcctcaggttatcaaccaaccgaggcctcgccaaggccaagtgagagctgccttttccacacaaatccagactttgaggacctagggctgctcggagttcccctcagacccagccacctgggagggatcttggtgcctggctacagggcctctgtgtcctcttcctcctccccc

SEQ ID NO: 263368 - DNA, 456 bp, Homo Sapiens
  misc_feature (420)..(420): n is a, c, g, or t
  misc_feature (426)..(426): n is a, c, g, or t
ggggagataattgtttcattcatcctgaccaagactgagccagcttagcaactgctggggagacaaatctcagaaccttgtcccagccagtgaggatgacagtgacacccagagggagtagaatacgcagaactaccaggtggcaaagtacttgtcatagactcctttgctaatgctatacaaaaaattctttagagattataacaaatttttcaaatcattccttagataccttgaaaggcaggaagggaagcgtatatacttaagaatacacaggatattttggggggcagagaataaaacgttagttaatccctttgtctgtcaatcacagtctcagttctcttgctttcacattgtacttaaacctcctgctgtgcctcgcatcctacgcttaataaaagaacatgcttgaatacnccccancaaaccccccaaagaaattacaacatggtc

SEQ ID NO: 263369 - DNA, 909 bp, Homo Sapiens
  misc_feature (252)..(252): n is a, c, g, or t
  misc_feature (300)..(300): n is a, c, g, or t
  misc_feature (306)..(306): n is a, c, g, or t
  misc_feature (313)..(313): n is a, c, g, or t
  misc_feature (320)..(320): n is a, c, g, or t
  misc_feature (700)..(750): n is a, c, g, or t
ggaatgtctggaacatggacttggcggtcagtaacctgtaacagagctacaactaggaaaattagagtggtagtagtcacttatttaagaattcattcaggtaaacagctgcaccctctgtaccccttaagtggcaaagaagctgttatagtcttctgaaaattatcactatgagtgctataattctgaatataatgtctcttaattagaattcatacaagaaccacgtgtgagtgttgttgttgttgtttnttttttaatcaaatgcaagtgtgactataaaggagtgtggctgatttntttttnttctttnttctttntaaacagacagcagaacttttctccaaatgaatgccgtcccatggaaagtggctgtcctgggaggctacacgtttctccaatggtgatgctgttgctcagaacttgctagaggtctttagggaacctccgtgagagctgcagcacctttttaattttctcggtgtcatcctctgagtatggattttctgtttttaaacagcccaaagtttagaagggtattttctaatgtggctcataaaccaccttttaaggcctttcctcaaacaggagttctaaataagtctccaacaatagtagttttgttggagctaaggatgtaactactttgagggagaaatgttcgtttagatttctacattctgttatgttggttttattnnnnnnnnnnnnnnnnnnnnnnnnnnnnnnnnnnnnnnnnnnnnnnnnnnnccttgtcggccggcctcggcccctcggagaagctttctaagacccactcgtttcggcggcccggggccccatgtaggaaaacggaacattggcccatagctggttttccttaggaaaatcctgggtcatgaactaggggctggggattcctcaccaaat

SEQ ID NO: 263370 - DNA, 741 bp, Homo Sapiens
  misc_feature (27)..(27): n is a, c, g, or t
cgaagccgacaagccgctggccccgtngccggctccggagccggcagcccccatggctgggggttatggagtgatgggtgacgatggttctattgattatactgttcacgaagcctggaatgaagccaccaatgtttacttgatagttatccttgttagcttcggtctcttcatgtatgccaaaaggaacaaaaggagaattatgaggatattcagtgtgccacctacagaggaaactttgtcagagcccaacttttatgacacgataagcaagattcgtttaagacaacaactggaaatgtattccatttcaagaaagtaccgactatcagcagccacaaaaccaagctgacagtgtgcaactctcattggaatgaaacctcagaaaaagagcaacagaagtaattgtttcaagctcctgattctttctactaaatcatgaacagctttaaaaacatttctgtctgcataaaattattttacttgtaacttttccccaattgttctgtgcattgttttgcctttttaaattacatctccaagtggctcaaaaggccttgacacagggaacctgcacatatccaggatatgtgtaaccagcgatggtgacttgaccttgccaagacctgtgattccttcaggatacaatcagtgagaaataaaaacacatcttgggaagtgggaaccctggagtttatgccatttgcaatattaaaaaataaaaatgcaagttattatttc

SEQ ID NO: 263371 - DNA, 732 bp, Homo Sapiens; identical to SEQ ID NO: 6485
  misc_feature (377)..(403): n is a, c, g, or t

SEQ ID NO: 263372 - DNA, 1186 bp, Homo Sapiens
  misc_feature (281)..(289): n is a, c, g, or t
  misc_feature (452)..(464): n is a, c, g, or t
  misc_feature (512)..(512): n is a, c, g, or t
  misc_feature (518)..(519): n is a, c, g, or t
agaaaaggtttcatgaccaacccgcgggtggggaatgtgttcctcatggttgcgcccgataactcacttttggggcgtgcgaccccactttttcggcgtatattacatgggccggtggcgtagggggggtatttttgataagagggtgtctttcttggggaattacccggtcggttgggattctcccgtgaatgggggtcatgggcaacttccaggtctggggaggggtttcactaaaacgagtattggtttttcccccggggcgttctttttttattgcnnnnnnnnnattccgaatgccctttagggtacccgccccccgcatttttcctttgggacaagcatcttttttggccaattgtcccctttttccccctggggcgcccccgccattccaagggcaatgggtgtgaaaaaggcttttttgatgggcaggagttcttcccgccacnnnnnnnnnnnnncaggtgtttgttttggtctcggtttttggtgtgtggggcttggtgtgngattannttttcaggcaaatatgtttaattttttaaaataactgatggcaaaataaaatatttacatcacatcatactgtgtaaacatgtaaggtctctgtacaaagaaatatacatgcaaaataatgtaaaaatttaactgaaataataaaagaaacaatacacaaataaaaattatgaggttacgaatacacatccagtttcgaatccaatttcttttaaaaagtttctgtacaattttacaagaagaaacaaacaaaaacccaacaaaagaataaataaaatacactggaagctgcaaagcttaactacgccagtttatggctcaagacccaggtgtctggctggcttgggaagcgggctggtctcttttgtagtgcagttcacacgagaaaagataaaaagacatcccagaaaacttccgagggtgccccagaaaccccagccctcccttgagttgaaaggactcccccacaccagtgcgaatgctgcccacagtgactcgggcattgggtaacccacgcggggcggccagtgcttaatcggcttttatttcttaccaaaagctcaaaacccagccaatttttatacagaaagttcaacgtcaaaaagtctaaaaagtagtaaatgtccagactgattttgggaaaaaaaataatactttggcattctga

SEQ ID NO: 263373 - DNA, 470 bp, Homo Sapiens
agctgccgacaaagccctgaaaaccttccaggaggagttcatgccagtggagaccttctcagagttcctcgatgtggccggtcttttatcagaaatcaccgatccagagagcttcctgaaggacctgttgaactcagtcccctgaccaccacacagcagctgcggcggcgaagacgaagctggcttgccttccaccctctgttctccctccttgtgcattaagttccctccgcgggatgctgcattgttaccccgccctcccctctctcatttttcttggtgtggcttggggtttttaggcttcctgttttatctcgtgtgtgtggtgcaccagctatgaggttgtctgtaacccaagccatcaaagggcctgtacatacctaggagccatgagttgtcccggccagcttcatacttgagtgtgcacatcttgagaaataaacaagtgacttaacacacattgtaaaaaa

SEQ ID NO: 263374 - DNA, 287 bp, Homo Sapiens
gggggagcgggcagtcagaacagctgttccccactccgtggttctcaaaatcataaaccatggctactcttgggaaccacccggccatgcggtcgccaagtacagcaagccccctttctcttcccaatcacgtggctgagcgtggatgacttttattttacgagaagggcgattaacacttttgacagtatcttgctttgccctgatttgggggattgtcttgttttggtggttgttttggaaaaacagcttataaactgatttttgtagttttggtatttaaagca

SEQ ID NO: 263375 - DNA, 595 bp, Homo Sapiens
ctgtcttactgagagaagttgttaaagctttatacatgttgaccccatctaaagctggggaaaatatacacttgatgaagtaggtgtctttgtatttatttcttttggggtcatagaggtaagcttttttgtaaaatctctactcttcctgagagttttgagaaaaactggcaggaagaacttataatccccaaatagaagataccacgtctgttcaaaagcaggtattgctatagagcagcacccaggaaatatctgtgggtggcagccttggtatagaggtgtcctgtcttcatgagtgaagttacttgcctgattaggtgctggaaggtattggctccctgttttggtgtggactcatggcaagctggtgtttaagaggtcaggaggcctgctgatctttcaaaggacacccatgatgtctactcatagaaagggcaagtaacgtgttcattttggtcttgaatgtccaaactcaagggttggattttggccaattgaaatcagacatatgcgatcttgggtttttgcatggaaattaatgtaatgcttataaatgaaaaatgaaaacatttcaaccatctaagtcaaacac

SEQ ID NO: 263376 - DNA, 410 bp, Homo Sapiens
  misc_feature (51)..(51): n is a, c, g, or t
gttcaaaaaagcgggtattgcctatagagcaaccacccccggaaaataccntgggggtggcaagcccctgggaatagaggtgcccctgtccttccatgagtgaagttaccttgccctgattagggtgcctggaaggtattggctcccctgttttggtgtggactcatggcaagctggtgtttaagaggtcaggaggcctgctgatctttcaaaggacacccatgatgtctactcatagaaagggcaagtaacgtgttcattttggtcttgaatgtccaaactcaagggttggattttggccaattgaaatcagacatatgcgatcttgggtttttgcatggaaattaatgtaatgcttataaatgaaaaatgaaaacatttcaaccatctaagtcaaacacaaaaataat

SEQ ID NO: 263377 - DNA, 731 bp, Homo Sapiens; identical to SEQ ID NO: 6491
  misc_feature (498)..(536): n is a, c, g, or t
  misc_feature (538)..(547): n is a, c, g, or t
  misc_feature (554)..(556): n is a, c, g, or t
  misc_feature (558)..(559): n is a, c, g, or t
  misc_feature (561)..(562): n is a, c, g, or t
  misc_feature (564)..(570): n is a, c, g, or t
  misc_feature (572)..(572): n is a, c, g, or t
  misc_feature (574)..(574): n is a, c, g, or t
  misc_feature (576)..(578): n is a, c, g, or t

SEQ ID NO: 263378 - DNA, 668 bp, Homo Sapiens
  misc_feature (308)..(308): n is a, c, g, or t
ggacaagaagagataatgtcttcagttttatggtgttttctgtgttttgttctccctgaccactttggttgatgtattttttccatgcgtctccacatctgttggggtagacgtgttgattgattgcattgcccaccagcaccctacaatcagatagttgtgatgctttaattctaacatacagcccgtaccacatccaggagatgtaaaaagtgtgtttgtgaatgtcttcacttgtactctaattcagacttgcccaaagtatttggctatttactattatgggtaatactcttctctggcctagntccttaacagagctacctaaaatagaaatttacttttatggatagaagtacagaattttgagaagaaactaaattttcaccaaattttaaggaaaaattgtcattatctaaaaatgttcttatatatctgcttcatcttaccttcatactctgaaattccctatagcagacagagctagggaaatattaaaaatttaccctatttattttctggaactaaatcaagccttaactataacattatgagagtaatgggaactactgctggctttaagtaaataaaagtcattgttttcaacagtgtataaaaatcatagtgtaacctttttatttaataaatatcttacatttaattgctaa

SEQ ID NO: 263379 - DNA, 649 bp, Homo Sapiens; identical to SEQ ID NO: 6498

SEQ ID NO: 263380 - DNA, 820 bp, Homo Sapiens; identical to SEQ ID NO: 177108
  misc_feature (658)..(658): n is a, c, g, or t
  misc_feature (668)..(668): n is a, c, g, or t
  misc_feature (675)..(762): n is a, c, g, or t
  misc_feature (770)..(770): n is a, c, g, or t

SEQ ID NO: 263381 - DNA, 908 bp, Homo Sapiens
  misc_feature (235)..(294): n is a, c, g, or t
  misc_feature (300)..(392): n is a, c, g, or t
  misc_feature (842)..(842): n is a, c, g, or t
  misc_feature (890)..(890): n is a, c, g, or t
ggggcggacgcttgtgccggaagtaaacttgttaacggttctttgccttttggggaggggatacagcccagagaaggctttggagacccttgagtcggccagcgagcagggtttcttacttgagcgcctccacaaataaacgctccttcgctcctccgtcgcgtgcgtttccctgggataataagtgggaaagtggtggcttttatttttttgagacagggtctcaccgccgtcnnnnnnnnnnnnnnnnnnnnnnnnnnnnnnnnnnnnnnnnnnnnnnnnnnnnnnnnnnnngctcannnnnnnnnnnnnnnnnnnnnnnnnnnnnnnnnnnnnnnnnnnnnnnnnnnnnnnnnnnnnnnnnnnnnnnnnnnnnnnnnnnnnnnnnnnnngagtgagccaccgcatctggcccggaaagtgttttggagcgtagaaaaatgcaaattatagggctgccttcaaggatcccgaaggacccacatatttgccgcatcaggctcctatgcacgccggtaatttgatgtgttgagatgcactgcccagtgcgttgtttttactggaggagcttgtgtgcggactccttgctagtgtatgtgttgggatgggagagaagtgcgggagaactatgagataatgccccctgatcctcagggtcttaggaggtatggtcggagaggctaagctaaagtatgaaagccgtgtgtaggcccttctgtgtagtgcagaaaaggtagaggtatgtgatttgaaagagtagggatgacatgggaggatgcgactcctgggttggatctataaaacttaatgtctttgggaacgaaagcacatgcaaccttttngaaaatgggatggggttgataattgaaagaccctttccagaggaaganacaccatggtgccaaagg

SEQ ID NO: 263382 - DNA, 464 bp, Homo Sapiens
ccctatttaaatgaaaggagtttaaaaacattttttaaggagggagaaaggagaaattttggtttttcaacactgaaaaaatactacctataggaaagtctgtcaggtttggtttttttgtacaatatgaaaaggatattatctacctgttctgtagctttctggaatttacctccccttttctatgttgctattgtaaggtctttgtaaaatcttgcagttttgtaagccctctttaatgctgtctttgtggactgtgggtctggactaaccctgtggttgcctgccctcctgagcctccgccttcccagcagcggcaccaaggggccttagggagccccaaaacctaccactcgcgtgttccccaagcgcctggctgctgcttcttgcttcccgtcccccagccccatgctcccttttacattctgtgtgtatctaaaggatggaaaaataaaacgcaatta

SEQ ID NO: 263383 - DNA, 979 bp, Homo Sapiens
  misc_feature (687)..(687): n is a, c, g, or t
ggagtgcagccccagggaagggccagcttccacacccatgtccagtgcagcaccccaagccccagcctgaagggctggtcaccgagtaggctctggcttctgccacagcgcacctgtctgccgctgccgcctcagctgctttggcccagccagcttcagatctggtcttggcgagctctcgccaggaccccaaggctgttggtctgtctggcccttgccccacccccttgccagatccctggtgtctggagctgagtggccgggcatccgtcccaagcatcaaagcctttggcctttctcctcccacgccatccacaaaggcctggcacacagaggtctcattccagcctgactccttgtccccctgggggcacccctaccaagacataacccccccctcagagacgcggaatagaaatttcagtccaacatctatggactctccaggtgcgcgcccgctgcaccccacgacactaacccggccaccccgtgtcccctatacctattgtgcgtcaatcctgagcagcaagcgtcgacccagacgttgtgtcaccgtaattgttgctatcatcccctctagccactcggaaatttttttccctaccaccgctccctatgagaccgaggatccccccaccaccccactgctaaatatgcagagaaatactgagccctcgaaggcgaaanactggtatccacggcaacacaggacgctgggtactctttatcgaacgttataagctcccccacctttgttcaccacccctgcccgctcaacttgaccccttcgcggcgccgatgacatcctcgatgagagacgcaggatgtaccacgttcgagagcgccgatacctgtacatctgtccggtggatacatgctttgcgagtcagcccagaccgtgaaataagagcagcacgcacgcacactcaaacaaactacactcgctcccatatcttataatgaacacccgccctacaag

SEQ ID NO: 263384 - DNA, 567 bp, Homo Sapiens
  misc_feature (24)..(24): n is a, c, g, or t
  misc_feature (41)..(41): n is a, c, g, or t
  misc_feature (64)..(64): n is a, c, g, or t
  misc_feature (81)..(81): n is a, c, g, or t
  misc_feature (107)..(177): n is a, c, g, or t
gtccatagttgggttgtaggtccngggcacacaaaattggncctggatagccacatatcagtcngcttccttctcctctcngaatttctttatttaaaaaaaggaannnnnnnnnnnnnnnnnnnnnnnnnnnnnnnnnnnnnnnnnnnnnnnnnnnnnnnnnnnnnnnnnnnnnnntactaatatgaattattagcctatactaatatgaattcctatactaatatgattgaaattagtttgacttctataataattgttctcccagattgggcttctgttttgatagtagaactaaattattaggctatttcaagaaattaatatattactggtagaaaaactgaagctacaaaatggcctggtttctcacttcagttaaatttgtgcttctgagtgcttgtattctaggtgaaaccgcactgagaaggtatttgtggcccatacgctgattcattgatgagacttctttgcacagggagagccgctaaaaattactgcggtgaacaggtacgaagaaaaagactgttctctgcccttctttttgcaataaaatattacaaacta

SEQ ID NO: 263385 - DNA, 1006 bp, Homo Sapiens; identical to SEQ ID NO: 178259

SEQ ID NO: 263386 - DNA, 481 bp, Homo Sapiens
ggtgcactagcagctctggatgggggcaggagcctggaagagctaactcgtctggcctttgagctctttgctgaagagcaagcagagggtcccaaccgcctgctgtacaaagacggcttcagcaccatcctgcacctgctgctgggttcaccccaccctgctgccacagctttgcatgctgagctgtgccaggcaggatccagccaaggcctctccctctgtcagttccagaacttctccctccatgacccactctatgggaaactcttcagcacctacctgcgccccccacacacctctcgaggcacctcccagacaccaaatgcctcatccccaggcaaccccactgctctggccaatgggactgtgcaagcacccaagcagaagggagactgagtgcctcagcctctcaccccctcctcctcagggcagcgctaggggcctcccctatgcctcagccccatctctgctcctgtttgaa

SEQ ID NO: 263387 - DNA, 433 bp, Homo Sapiens
  misc_feature (24)..(24): n is a, c, g, or t
  misc_feature (34)..(34): n is a, c, g, or t
  misc_feature (44)..(44): n is a, c, g, or t
  misc_feature (53)..(53): n is a, c, g, or t
  misc_feature (128)..(128): n is a, c, g, or t
ggtggggaaaaatggtttaagggncctaaaggtngccctcggcnccctcaccngtaaaccagtgaaaagtttaaccccagagggtaaattaccccgggtttccgggtggggtatcctggggaactganggatggggagattaactgttgtatatgacccatagtaaagcaaaagactgttagagaatgagtaaacgttcgttttccctcccctacagaatttacagttactctctgtccattccactcactactgtcttcatcacacacacagaggcaaacgtctgattcagatagccaggtgtgccatgcatgcactccaccatattgtgatctcttcgaggcttgtttctgtcccctgtcctccacagtcctggattgttaatgaatagttcatacatgtttgttaaataaatataccttctttaaaattt

SEQ ID NO: 263388 - DNA, 832 bp, Homo Sapiens
agttcagtctggagataattcagaaatacagatgataattgttttcaaattcttgaaggaaatgggagagagaataggctaattctgtattgcttcagaaaccaaatggaaacaattaaattccattagagaaatggttggaaaatatgaggaggatttagttcagtacgaggaagctgtttctaatactttttgttggttaaaaatacattccgctgctgtggaaagcctgtagctgccaggagtgttacagagggcattcctcccttgagttgacatttgtgccaaaccggctttgagggcttctccagcttttaagatgcgataatgataagatgatcatcgggaaaacatccctcagatgaaacgttcacaggctggctctggaaaactggcattcagatgattgcggctcccccatactgtaggaatattgtttatggcttaaggttgcctcgctcctcatctgtaatcagtgaaagtttatccagaggttaattacccggttttctggtgggtatctgggaactgaggatgggagattaactgttgtatatgaccatagtaaagcaaaagactgttagagaatgagtaaacgttcgttttcctccctacagaatttacagttactctctgtccattccactcactactgtcttcatcacacacacagaggcaaacgtctgattcagatagccaggtgtgccatgcatgcactccaccatattgtgatctcttcgaggcttgtttctgtcccctgtcctccacagtcctggattgttaatgaatagttcatacatgtttgttaaataaatataccttctttaaaatt

SEQ ID NO: 263389 - DNA, 403 bp, Homo Sapiens
agacctccccgcctccgcttttaattgtttggccttcattcctcttctacagtgctccctgcaatcagtactggtgctgtacatatttgctagcttcgtacatacggcacgaagtagatgctcagtaaatgttggttgactgagtatcctctgcatctcggtgacatcacatcctgcgtgccgtggcgtcattctgcattcctctgcgggaggctcagatccggagggtttaagtggttgtttataacatgcaccgaacatatccaacggaggctgtggtttccgaccgcccacaaaaagcgcggttggcgggagtgcgggttcggggtcggctggcagctgggagactccagctctgggcggaaacacactgcctcggaggcgccggcgcctagtgattctg

SEQ ID NO: 263390 - DNA, 474 bp, Homo Sapiens
  misc_feature (23)..(23): n is a, c, g, or t
  misc_feature (50)..(50): n is a, c, g, or t
  misc_feature (95)..(95): n is a, c, g, or t
  misc_feature (107)..(107): n is a, c, g, or t
  misc_feature (116)..(116): n is a, c, g, or t
  misc_feature (128)..(128): n is a, c, g, or t
  misc_feature (152)..(152): n is a, c, g, or t
  misc_feature (178)..(178): n is a, c, g, or t
  misc_feature (207)..(275): n is a, c, g, or t
atgtgccagagcggggcaaaacncctaccctcaagtaagaggggaaaggnaaacaaagcggcggttttagccccgggttccaaggatagagtggnggtaaattaagnagccccccnggctgtgaatcncccatttgagacattatacataanttgtttttgttataagccatttgaanttttaaaaaatttcatacatgcaatggannnnnnnnnnnnnnnnnnnnnnnnnnnnnnnnnnnnnnnnnnnnnnnnnnnnnnnnnnnnnnnnnnnnnaaacccctgtgtgcctaccacccaccttattgcctttcctttgaggtaccgtgtgcggtttcctgaacctatctctatccctgtctgatagagggaacccctgtactgaactttgtgttgaccatagccttcttgtctttcatcactttatctccatgtatgtatccttaaagaataataaatggaattaaactgaaaa

SEQ ID NO: 263391 - DNA, 1027 bp, Homo Sapiens
  misc_feature (768)..(892): n is a, c, g, or t
  misc_feature (904)..(917): n is a, c, g, or t
  misc_feature (924)..(943): n is a, c, g, or t
acactgttaagatgcccaaaagagcaaagttgtagtggagatgcagggtcatttccccatgccatccacagtgtttgttagtgagtccacggctgacttgcagtgataaagaaaagcatggagctgtgtctgcagacaatggtggctgcatctgtaagtggcttcagaggcagcagccctggggaaattgatgggtgtggcagtggacctgtgaagagggagaatctagccttcagcctgtccagtgttaaccactagaggaaacttgagctttatatccttttttaatgcctgtgaattttagcatattgaaacattagagcaaatactcaggggatttttcattaaacatccctcagataatttagctatatatcattagaaagggaaagctatcatttttattttaaaactaaacaaggccatcttataaactgtcaccaaagtcttcccttttttattgcatgtgtgccttgaatttcataaaacattaattcacaatgggggtcagaatgtactcttgttgaaacacttcttgtaccattttatgttcatattatgtttgagagggtaaaaatgtatgagcagcttaactgaagtagaactattcatgatgcttttcacacattgtggcataagatgtaaagtttgtaattaatgttaatttctgtgcattttaatattcttttataattattaatgttaatttctgtgcattttaatattcttttataattatgagcattttaataaattcatttttacaannnnnnnnnnnnnnnnnnnnnnnnnnnnnnnnnnnnnnnnnnnnnnnnnnnnnnnnnnnnnnnnnnnnnnnnnnnnnnnnnnnnnnnnnnnnnnnnnnnnnnnnnnnnnnnnnnnnnnnnnnnnnaattttgggggnnnnnnnnnnnnnnaaaaaannnnnnnnnnnnnnnnnnnnggggccgggcccccaaaggaaaggaaacagggcctatgtttttcccaaggaaacccgggacaaaaaaaggggtgggatcccccc

SEQ ID NO: 263392 - DNA, 378 bp, Homo Sapiens
  misc_feature (66)..(66): n is a, c, g, or t
  misc_feature (72)..(72): n is a, c, g, or t
  misc_feature (91)..(91): n is a, c, g, or t
  misc_feature (137)..(137): n is a, c, g, or t
  misc_feature (153)..(153): n is a, c, g, or t
  misc_feature (171)..(171): n is a, c, g, or t
ttttaaatttaaaaacccaaaccaaggcccaaccctataaaccggtcacccaaagtcctccccctnttttantgcatgtgtgcccttgaanttccataaaacattaaatcacaatgggggtcagaatgtactcttgntgaaacacttcttgtncccattttatggtcatantatgtttgagagggtaaaaatgtatgagcagcttaactgaagtagaactattcatgatgcttttcacacattgtggcataagatgtaaagtttgtaattaatgttaatttctgtgcattttaatattcttttataattattaatgttaatttctgtgcattttaatattcttttataattatgagcattttaataaattcatttctt

SEQ ID NO: 263393 - DNA, 426 bp, Homo Sapiens
cacaggggagacccagtatgggggagcaaattggacaaatgggaattagaggagtgcagttttaaaaggaaaagttgctgtcatcaaaatggcagccttttccccagctactgtttttggggccaagatggctgccctagcagcaatcactgccaagggcaagatcatggcttttggagggaggtgagtttagggagggccaggaccatcctcctacccctcataccctcccagcatatacaaaaggggaggttttagacaggctccctgaatgttaaccacagaggagtcactccttcattcctcctctgtctctttgcacttttcttggtcttgccacagcctgagtgacgaatttcctactgaatgtaccaagttccaatttttaagggggggaaaggtttcaaatggggaaaaacacacgaa

SEQ ID NO: 263394 - DNA, 693 bp, Homo Sapiens
ggcacgagcacccgcgtacaccaggcagccgctgtcccggcagtctccagccgtcccgcccgcttgtggccaactggtccagtcactccccgaaatgccagtcgacttcactgggtactggaagatgttggtcaacgagaatttcgaggagtacctgcgcgccctcgacgtcaatgtggccttgcgcaaaatcgccaacctgctgaagccagacaaagagatcgtgcaggacggtgaccatatgatcatccgcacgctgagcacttttaggaactacatcatggacttccaggttgggaaggagtttgaggaggatctgacaggcatagatgaccgcaagtgcatgacaacagtgagctgggacggagacaagctccagtgtgtgcagaagggtgagaaggaggggcgtggctggacccagtggatcgagggtgatgagctgcacctggagatgagagtggaaggtgtggtctgcaagcaagtattcaagaaggtgcagtgaggcccaggcagacaaccttgtcccaaggaatcagcaggatgtgtgggccaggatccccctctttgcacagcatgaggcaaaaatgtccagccacccccaggcatctgttagcagagtctgtctcttggctttgtcacttttccttttcttaaaacaaagccatgccaataaagtgatctgtgttcgaaaaa

SEQ ID NO: 263395 - DNA, 622 bp, Homo Sapiens
  misc_feature (164)..(164): n is a, c, g, or t
  misc_feature (169)..(169): n is a, c, g, or t
  misc_feature (362)..(362): n is a, c, g, or t
  misc_feature (367)..(367): n is a, c, g, or t
taagttctcatcattattacatagactgtgatgtatctttactggaaatgagcccaagcacacatgcatggcatttgttccacaggagggcatccctggggatgtggctggagcatgagccagctctgtcccagggatggtcccagcggatgctgccaggggcnagtgnaagtgtttagggtgaaggacaagtagggtaaggagggacgccttcaggcaccacagataagccttgaaacagcctctccaagggttttcaccttagcaacaatgggagctgtgggagtgattttggccacactgtcaacatttgttagaaccagtcttttggaaagaaaagtatttcccaacttggtcacttngccangtcactccgttttgcaaaaggtggcccttcactgtccattcccaaatagccccacacgtgctctctgctggattctaaattatgtgaattttgccatattaaatcttcctcatttatactattatttgttacgttcaatcagaatccccgaaacctcctataaagcttagctgccccttctgaggatgctgagaacggtgtctttctttataaatgcaaatggctaccgttttacaataaaattttgcatgtgca

SEQ ID NO: 263396 - DNA, 741 bp, Homo Sapiens
  misc_feature (47)..(56): n is a, c, g, or t
  misc_feature (571)..(583): n is a, c, g, or t
gggtagtcccactgtttctagaagtctcttttaagcattatttttgnnnnnnnnnntatttttatagatgaatactcaggctaacctagtggatgtgatcttggaacttccatgattatccacttaaagatcaaagtattatatgctgtgtgctttttaggtgtttgttagtactgtgaaggcaaaaatgctttctacattgacattcattcctattttactgggcacctatgaatgtatgctgtgtgctagaaatagactaaaacatattcctatagcatgttagtgtgtttgcatgtttgctgaaaatcctttgtgtataaaccagtttgtaaggttctctgggttaggtagggactctgcagtttcttcctgtcaaaatctctcctaccaagatggtgttccactgtccagcccagcatgagtagcaggtagagcacagctttactggctgtttgtatgctttggtttagtgcaatgtgtggtagattacttatcagaaaacatatatgtcatctctagaacgaagaaaaagcatagtagttcaaattccccagtgtgtccctttgannnnnnnnnnnnnaatagtaaaaataagaatctgtactgacttttcacttggccattctggttttaaaggacaagctacaagctctgtgtttctgtactgatgtgtcacttattaaatacttttgtaccatgagtaaaacttcaggtgtttcgcaagaaccaccattctcc

SEQ ID NO: 263397 - DNA, 1099 bp, Homo Sapiens; identical to SEQ ID NO: 178267

SEQ ID NO: 263398 - DNA, 847 bp, Homo Sapiens
  misc_feature (629)..(629): n is a, c, g, or t
agtaaattcattaactatatctaagtcaaaatgcttaatggtatataggattccactatatgtgatatacttttaaaatcaatttcctatggttgaatagtttatttccaatgtttcaatattaacaactcttcaaggaacatcctaggaaaaaatatcttcatatacttgtctgattatttctttaagattcataaaagtgggcccagggtatgttcacggggcgatgctgccctcccagctggcccatgggtgaccctgggaacattaactgcctcacaacgtttgtgcctcagttacccatagatgtagtgagggtaacaatacttactctcgttggtgataaggaacagctaacacaacacacagggtttttctgctcccaaaatgggattcttcagtgcaccaaatcgaagaaagcactggagctcacgctggtttctccattgtttctccttaacagtggaaactgtaacttttgttctagtagcatctagcatgctcaataattatttgtaaataaaagttatacttttccctcccaaaaggggggacaaggtatttgttatgacaagggcttttaaaataataaaaagctccctgcgaaatagcttaacggtcccaaaatnaaaccccgagtcaaccgaatatccataaaaattgttcgggcccgccctccgggcccccccaaagaaacctttttctaaaaacccttttcctttttgggcccgcccggggccccaccgtaaagggtaaaaggagaaacattggggcccaaaaaccggtggttcccccctaaaggaaaaaacccctgggcccattgaaactaaaggggtctttgggattt

SEQ ID NO: 263399 - DNA, 919 bp, Homo Sapiens
  misc_feature (15)..(15): n is a, c, g, or t
  misc_feature (21)..(21): n is a, c, g, or t
  misc_feature (507)..(508): n is a, c, g, or t
  misc_feature (588)..(588): n is a, c, g, or t
  misc_feature (657)..(657): n is a, c, g, or t
  misc_feature (663)..(666): n is a, c, g, or t
  misc_feature (668)..(688): n is a, c, g, or t
  misc_feature (691)..(691): n is a, c, g, or t
  misc_feature (698)..(698): n is a, c, g, or t
  misc_feature (840)..(848): n is a, c, g, or t
tacgtccttttaacntacccngggggcaaaggtgggacttccctggaaaaagggttgtgcagatctaaaacttctcatctatttccacttaaaagggactttcccccttctaaactgtcacccttaccaatgtaaccctgtcctctctatcaccacctccacctgtctttaactaactctagacctgtccttaattgcttttatggtattggaataggaattaaaagaaattaaagaatgtgtaaggagaaactcagttgtatgtaagaaaaacccaattccccctgagaaagagaaagagctggagtcctttaaaaattaactgcctgtttttctgtggctagtgagccttatctctcctcctttcccaggcattgtgaagaccctgtttctctagctgtgcagctgcaaggtcactagacagataaactcaagtcgtaaaacatgtttttccttgaaaagtaaaaaataatataatgcatgtctcagttaaataactggctttgnnctctgtttctataataggcttccccctgcacagatctccccctcgcccacaaaatgcttaaaaggtagcttaactctggntcaggctgtgtccttttaatggtaatctgactggtttggtgcatctaaataattaaataattccctccntaaaannnnannnnnnnnnnnnnnnnnnnnnccntgtcggnccggctccgcccctcgaagaagctttccaaaaccatttcgttttggcgcccgggggccccataagggaaaggggaacctggggccaaaacctggttccctaagggagaacccgggggcctgaaccaagggggcttgggaatnnnnnnnnnaattaaaaaaacggcccggggggggcaaacccaaaagggtttctggaaaacaattccgcaaatgtgggagc

SEQ ID NO: 263400 - DNA, 885 bp, Homo Sapiens; identical to SEQ ID NO: 84552
  misc_feature (479)..(482): n is a, c, g, or t
  misc_feature (484)..(485): n is a, c, g, or t
  misc_feature (488)..(491): n is a, c, g, or t
  misc_feature (545)..(605): n is a, c, g, or t
  misc_feature (637)..(655): n is a, c, g, or t

SEQ ID NO: 263401 - DNA, 416 bp, Homo Sapiens
  misc_feature (46)..(46): n is a, c, g, or t
aggacccagagctgctgcacacactcacctctaaccccctcccctngctgctgggccccatctccacaggagagactggttcagctctagggcctcagtctggagtgggataggagccagtgagtgacaaagcctctgaaagatgcatcatctcttcctcacacccatttagtgggggatgggtcctctagacttgaggggctaccctgggaagctgccgtagcttcagccaggcaagaaagcttccttcaacctgcatagccggtgggtgaggagattcccaccttccatagcctccaaacatgttcccaaggccccactttcaagaatcagaaagcaggaagccatagatgctggctgggttccaggttatggggagaagaaatacagtcaataaaaggtttttgtataaaccc

SEQ ID NO: 263402 - DNA, 602 bp, Homo Sapiens
  misc_feature (70)..(135): n is a, c, g, or t
  misc_feature (144)..(144): n is a, c, g, or t
  misc_feature (146)..(147): n is a, c, g, or t
  misc_feature (204)..(214): n is a, c, g, or t
ttattatagttgttatagaggaaagcatggtttatggcggttgtttttgttctctagtccccttgtgagnnnnnnnnnnnnnnnnnnnnnnnnnnnnnnnnnnnnnnnnnnnnnnnnnnnnnnnnnnnnnnnnnnctttcttcntnntatgtaaatttataaggcaaactctttatataataaataggttacagggattcagtnnnnnnnnnnntgtttttgaaacgtatacaggtacattcagacaggtttactgaaatggtacaaatttccttaataaataacattttgtttttaaatatatcagtgctttcagtcatttggatatacacaaagaaccttttttctgaacactacaaaaaagcaatcaataatttttgtttttaaaacgacctacttattttctaaagtaattgtcccaaaacacaaaaactgaaggtgaatacgatacagggcttttagagacatctccagctaagtgtgtcccggcctctccctgtgccccaagtgcacctctccctacctcagacaggtttccaggctggagccagctcccttctgcacagggtggcctgtgttactggcaatgctgtccatagctc

SEQ ID NO: 263403 - DNA, 1120 bp, Homo Sapiens
  misc_feature (438)..(681): n is a, c, g, or t
  misc_feature (705)..(828): n is a, c, g, or t
  misc_feature (838)..(900): n is a, c, g, or t
  misc_feature (1050)..(1050): n is a, c, g, or t
  misc_feature (1082)..(1082): n is a, c, g, or t
  misc_feature (1096)..(1096): n is a, c, g, or t
ccatttctccaaccacccaaaagcctacggtctcccagagttgtttccttcaacacgtactggtaaacccaccacctagatcttcaggaaatgcagcaacttcaggaaatgcagcaacaaaaatacctactcctatagtaggagtcaagaggacatcctcacctcataaagaagagagtcccaagaaaaccaaaacagaagaggatgaaacaagtgaagatgctaactgtcttgctttgagtggacatgataaaacagaagcaaaggaacaacttgatacagagacaagtacaactcaatcagaaactattcagacagcggcttctctgttggcctctcagaaaacatccagtacagacctttctgatatccctgctctccctgcaaatcctattcctgttatcacgaacccaataaaactgagattgaactccgcannnnnnnnnnnnnnnnnnnnnnnnnnnnnnnnnnnnnnnnnnnnnnnnnnnnnnnnnnnnnnnnnnnnnnnnnnnnnnnnnnnnnnnnnnnnnnnnnnnnnnnnnnnnnnnnnnnnnnnnnnnnnnnnnnnnnnnnnnnnnnnnnnnnnnnnnnnnnnnnnnnnnnnnnnnnnnnnnnnnnnnnnnnnnnnnnnnnnnnnnnnnnnnnnnnnnnnnnnnnnnnnnnnnnnnnnnnnnnnnnnnngaccgggccaccaacacctccgcnnnnnnnnnnnnnnnnnnnnnnnnnnnnnnnnnnnnnnnnnnnnnnnnnnnnnnnnnnnnnnnnnnnnnnnnnnnnnnnnnnnnnnnnnnnnnnnnnnnnnnnnnnnnnnnnnnnnnnnnnnnnacgtcctgannnnnnnnnnnnnnnnnnnnnnnnnnnnnnnnnnnnnnnnnnnnnnnnnnnnnnnnnnnnnnngacgcgctccaaccacgaaccccctcaagacgcccgcccacaccgcgcaaccgacccccccacgcaccggacaccgcgcacatcgtggacctggcacgcaacccgctaccaccgcgccgcacgccgccccacacgtgccgcacgctacgnaaggtccgcaccacgcgccctctcgccacgcnaactcccccgcggncgcgcagagcgctacccgccgccc

SEQ ID NO: 263404 - DNA, 979 bp, Homo Sapiens
  misc_feature (179)..(179): n is a, c, g, or t
  misc_feature (181)..(181): n is a, c, g, or t
  misc_feature (192)..(192): n is a, c, g, or t
  misc_feature (198)..(198): n is a, c, g, or t
  misc_feature (201)..(201): n is a, c, g, or t
  misc_feature (206)..(206): n is a, c, g, or t
  misc_feature (215)..(215): n is a, c, g, or t
  misc_feature (219)..(219): n is a, c, g, or t
  misc_feature (233)..(233): n is a, c, g, or t
  misc_feature (256)..(256): n is a, c, g, or t
  misc_feature (329)..(329): n is a, c, g, or t
  misc_feature (344)..(344): n is a, c, g, or t
  misc_feature (422)..(434): n is a, c, g, or t
  misc_feature (502)..(543): n is a, c, g, or t
  misc_feature (547)..(634): n is a, c, g, or t
ggaagtgtccccagggcaatctcaggcaagcctgcaaacccatcctgactctcagtgtttttttgccaatctggatctctttcctgagctccaaatcaactcattcctagatagctcaccctccagatttagggacatcgaactcagtatgtctaaagctgagccttaccttctagccntntaaaggaggcntaggtnggnagcgnagaagcagnagtnggagagacagggcnatgggaggaggccagggagaggnctctcgcgcccgctggttcgccaatggatgccgctactcttcagaagagaggtgggggttgcacgcgggccgnaggacccccgacgtnctccagccgagaggctgagtgctacagagctacggaggaggggaggtcgggaggaagagaatatcattatcccaccgnnnnnnnnnnnnnggaagacagttatatcgatcacggcgtcctgtttgtcacgcggggggcgggccggctgtcgtgtactnnnnnnnnnnnnnnnnnnnnnnnnnnnnnnnnnnnnnnnnnnggcnnnnnnnnnnnnnnnnnnnnnnnnnnnnnnnnnnnnnnnnnnnnnnnnnnnnnnnnnnnnnnnnnnnnnnnnnnnnnnnnnnnnnnnnttattttaacaagagatagcggaaatggggaggttgtacagagcggccctttactttgggaactctactaacaacagaggaagtcccgccaaccgacgactccaaaatatacacaaataaacccccgcccccctcgtggccactttagattgggaaaaaaatggtggtgaaattttcattaaagcgactttcccgcccagaaaggtgaaaacgcccctacacaagacgtggaggggagaagaacctcgaaaatccccccacgcggcgatatcacacgccctcttgccgccctccctgcgccaaaacaatatatttgccccccggcgggaggaaaagagagggggg

SEQ ID NO: 263405 - DNA, 522 bp, Homo Sapiens; identical to SEQ ID NO: 178277

SEQ ID NO: 263406 - DNA, 1003 bp, Homo Sapiens
  misc_feature (127)..(127): n is a, c, g, or t
  misc_feature (805)..(813): n is a, c, g, or t
tggtggggtgtgccaaatgcccagaccaattcctttttaattaaagtgctggcagggaaaaagggcccccagggcccattcaaattattttgcatagatgtacaaatattgtaaacaattaataggnggacaagagagaagaagatctgttttccgtgaacaatctcccaaataaaaagaaaattcaccttgcctgggatcccagacacatacaaacgcacagtggacgggtgtgagaggacgcgttgggggtgactttggaaatgtgggcttgggattctacagaacctctccttcgcaggctcccctggggaagggggacctttccagttggtgttcccatggctttcttgggtgtccagcagagctgttatacacgtggttaacacaattactgactttggaactggtccccagttttcaaattgcaagtcttccataccctctgtcaaataagaataaattaggaagtaggcagggagagacttccaataaagattggaaaggcgtattgcaggaggtggggaggggctattgcttcagggggaagggactatggcaatacaaaaaaacactccaaccagaaaatcagcaagtctcagaccttaagatctgcaagtgtctcagagctggggcagaaaaaggctttacttttatagggagaagtcagcaaggctgaaaggaatctatggctagcaggcagttacaagattgagccaggtgcccaggctaaggcttctagagacagggagacagggcactaaatcccttgaggtttgttttagagatggctccaaggcccttnnnnnnnnnttcttgggttgtaaaattggcaggaggttaatttcacttttaaaaagatttacctacatccccatctgcacaaagagcttgctaactcactaacccaaacttgagttaagcttccctcctccccaccagaccctggactttgggccatcctcagcctgagccagcaaacagcccctcccctggagacaaa

SEQ ID NO: 263407 - DNA, 745 bp, Homo Sapiens
ggtaataagagaagggtgtgttctcttccaagtaatgagccgatcaaggggaagcaacccaaggctagcaggctcttttcaattcccagctctgccactcttagcatggcagagagttggcctcattatgccagtatggctgccacagtgtcagacatcacattccaggcagtggaaaggagaaagaaccaaagggcatccctttctcttgaagcagtccctgtgaggggggattatctggaagccccaacccaatttctgcttccaaccattatccatagaaacaactggaagttgagaagtgcagtcttttaggtgggcacctggctgccctgtatgaaaccagaattaggttggtcagcaggaaaacaagaaaacacttactgtgttgactgaggtttttgacgcatcgctttattgtcaaattaaacaactctatctcattctgcactgaaacacgtactaccattgcctataattggaaaatgatcctcagaggcacagaagatgccctgatggaaagtttgcccctttgggaaaagaggacagccatgggaaccttcagacctcagcatggaagcttccaagatccagaggaagaggcaacagcactgagagtcataggtagaaagaatcttcacagcccttgctaaccaggcaagctgatgcccctctcccctgggttccctgtggccaaatccctacagggggcatctggtgggctggaacttcacccctgaagacc

SEQ ID NO: 263408 - DNA, 405 bp, Homo Sapiens
gcatactgggaattgaaacgagagcctaaatgacatcctaagaaaggcagtgttcaatacccaggtattaggtgaggatgggattctaaggacatcagtgggaggcagggagccaccttcagacctcagcatggaagcttccaagatccagaggaagaggcaacagcactgagagtcataggtagaagaatcatcacagccctgctaaccaggcagctgatgcccctctcccctggctccctgtgtccaaatcctacaggggcatctgttggctgaactcaacctgaagccaaagagaagatgagtggagagaggcaacatttatagagctcaggtttctagggctggagagggatctggagggacacacaggagacacctggcataaccaaaaaatgattaaaa

SEQ ID NO: 263409 - DNA, 796 bp, Homo Sapiens
tcatgaacattaaatgtgatgatgatttcttttccctgcacacatctttccggtgcaatatctatcaattgtgaatctggctgctggtgtataaaaacctggatgtaaagctgagcctacagacctgtcctcaccaactgttttgtgatttctactcaactacaaagatttatttaatgtactcttaatctaactgagttttgttaccaatgacctgttgcatgcttcaataccgtgtactgcctgagttgtgcctcttgtgtgctagattaaaagtgagacagagacttgacttgatcctctgagctcaagctattgagctggtagtggcagaggactgagggtacctgcacagtttgattcttttccacgtgtaagtctccattgcagaattgtcgtgctttgagaaaacacctgaggcagtgtgggagttgaacgaccctgctgtcctttttaacctgtgttgtcctagaccctgtcggggcagtcaggggacactagagatttgatctcatgcgagtcatcaataggacaaaaaagttgtggtttggggaggtctgtttgttacataaaaaggacctttcggtgtaagaaattgccgtttttaccctgccctggctggcatgtgagaagccatggaaggttgtggttgtaaatgagttgtctaaaggggtgcagaggcctgaggtttctaaaagaaggtagatttctacagagctgagtgttggttcctttttcttattggttgaaaattacctggtagtgatcagaaaacttagatgctatgtaactaaaa

SEQ ID NO: 263410 - DNA, 322 bp, Homo Sapiens
  misc_feature (50)..(50): n is a, c, g, or t
  misc_feature (70)..(70): n is a, c, g, or t
  misc_feature (122)..(122): n is a, c, g, or t
  misc_feature (125)..(125): n is a, c, g, or t
  misc_feature (196)..(196): n is a, c, g, or t
ctcagcttcttcagagagataaaattagggggaggagcccagggccacanaccaagctttgggacatggngcctcatgctctctgggattgcagagcatccagggctgtcttcgcccctgtnagngcacatatatccactcacatgtcttccctcaggctatcgggcagggggacttcaccagggggtttatgganaggcttcaagagggtctgtgagcccccagaaattgtgtgtgagactgagtatgtgttcttttttccagggaaaggctccagtgggttcttacttgatccaaaaaatgtcaagaattaatctaggga

SEQ ID NO: 263411 - DNA, 1250 bp, Homo Sapiens
gggtaccggtccggaattcccgggatatcgtccgacccacgcgtcgcaagtacttcaggacaaagtgctttaggagctaagccatataaagaagaaattgaagatctcaaaatgaagcttgtgaaaatagacctagagaaaatgaaaaatgccaaagaatttgaaaaggaaatcagtgctacaaaagccactgtagaatatcaaaaggaagttataaggctattgagagaaaatctcagaagaagtcaacaggcccaagatacctcagtgatatcagaacatactgatcctcagccttcaaataaacccttaacttgtggaggtggcagcggcattgtacaaaacacaaaagctcttattttgaaaagtgaacatataaggctagaaaaagaaatttctaagttaaagcagcaaaatgaacagctaataaaacaaaagaatgaattgttaagcaataatcagcatctttccaatgaggtcaaaacttggaaggaaagaacccttaaaagagaggctcacaaacaagtaacttgtgagaattctccaaagtctcctaaagtgactggaacagcttctaaaaagaaacaaattacaccctctcaatgcaaggaacggaatttacaagatcctgtgccaaaggaatcaccaaaatcttgtttttttgatagccgatcaaagtctttaccatcacctcatccagttcgctattttgataactcaagtttaggcctttgtccagaggtgcaaaatgcaggagcagagagtgtggattctcagccaggtccttggcacgcctcctcaggcaaggatgtgcctgagtgcaaaactcagtagactcctctttgtcacttctctggagatccagcattccttatttggaaatgactttgtttatgtgtctatccctggtaatgatgttgtagtgcagcttaatttcaattcagtctttactttgccactagagttgaaagataagggaacaggaaatgaatgcattgtggtaatttagaatggtgatagcaataccttcttcttgcatatggtaatacttttaaaagttgaattgttttatttatttgtatattttgtaaagaataaagttattgaaagaaatgtaaagttatctacatgacttagcatattccaaagcataatacatacattaatataaaacatcattttattaacaaaattgtaaatgtttttaataccttacacattcaataaatgtttagtagttctgaaaaaaa

SEQ ID NO: 263412 - DNA, 1215 bp, Homo Sapiens
cctttcccatgtactcagtttagctctcaaagaaggggtgaatcataaagccagtgaaaatttcaccctctgagggagttccccaatctgaaggggaagagggtgacctcagcggcttttctcccaaaaatcggctgaaggctggttgtggatccttgttcctctcctgaccccatctggctgctgccccgtctcccacccctgtccccggggctcgctggccctggcactccgccttagtcctggggggccggcgacacagtgggggctcctcacttgctgcagtgtcatagcaataaaatgtgattcttggggtccccccagggagctgcccatggctttatttatgaacctggttttcgggagtcaggggaggagatgactttgcttctgtgcacagccccgtcttccaggagccacaactcagaagaaaagggtgctcagacttttgttatacacatttgctttgtgtaaataaatgtttacaattttatatgaaagatggaataagcgctagagcttccaactgtatattttttacttttatagattttaaaactatgatcctttatatgtgtgttttgggggagctatgataagttttatggcaaacggttggtattgttaactttttattgtcatcaaaagttcataaaagtcctattaatccccatattcttctactgcccttaactctggtatacaccaaaaagaaatctttactttccttgttttatcattataaaaataaagtattttgctagtatggaaaaactaacggtttaaggaaaaattttaacatgtcgggccgccccgggaccctcgagaaactttctaaacccattcttttggccgcgcgggaccccgaaagggaaggggaacatggcccttaacttgtttccctagggaaatccttggaactggactaaggggctggggattccccccccaataaaaaacggcccgggggggcaacccgacgcgtctcttgaaacaaatcccccaaggggactttctgaagggcactttacctggaattcctattcacacaggggagatcgccagcggaacgctcccaatttcctaaatttaacggccccctgacactggccggattcttttcgaaggacaaccgggatggggaattttcatttaaaaggcattcctgggccccaaaatgggagacaccacactccaccacaaacggtgaattgg

SEQ ID NO: 263413 - DNA, 1429 bp, Homo Sapiens
  misc_feature (407)..(521): n is a, c, g, or t
  misc_feature (966)..(966): n is a, c, g, or t
  misc_feature (1003)..(1003): n is a, c, g, or t
  misc_feature (1355)..(1369): n is a, c, g, or t
caaatacttggtttaactcgactattgacttgggcattgagagagatgatatatacatctttggaaagtgaagtcaatgttcaagaggtgatagaagctttactttttagtgatcagaaatatttagtgcatcttttcagacaggaagaattttatcatcaagtattcccttataaaaccaagtaacacttctttatcagtaacttttagaacttaaaagaaagcaaaaagtaaatggaattgtaggcaatttatgaatcctagtagattttacaatatgtaatttatgttgtttacagtatataaacactaagttttgtgttaaatgtgatcaggaataaaagtatcccacaggcatctgacacaaattccagaattagccaaagaattgtttatttgaggccagnnnnnnnnnnnnnnnnnnnnnnnnnnnnnnnnnnnnnnnnnnnnnnnnnnnnnnnnnnnnnnnnnnnnnnnnnnnnnnnnnnnnnnnnnnnnnnnnnnnnnnnnnnnnnnnnnnncagcgaaaagttttgtttgaataaacaatatccgaaagacaattagcttcttcagatgtattttgaaattctcctaaagagctagtgtttctattcattttcacaatttaaaaacagctcttaacattgctgaagttgggagaactttccatctcttcttaataacagtgcaagattttgtaaattcttttttgtgtttaatgtttaataaaacgagtattaagcttaaattactgaagtacctgggagaagtaatgatgtgtactttcaaaaaaatggaaaatgcttttattttattttctataatttgttaacatgatatgtaaaattaaacttccggagcacaatgaaatgccggattaatttttaccttgtttgggcttaaagtaggtatttaaggttcatgtgttcaaaatgccttggtaaattggatgacctctaactnttactgtccatatggagtttgtcattctttatggatnaagagaacttaaggaaaagttactgtttttcttcagtctttttatatctatctgatttaaaatctgttactttattaaaaggcttcaacaacaggttgttaggatgtactcttacatcccaggttcacataataacccccttttgaattccaatttgcgtaatattttccttatgcccagcagtattcgctatcccaattttaactttagggtttgtttttcttggagcattaacaattttaaaccttatggccccccacattttatcgtgccgcgctaaaatacacactttggtcgggccgcctcttcgggcccttctcaaaaagctttttcaaaacccattttcgttttnnnnnnnnnnnnnnncccccccaaagggaaagtgagacacttgggcccctaaccttgttgttctccccgaggacg

SEQ ID NO: 263414 - DNA, 864 bp, Homo Sapiens
tggttatgttcagctttacaagagctgcccgcccacctgactcttgttcacaagacccctaaaaatcagaaaaagatcagtccaggctgttcagagttggatggggaatcttcctgaggacagtttttaaagagtccattttgacaccagccaagacaaaagccaggacccagagtctagacagctcccaagcctgccgttttcaacttggccttaggatggagtcttctgttctctggcaatgaatgacaggcttttaaaggagtgacaaagagcaagccctggagagagccccatgaggccttggggtaagggcttccaggactgttcatgagaagctgtgcatgtctccctccagcttccccagatgagacaccaagattgagaagtgaagagtcatctccaatttggcagacatcctgaccctccacactcaccattctgatatttagtcattaccatcctggcatagttaaccacttctccttctgactgagaagctgaaagtgatattcagcctgggtgtgatgtggggattttctgggacagggcggagatgatgagatgctggagttgcatgagctggtcattacagtcaagacttgtgaaccagttgtgaaacccttggtaacctgaaatctgctatggtgggagtatttacactacagaaattggccaatgctgcaaatcagggtttctttcttttttcagtgagacactgcaccagcacacactgcattactcacgcaggaggagctctgggagggcgggagaaaaccatgggtgagcagagttgaggatgtttggtgcttcccctgatggcttcatcatgtcatctttcttggctcttcatggtcagtgttt

SEQ ID NO: 263415 - DNA, 840 bp, Homo Sapiens
  misc_feature (18)..(18): n is a, c, g, or t
  misc_feature (34)..(34): n is a, c, g, or t
  misc_feature (41)..(41): n is a, c, g, or t
  misc_feature (117)..(182): n is a, c, g, or t
  misc_feature (213)..(345): n is a, c, g, or t
  misc_feature (348)..(348): n is a, c, g, or t
  misc_feature (423)..(486): n is a, c, g, or t
  misc_feature (604)..(615): n is a, c, g, or t
  misc_feature (679)..(774): n is a, c, g, or t
gcgtcctgtccacacccngctcagcatttccacnccaagcngcaacagcaaatcacgaccactgatagatgtctattcttgttggagacatgggatgattattttctgttctatttnnnnnnnnnnnnnnnnnnnnnnnnnnnnnnnnnnnnnnnnnnnnnnnnnnnnnnnnnnnnnnnnnntggttgccataaaaataaatcagttcatttnnnnnnnnnnnnnnnnnnnnnnnnnnnnnnnnnnnnnnnnnnnnnnnnnnnnnnnnnnnnnnnnnnnnnnnnnnnnnnnnnnnnnnnnnnnnnnnnnnnnnnnnnnnnnnnnnnnnnnnnnnnnnnnnnnnnnggngggcgccccaggcccccgaaaaatttttttaaacctttttatttggggcggggcccccagagggaagggcaccgnnnnnnnnnnnnnnnnnnnnnnnnnnnnnnnnnnnnnnnnnnnnnnnnnnnnnnnnnnnnnnnnaaaagacccgggggggaaaccgaagggtgtttgaaaaaacccccagggggggtttctgggggctcttttggggtatttatacacaggggctcccaagggaagtctcaaaataaaattnnnnnnnnnnnngtgacacttttttccaaagaggggtgggaaatttttaaaaagcttttttcccccacatgggggnnnnnnnnnnnnnnnnnnnnnnnnnnnnnnnnnnnnnnnnnnnnnnnnnnnnnnnnnnnnnnnnnnnnnnnnnnnnnnnnnnnnnnnnnnnnnnnnccggggtagaaacaaggggggggagaaaaaaagtgtgttccactatttggcgccccccgttataac

SEQ ID NO: 263416 - DNA, 551 bp, Homo Sapiens
ggggagttcgcagccggaacgttgcaggcacttgtttcctcagtggatgcctttcggcgcgccgccgcccggcgccgcgggactgggagaccggtatctgagaacatatttcttccctataggagttgagaagaggaggaagaataatgggaggagacaggacctttttcaacttgacaaatagatttctgagagagcagacaccatcttatttctgttgaattgtatttagtaactcaaaaggcatataccaagctgtcagaagcagcttcatttaaaagaaataaaatttctagtcctgcctgaagtttaagctagcccatgactacacaagtgcaactgtatttcccagaattaaagcagcagccttggatccagagatggacgccaattgatgaagacagcagaactgactggctagtctgggttccctggagcagagctgtctctccaccctaggttatccacttacttttgtactgttatgtgagagagaaataaacttctatcttctttagaaacgccgccctcctttacataaccccccctgg

SEQ ID NO: 263417 - DNA, 1547 bp, Homo Sapiens
  misc_feature (145)..(159): n is a, c, g, or t
  misc_feature (212)..(221): n is a, c, g, or t
  misc_feature (345)..(416): n is a, c, g, or t
  misc_feature (498)..(514): n is a, c, g, or t
  misc_feature (528)..(704): n is a, c, g, or t
  misc_feature (721)..(721): n is a, c, g, or t
  misc_feature (1097)..(1097): n is a, c, g, or t
  misc_feature (1107)..(1107): n is a, c, g, or t
  misc_feature (1271)..(1271): n is a, c, g, or t
  misc_feature (1390)..(1412): n is a, c, g, or t
  misc_feature (1457)..(1506): n is a, c, g, or t
ccccccgcgtgtttttccccgcgggggaaaaaatattttattacccacgggcgccaccaaaagtgtgggatgtgtctgcggcggaggaacatatagggttgtccacaaggcccgcgctttttgtggaggtgtgcccaccaaggcnnnnnnnnnnnnnnnttatagagaaaatttctcccaccccttgtttctgaaaaatatatgaccgcgannnnnnnnnnaaaagtttttgtgggttatgagtgccgcggggggaaacccgcctgtgtgagaggggcccaaaaaggggccccccgggggaaccccccttctggggggttgtttattaaacgccctggtggtgtnnnnnnnnnnnnnnnnnnnnnnnnnnnnnnnnnnnnnnnnnnnnnnnnnnnnnnnnnnnnnnnnnnnnnnnngaaaacccaattggccacctttgtcctttcctcccttgggggggcgccccgccccaaaagaggggggtgggaagacgttttnnnnnnnnnnnnnnnnncccaccacccggcnnnnnnnnnnnnnnnnnnnnnnnnnnnnnnnnnnnnnnnnnnnnnnnnnnnnnnnnnnnnnnnnnnnnnnnnnnnnnnnnnnnnnnnnnnnnnnnnnnnnnnnnnnnnnnnnnnnnnnnnnnnnnnnnnnnnnnnnnnnnnnnnnnnnnnnnnnnnnnnnnnnnnnnnnnnnnnnnngagtgttaactattccntttattaggtggtgaggggagtggggggctgtacaatgcagggcttgggaattcagctacacagggattttgaccagaagccatattacaaaaatagcctaaaaatacctctattctgccataaggctgggccagaggattaccaggaagagaaagtaccactcaggcagctcctcttcttgtagtcccacatttacagggacataaaggaatgcatacatctgccctggcgtcccatttcccaccagcagccccctagttcccaaaggaagaatggccaaagggtagggctggggcagagggagttggcagtgggcccttccccagcaaggctaagggaacatgtccaatctggaatgcagtgaagtgagcgacngtggggtgcnggaggaggctcccaacactccccagacccctggccccagtgggtgcgcccaagggtgcctacttggtacatacctgggtcgtgtactccggtacacgggatcccagtcatgcctgtgtactaggtacacagaatcccagccttggccgaatgggccccacagancttacacccacgggggcactggggggttcacagggggagggagcatctccatatatatattttgtaaaaaataataataataagtttgtttaaatgaatttgtttctatacaaaatgtnnnnnnnnnnnnnnnnnnnnnnntaataataattcattcatgtcagagtgtaaggaaatgagaggccnnnnnnnnnnnnnnnnnnnnnnnnnnnnnnnnnnnnnnnnnnnnnnnnnntcccagactcttcacaagactgagagggtgggtggtagccc

SEQ ID NO: 263418 - DNA, 692 bp, Homo Sapiens
cgggggaaagtgtctgttcttgtcttttgttcacttttcaaaggggctgtttatttttcatattctgagactccagcaggatgtcttatcaacagcagcagtgcaagcagccctgccagccacctcctgtgtgccccacgccaaagtgcccatagccatgtccacccccgaagtgccctgagccctgcccaccaccaaagtgtccacagccctgcccacctcagcactgccagcaaaaatgtcctcctgtgacaccttccccaccctgccagccaaagtgtccacccaagagcaagtaacagcttcagaattcatcaggagcatgaaaggataaggataattggctcaccttgttccacagcttcacctgcatcttctcatcaaagcctaccatggatacacagttagcttctttcctcttagccagtgatctgcccatgatgatccctgatagcaaaaggtttcctttctgaggctgccatattgccactgtccaggtggagactgagaaaggaagtcctcagcagtgccagttcccagagctttggaagaaggaccagcagctctgtccctgggaaccatcaaaaaatgctgttgatgttttctgtgtctgtctgtcacctgggcatgggcttctaacacctgtgcaattgtcacttttctttcactccctgaataaagaatctatgcat

SEQ ID NO: 263419 - DNA, 503 bp, Homo Sapiens
gggcatattctagaagcaccttcaattccatcgaggatttttgagcagctgaagaagaaagttctgaaaatatgagtgacaggactccagcacattttttttagttgtttcttacattatctttgttaacccatccgcttttgtgtataatattaagttattttccactactgcaatggctagtaatttacttaggctcagagttttactctgtatggacagagaaataggaggtaacaacagtgggagaacaaataggaacagttcactgggatgttggtccccagaaattggctttcattgaataattcctaaagggtgtcgtgtgctgaattgctttttcatagtgatgtgctgcttcttgttcatactcttatgactttaatttcacctttatctactcccagcctctgtatatgcctacgtttttaaaaataatttttggcactgaagatctgattaccatattttttcagtttaaaaattaaatcctcgcaaataga

SEQ ID NO: 263420 - DNA, 547 bp, Homo Sapiens
  misc_feature (534)..(534): n is a, c, g, or t
tagttagttaaaaaatttaattgtaaggatcaagcagtggttattggtgaaaccaatacacactgacagctttgaagtgttcagatgctaattttaaaataaatgtgacaaataccaatcagatgttcataacacttttcaggatccacatcaacttgattatggacatagttcaatacacaagggtaagagaaagagtgtgtaatcaccaataattaaaccagaggcataattttttcaaataatttttaggttacagaattaaattctaactttttaaagtctaaagctacataaaactcaaagcaatctatttttctacctgaggtcaaaatgactttcctttttcctaactaaacataattcttagcattgaggtaaatctgaattcatgtggtatgctttgtcaaacttttccaaaaaattttaagccctgctttagagagaaattctcatgttacacatatatatttacatattttttcttcaaagactaatgacaatgtatggatgttaataggcctggtaatgggnaccatggatacta

SEQ ID NO: 263421 - DNA, 1200 bp, Homo Sapiens
  misc_feature (241)..(280): n is a, c, g, or t
  misc_feature (647)..(659): n is a, c, g, or t
cttctcttgagtgccaaaaaaataaatataaaatttattaaaacacccacaatattttaaagataccaggagtaatacagttcacaaacccagttgtttgtgtaaattataataaaatacaaatcaaaaaggatacatacttgcaatttctaggcaccctaaattaaatttactgaaacactgagggagaagggagggtaaggaggggtagctcaggaggcaaaccaataaagtggaaggnnnnnnnnnnnnnnnnnnnnnnnnnnnnnnnnnnnnnnnnattatcagcataaatttactgtactaagaatatctacagtttaatacacatcctattgccttgagacattgcaaaaatctaccattcatccatcaacccccagataaacttcatttcaagtagccacagtttacaaagtcaagacggaatattcaagtatggttgttaagttcacctccattggaagccaagtaaccaaccaggaattcaaagagataagaaataaaacacatcaaaaagctacaggggttctagattaagtctaatgtattaatatgccattatacgacctgcccttgtttctttaattggaatacatgaaaaagaaatgacatcactcctgtttttctcccctcttttcccctcnnnnnnnnnnnnngggtattgaaaccaagaaaatttggaatgttcacatgagccaattagtttcttaatttaaatccccgtgtgaagagtgatgagttacccctgaatgacgggtagtcaaaacgcgaagagggagcaaacaataccactacaaaaagcatccctgatatcagaatagaagccaatgaggaagtaggccaaatcgctcgctgattcttaggcaaaaagcaactttagaccttgcatttctgtgctgcggtctctgctcaggggagaagcctattgctctgctcttgcctgcagctctgcaggaggaagggctgggagcaccagagggggccgcccctccccccgcactcgcggagtgcactcgcactctgtgcacctggatgtgggactgtgtaacttatgttgggggtatgcacctcaaaaatgttttggtccagggtatgttgaagttggccatgtactacagcagaggcagctggctaataaaactaggttttgagggagtcatttcaaatgacagcaacaatgactgagaaagctcaatg

SEQ ID NO: 263422 - DNA, 198 bp, Homo Sapiens; identical to SEQ ID NO: 178285

SEQ ID NO: 263423 - DNA, 866 bp, Homo Sapiens
  misc_feature (558)..(558): n is a, c, g, or t
  misc_feature (563)..(564): n is a, c, g, or t
  misc_feature (575)..(575): n is a, c, g, or t
gcaggctggtcggtccggaatcctcgggatatcgtcgacccacgcgtccggcagaataggagcaagccagcactagtcagctaactaagtgactcaaccaaggccttttttccttgttatctttgcagatacttcattttcttagcgtttctggagattacaacatcctgcggttccgtttctgggaactttactgatttatctcccccctcacacaaataagcattgattcctgcatttctgaagatctcaagatctggactactgttgaaaaaatttccagtgaggctcacttatgtctgtaaagatgggaaaaaaatacaagaacattgttctactaaaaggattagaggtcatcaatgattatcattttagaatggttaagtccttactgagcaacgatttaaaacttaatttaaaaatgagagaagagtatgacaaaattcagattgctgacttgatggaagaaaagttccgaggtgatgctggtttgggcaaactaataaaaattttcgaagatataccaacgcttgaagacctggctgaaactcttaaaanagaannagttaaagtanaaggaccagccctatcaagaaagaagaagaaggaagtggatgctacttcacctgcacccctcacaagcagcactgtcaaaaactgaagagcagaagcaactcctggagcttagaaaagaaaaaatcacccaaagaaaggctggaccaaaggggattaaggtgtccgaagaacagactcagccctccctcttctgcaagagcccggatggtcccagccatgggcccgttccccatctcccaagacctcattgtcagcctccacccaacaggttcttccactgaaaaaccccg

SEQ ID NO: 263424 - DNA, 806 bp, Homo Sapiens; identical to SEQ ID NO: 15426

SEQ ID NO: 263425 - DNA, 808 bp, Homo Sapiens
  misc_feature (96)..(135): n is a, c, g, or t
gggtgggccaccacatccagctaatttttttaatttttagtagagacaaggtctcgctatgttgcccaggctggtatcaaacccctgagctcaagnnnnnnnnnnnnnnnnnnnnnnnnnnnnnnnnnnnnnnnnagcatgagccactgtgacttgcccagatcacatttctactaccctatagaatggatgtaaattacctgcttgtgccaaacattaactcactagacttcacactgctggagaaaatgtttacattttatttgacatcttcagagacttcttttcaatctaagaataccatgctcagagtaaactaacaactgatgcactttgctgcagagtccaaaggatatacacggaggcttcaagatgtcagagggaaagcctagttgataaggtgttggacttcacacaccaaacttaatagaaactgcaggttcaaatcccagcagggtcaactgagagtattacgatctgctagaaaaactgagcgtgagacactttactgctctttgacaaatttaagagggccttccagactgtctctggagtttatgaggagacataaaaggggaaaaagctttgcgtttaaataaatatactgtcttttagttctgtttaatggggagaaaaatcacatctctgtaacatgctgtgtatataacaaagaaacagaactatcaccttccagatacccaaatgagatccttacagtaagtttaccatcagcatacagtattacagatttctaacattccgttcttgcccaatgcaaatctatatacaataaacctaaaattacccc

SEQ ID NO: 263426 - DNA, 294 bp, Homo Sapiens; identical to SEQ ID NO: 13268

SEQ ID NO: 263427 - DNA, 848 bp, Homo Sapiens
atcatcgcgcccccggaccaggtcatcgcgctgaccttcgagaagtttgacctggagccggacacctactgccgctatgactcggtcagcgtgttcaacggagccgtgagcgacgactcccggagctggggaagttctgcggcgacgaatcccgggctccatctcctccgaaggaatgaactcctcgtccagttcgtctcagatctcagtgtcaccgctgatggcttctcagcctcctacaagaccctgccgcggggcactgccaaagaagggcaagggccgcgccccaaacggggaactgagcctaaagtcaagctgccccccaagtcccaacctccggagaaaacagaggaatctccttcagcccctgatgcacccacctgcccaaagcagtgccgccggacaggcaccttgcagagcaacttctgtgccagcagccttgtggtgactgcgacagtgaagtccatggttcgggagccaggggagggccttgccgtgactgtcagtcttattggtgcttataaaactggaggactggacctgccttctccacccactggtgcctccctgaagttttacgtgccttgcaagcagtgcccccccatgaagaaaggagtcagttatctgctgatgggccaggtagaagagaacagaggccccgtccttcctccagagagctttgtggttctccaccggcccaaccaggaccagatcctcaccaacctaagcaagaggaagtgcccctctcaacctgtgcgggctgctgcgtcccaggactgagacgcagccagccccggcccctagcctcaggccttctttcttatccaaataaatgtttcttaatcagg

SEQ ID NO: 263428 - DNA, 849 bp, Homo Sapiens
  misc_feature (279)..(279): n is a, c, g, or t
  misc_feature (548)..(548): n is a, c, g, or t
  misc_feature (736)..(782): n is a, c, g, or t
cagcctcatcctgaggaaaggagagaccactgcaggcctgggaagtccttcccagccatccagcccccaatcccccagccccactggccttccaacacagacacctggcttccccacccaacccccatgcacttccagtccaccctccagccagcccctcacatgaccctaggaccagcagtctgagagggtaggtaccagaagacccagaaactcttatcgtgggcactgttgcagcttcctctgccctggctgggaaagactccagaatccagtgtnggtgctgtgggaaggagcactggactaaaggcttcagtcggctgcgtgtcccaggacaggtcatgggcccctctctggggccagccatttatctataccatgaggtaactgaagtaaggagagcagtgaatgtcaaactgtgtttcttagagccataagccccacatattatccctgaacaagggcagctcctgctttatatatttgatacgtaggggttccatgagagattttgggttttaaaggaatggttttactgcattaaaganaaaaaaatgctttggaaaccaggaggcctggggtgatgttaaagtctatcctgtcccacttcctacattctgggactaccgtgaagcctggagtagggagagcgagtttggggaactgggactccggggagtcaaaaagtagatgaagtaattgtcaataaacctgggaaccaaaagactaccattcnnnnnnnnnnnnnnnnnnnnnnnnnnnnnnnnnnnnnnnnnnnnnnngtctggggatatagcatgaacaaaacaaacagggcccctgctcttatgaatcctccgttgtggaggg

SEQ ID NO: 263429 - DNA, 522 bp, Homo Sapiens
  misc_feature (183)..(183): n is a, c, g, or t
  misc_feature (287)..(399): n is a, c, g, or t
  misc_feature (419)..(421): n is a, c, g, or t
agctttgttctaagaatatttgttcgatctagtttatgagtccaaatgatatagactgtaaatgtcacagcagtggtgaaagactgctcggtcatgagcaccgacagtaactcactggcacgtgaatttctgaccgatgtcaaccggctttgcaatgccagtggtccagagggtggaggccangggaggaagaagaggaggagacgcacatggcaacccttggacagtaccttgtccatggtcgaggctttctattacttaccaagctaaattctataattgatcannnnnnnnnnnnnnnnnnnnnnnnnnnnnnnnnnnnnnnnnnnnnnnnnnnnnnnnnnnnnnnnnnnnnnnnnnnnnnnnnnnnnnnnnnnnnnnnnnnnnnnnnnnnnnnnnccaagtttatgtatttttannnttctttttcatgaatgtgatttgttaaatgagtgattaaatataatttttatatatttgtatgacttttctgtaaataaaatttaaaatcagaaaaaagcc

SEQ ID NO: 263430 - DNA, 527 bp, Homo Sapiens
  misc_feature (11)..(11): n is a, c, g, or t
  misc_feature (188)..(188): n is a, c, g, or t
  misc_feature (205)..(205): n is a, c, g, or t
  misc_feature (327)..(327): n is a, c, g, or t
  misc_feature (343)..(343): n is a, c, g, or t
  misc_feature (360)..(360): n is a, c, g, or t
  misc_feature (367)..(367): n is a, c, g, or t
  misc_feature (376)..(376): n is a, c, g, or t
  misc_feature (405)..(405): n is a, c, g, or t
  misc_feature (449)..(449): n is a, c, g, or t
  misc_feature (458)..(458): n is a, c, g, or t
  misc_feature (481)..(481): n is a, c, g, or t
gctggcgaccnagctgccactaaaccaggtgaagctttgttctaagaatatttgtttcatctagtttatgagtccaaatgatatagactgtaaatgtcacagcagtggtgaaagactgctcggtcatgagcaccgacagtaactcactggcacgtgaatttctgacccgatgtcaacccgggcttttnaatgcagtggtccaganggtggaggccagggaggaagaagaggaggagacgcacatggcaacccttggacagtaccttgtccaatggtcgaggctttctattacttaccaagctaaattctactaattgatcagtaganatgggttttcacccgngttgaccagctgatccntaaactnctggacctnaagcagtctacccccgttgggctcccaangtgctggggattacaggtgtgagccactgcacccagccaagttnatgtatttntattctttttcatgaatgtgatntgttaaatgagtgattaaatataatttttatatacttgtatgactt

SEQ ID NO: 263431 - DNA, 911 bp, Homo Sapiens
ggggggcgggggctgctgttttattggggaggggagcatcctaaaaatggggcccaggcagacccctcccagaccctcacactgcccgaggaggcctttcccaaagggcgtcctcccgggatgcagacggcaggcgtgtgggaagcgccgtttaaatacacagcacgacgtatccttgtaccgacttctcccggttcttgtttgaaaatactgtagttcaggctcttgatctagatggcagataggaactttcttgtcacaaaaatactggaggaaaatgttgtaaaaatacacttttggacacacagctgttggggctgcactgacctgcaatttttaacatggatttataacttaatgtttctgtttataaaatactaatgatttgcaatgtacccttactggccaattaaaacagatgttctattccgagatggtacagtggacaaaaaaaatagacatgtcgcgtcgccctcggccctccaaaacgcttttctaaaacaattccttttggcgcccgcgtccccattaggccaacggcacattggcccataagctgtgttccctaaagaaaaatcctggcccatggaattaagcggtttgggatctccccccttataaacaaaccgccccgccggccaaacccgagcgctccctgaacctaatccccaaaaggggagcttcctggagggccattcaacgtggaatctatatccaccgggacaccccaaacccgcaggtttcgcaaacataagatttacccaccgccgtgcctttggccaccttcattccgcgaggaaagtgtttggtccaatttcccttacaggccctctcttggacctgaacctggtgaaagcccactctcaaaataagcgggacttgctaggcaacacaccgtcaaaatccttgac

SEQ ID NO: 263432 - DNA, 1036 bp, Homo Sapiens
  misc_feature (999)..(999): n is a, c, g, or t
  misc_feature (1010)..(1010): n is a, c, g, or t
  misc_feature (1022)..(1022): n is a, c, g, or t
gggactggacagggcagctgctgggttgctactctcgcctccgccatgattccgcccgcagactctttgctcaagtacgacaccccagtgctggtgagccggaacacggagaaacggagccccaaggctcggctactgaaagtcagcccccagcagcctggaccttcaggttcagccccacagccacccaagaccaagctcccctcaactccctgtgtcccagatcctacaaagcaggcagaagaaatcttgaatgccatactacccccaagggagtgggtggaagacacgcagctatggatccagcaggtgtccagcacccctagcaccaggatggacgtggtgcacctccaggagcagttagacttaaagctgcagcagcggcaggccagggaaacaggcatctgccctgtccgcagggaactctactcacagtgttttgatgagttgatccgggaggtcaccatcaactgtgcggagagggggctgctgctgctgcgagtccgggacgagatccgcatgaccatcgctgcctaccagaccctgtacgagagcagcgtggcgtttggcatgaggaaggcactgcaggctgagcaggggaagtcagacatggagaggaaaatcgcagaattggagacggaaaagagagacctggagaggcaagtgaacgagcagaaggcaaaatgtgaagccactgagaagcgggagagcgagaggcggcaggtggaggagaagaagcacaatgaggagattcagttcctgaagcgaacaaatcagcagctgaaggcccaactggaaggcattattgcaccaaagaagtgataatttccacatgattaatttccaacaagacacttgggagttatttactgtgttcctctggcagccaataaaatcatcataagccctttgttaattaaaaagctagtttcctggagtgaacaagccattaacctccccttaaacaccacctagggtatttttttaggagtcacattntttattccatngttcattcaggncaccttaaggtttt

SEQ ID NO: 263433 - DNA, 836 bp, Homo Sapiens; identical to SEQ ID NO: 13308

SEQ ID NO: 263434 - DNA, 1479 bp, Homo Sapiens
  misc_feature (203)..(203): n is a, c, g, or t
  misc_feature (261)..(261): n is a, c, g, or t
  misc_feature (283)..(305): n is a, c, g, or t
  misc_feature (460)..(468): n is a, c, g, or t
  misc_feature (477)..(477): n is a, c, g, or t
  misc_feature (522)..(539): n is a, c, g, or t
  misc_feature (578)..(663): n is a, c, g, or t
  misc_feature (834)..(893): n is a, c, g, or t
  misc_feature (1038)..(1046): n is a, c, g, or t
  misc_feature (1344)..(1344): n is a, c, g, or t
  misc_feature (1438)..(1438): n is a, c, g, or t
  misc_feature (1442)..(1442): n is a, c, g, or t
gaataaataggatcagggggcgtggagaataaaacaaacgggggcgtgcgcgcggacatatttaatgtgggggtagagagcggtgagcggtaaaaagagggaggcgaatggtggggggcacatattcgcgggcaggtgtatttgtattttgtataggctagaaacggggagaaataaagggggtggcggataagtggaggganaggtgggatattgtcagttagtctcactaaaccgggtggggcggggggtgttgatatncgatattatgctccgtggactnnnnnnnnnnnnnnnnnnnnnnncgagggattataatatagcaggatcggtatacaagcggcacagacagggggtgcggagagatataggggatagagaggcggcgtggcgcgcaccgccgacaggggaggtgttgtagtggaaaaggtgaagcgcgagagcgaggggggcgctgatnnnnnnnnnggtgtgaanacgggcgagcggcaatatatataagcggcggtaaataatagggcnnnnnnnnnnnnnnnnnnagagaatggcggggcgtataagggaaataagaaatagannnnnnnnnnnnnnnnnnnnnnnnnnnnnnnnnnnnnnnnnnnnnnnnnnnnnnnnnnnnnnnnnnnnnnnnnnnnnnnnnnnnnnaagtaaggcagaggaagtgaaaaatgggtgcccgattggggtggggagggatggtttaaaagatcccagacgtgggctagaaggcgtgtaagaaaaaagggggggaaatagacgtggtgtgaatcagagaagggatatgaaggggagtgaaaacggggtagccgtggagannnnnnnnnnnnnnnnnnnnnnnnnnnnnnnnnnnnnnnnnnnnnnnnnnnnnnnnnnnnacgacagtggaggagggcacgacacgtttgcgggcttgtagtggtcgttgttgttttttgggtaatattgaaaaaatacaattaaatttttattaaaaatacatactccttacgcgatctttgtgtacattttgtgtgaaaaggnnnnnnnnntaggaaaggcattaagactacctaattatttatactgtatttggtagaagcgtgtttcagtcaaactttaacgaaaaataagttattctgttttcatttgctcccggacgtcagaaggcagagtttcaaacagagcatcttctacaactaaaccagctcgcttcagagcccgacagtcacccagttcaggagggaggatttcaaagtgattaccttttacatctaagtaggaaagaaatagcaaatttccaattttcggtgaaagtacagataggctgttttttccaatcttcagagntttaagtttcttgcagaagtagagttcatctggaaggctttccactttgttacatgtgatggaaaaatactgtaaactttgtagaactccaatntcangggggataaatcgaatgtcattgtacgataagtccaa

SEQ ID NO: 263435 - DNA, 506 bp, Homo Sapiens
  misc_feature (16)..(16): n is a, c, g, or t
tgccccacccataaangtaaccccccaccggggggattaaaaaataggtttatggaattggaaaatttgccccgccgccatgttggtatggatccaaataggttccatccaaaatggaatcctttgccccttttggacctgaattccttacccatactgcccattaaaataaatttgcccaacctagtaatgccatacctggaaatcaaaagatactgaaagaatggtgaacttctcttagtggtattgtcatgctaaaagatgttaatatacatcataaaagcaaagtcagccagctgatattttggttctcaaaaactgcattattaataatattttagtatacagagctattctacagtttttacattgtaaacatgactgtggttttgtatttgctaaatataggggttggactaaaatataataaatctgtaccttatcaaacattttctttgagctcctgctaaaaataggacatgtctatgattgttcaaaaatatgtt

SEQ ID NO: 263436 - DNA, 602 bp, Homo Sapiens
  misc_feature (24)..(24): n is a, c, g, or t
  misc_feature (49)..(49): n is a, c, g, or t
  misc_feature (349)..(358): n is a, c, g, or t
gcaaccccctgccatgtggccccnccagggggaatgtgtaagaatggtnccatagttaccatatttataatagttaataacctggaaaaagtgaaatgtatgtcctgtcctacaggaaaataggtgaataattagatatatatattcattcctacgggatattattcagtagtggaaatgagtgaactacagctatacctcacaataagaatgaatctcagaaaatattaaggaaaaaagcaagtttgaagagaccacatggggcgtactatttttattgagcccaaaaacaagcaaaaccaaagaatatgtagtctaagcatacgtatacaataaaactatgctattnnnnnnnnnngaaggtaactgataaaccaaaattgagcatagtaattacccacagaaggaggaagtggaagggacaggagcacataggtagatgccaagttatgcagctgttctggttcctcctggtaggcttacaagtgtttactatatgctattaatacattatactttataactaatagataacagttttttacatattaaatatgttctacttaaatatattataaaaaataaaggcaaagtggaatgat

SEQ ID NO: 263437 - DNA, 589 bp, Homo Sapiens
ggggccgcgcccaatagccggacggggatctgagctggcaggatgaatgtgggggtggcacacagcgaagtaaaccccaacacccgagtgatgaatagccgaggcatctggctggcctacatcatcttggtaggattgctgcatatggttctactcagcatccccttcttcagcattcctgttgtctggaccctgaccaacgtcatccataacctggctacgtatgtcttccttcatacggtgaaagggacaccctttgagactcctgaccaaggaaaggctcggctactgacacactgggagcaaatggactatgggctccagtttacctcttcccgcaagttcctcagcatctctcctattgtgctctatctcctggccagcttctataccaagtatgatgctgcgcacttcctcatcaacacagcctcattgctaagtgtactgctgccgaagttgccccagttccatggggttcgtgtctttggcatcaacaaatactgagggatgggttttgggacagctccatgggcatggggaaggcactgaaacagaggactataaaacatccttctcttattctgcaaaa

SEQ ID NO: 263438 - DNA, 788 bp, Homo Sapiens
ggacatggctgcagtactgtaccttatcattctgatgaaactgatttggagcacccttttctttgtcgctacatttatttaggggacaaactccatccaggttgactctctctggaatgcggtaataagagctggcaagtaaggctcagagagaagcaaccaactggagttaattgcccatttgggctctttgtataattatggcaaagtagacatttatgttctaattaatatgattacagagaaggctttttctcaggtcaggcttttcatgaaagtattttgagaacaatgaattgcaataaccagcttcacacaagcataactgataaacgcgagtgctattgtagtcttggcaagtgagccaagaacctaggagcagggccattcctactgaaggacgggccccctacggagatgaaatttgtttcctggtgagcacagaatcagaacaaagaacaatatcccaaagaggccctgtgtctaccaggagcttctttttccaaatgtaatggattatgtggaattgtagtgccatcggtttttacttagagcccttgacgtgcttggaccaatatttccttccttcttatgaaccaggtttttccttctgattttcccttttcaacattccttaccagtcaccaaagtttcctgttataatttcttttagcagacaagttataagtcagatttaattagcatcagagttgattttatattagtcagattttggatcatcacagagatctccacaactccttggcttaaacagctccaccggtaaa

SEQ ID NO: 263439 - DNA, 864 bp, Homo Sapiens
  misc_feature (549)..(609): n is a, c, g, or t
  misc_feature (639)..(639): n is a, c, g, or t
  misc_feature (668)..(680): n is a, c, g, or t
  misc_feature (793)..(793): n is a, c, g, or t
gggccacggaacgttgtcaagaggtagtgagattgttgctgtgagcaaggctctgggagagtcacctcaggctcaggattctgaaccattgagatcagaaaccagatacttagccttctactgtagctacggaaccagattctggtgaatttgtccacaatcagccattggcctgtctggggagtttttggaagacagcaaagaggggcaatggctgctttcagctttgaggacagatgctatcctaagggcatggcagtacccatgttgatttgacatctctctagcccatccattgcttacagtagaagagtggggctgtatgcttgataatcttgaacattgaacttaatagatgacttgacaaggtagagatctgatattttgagattttggagaccatttcctgtgccagaatcactgctctattccataccgtgccatggaggctgttttagaagtggttggataacatgttaaataaaatattaagtgtaaaaaacaaaccccccatatcatcttttcttccgcccttcctccccaccttgnnnnnnnnnnnnnnnnnnnnnnnnnnnnnnnnnnnnnnnnnnnnnnnnnnnnnnnnnnnnngccctctcctgggtcgcgcggatttcactngacctatactttgctatttttttcggcgnnnnnnnnnnnnntcaaaaaaatcttttctaaaattttttttgtttgggagggggcggccccccctaccacaaaacaaaaacaaatgggtaaataatttttcttccccacaaagagacatccgcgngcccacaacaaaagagttgggttgtgttttctcctccgcccccaagaataacacaccccccggcggcgcga

SEQ ID NO: 263440 - DNA, 884 bp, Homo Sapiens; identical to SEQ ID NO: 13339

SEQ ID NO: 263441 - DNA, 519 bp, Homo Sapiens; identical to SEQ ID NO: 13340
  misc_feature (492)..(492): n is a, c, g, or t

SEQ ID NO: 263442 - DNA, 453 bp, Homo Sapiens
  misc_feature (24)..(24): n is a, c, g, or t
tgcgttaccttgcaagagcccggnttgccttgcttcgtgggcaccaaacatggacaaccggcttccgcttgagaacggccgcttcatcgcgggtaccgggtgtctggtccgagccgtggagatggccgcccagcgccaggccgacatcatcgggaagcccagccgcttcattttcgactgcgtgtcccaggaatacggcatcaaccccgagcgcaccgtcatggtgggagaccgcctggacacagacatcctcctaggcgccacctgtggcctgaagaccatcctgaccctcaccggagtctccactctaggggatgtgaagaataatcaggaaagtgactgcgtgtctaagaagaaaatggtccctgacttctatgttgacagcatagccgaccttttgcctgcccttcaaggttaaagattgagtgtctttaatctgcagaataaaaaaaa

SEQ ID NO: 263443 - DNA, 1324 bp, Homo Sapiens; identical to SEQ ID NO: 13345
  misc_feature (533)..(541): n is a, c, g, or t
  misc_feature (585)..(724): n is a, c, g, or t
  misc_feature (728)..(733): n is a, c, g, or t
  misc_feature (740)..(756): n is a, c, g, or t
  misc_feature (802)..(815): n is a, c, g, or t
  misc_feature (853)..(899): n is a, c, g, or t
  misc_feature (1065)..(1075): n is a, c, g, or t

SEQ ID NO: 263444 - DNA, 676 bp, Homo Sapiens
  misc_feature (124)..(139): n is a, c, g, or t
  misc_feature (150)..(150): n is a, c, g, or t
  misc_feature (153)..(270): n is a, c, g, or t
  misc_feature (276)..(291): n is a, c, g, or t
ggggaggaaacccagccgcggggggtgtggcccgagttttgtttttggagaggtcattggggcggtgggcttttggcttgggggccgccgcggcgaaaaagggagtttttaaaaaggttttttnnnnnnnnnnnnnnnncgtttgaaagngtnnnnnnnnnnnnnnnnnnnnnnnnnnnnnnnnnnnnnnnnnnnnnnnnnnnnnnnnnnnnnnnnnnnnnnnnnnnnnnnnnnnnnnnnnnnnnnnnnnnnnnnnnnnnnnnnnnnnnntgttgnnnnnnnnnnnnnnnngaaagttcaaaaaaaatatttatttataaaaaatacaatgggataagtttatgctgagaaatgcagcaataaatacagttgaagaaaacagagcaactctacattgatacattggcacaaacaggaagagcaaatgcatcacccaggcctaaatgtccacaggccacttttgtacatgctcttttagaaacaccactctgaaaagatcttgttcgctaggtaagagaatgagtacacatataatcacaaatgcacactgatcatgactttatttaaaaattagcaaacaatactgtagaaacattgatatgtaaatttctaaaatgctgcatcttaaatttagttggcaaagaccacatttagcaataagcatgagtttagtccc

SEQ ID NO: 263445 - DNA, 543 bp, Homo Sapiens
ccagctgaggcctcagactagccaggcaagagccgtctgaccagttggctggcggtggttctggtggagcacgagggagcccgggtggtgccctgagcctcgagctgctctctgtcactgtcttgaatcagactcagaaatggcttcttcccagccctgcctacaagtttttctctggggtcctctttcaaggatgtccacggtacctccctcatgaaacttgaggaagtcttttgtcttccagctgctcagggttctctggtccaagaccctgctttaaagagagtctttggcgtgctcagactccagcgctccgttcttcaaggaggttgacttgcctctcgggccccgtaggtaccaagagactgtttacctcccagaatgtttgggcttgaagttacattaaagtgaagttatttgaaagaaagagaacctcatcatttctaaggatgacttaattactgtgccttttcctttctttttacacatcctactgtcccttagggtaaaattttcagcattaaataaaacatttcaaatatt

SEQ ID NO: 263446 - DNA, 1013 bp, Homo Sapiens
  misc_feature (541)..(675): n is a, c, g, or t
  misc_feature (895)..(895): n is a, c, g, or t
  misc_feature (942)..(942): n is a, c, g, or t
ggtaccggtccggaatttcgggatatcgtcgacccacgcgttcgcaaatggagtgagagaacaagaaagcctctagaagccctctatgggtatgactacttgccagaacctgtgaaaagtgggtggatggcataagacagtttaaacatctcccagatggtaacatctgccggcacctgctgccccgggtccagtgccccgccttgattgtgcacggtgagaaggatcctctggtcccacggtttcatgccgacttcattcataagcacgtgaaaggctcacggctgcatttgatgccagaaggcaaacacaacctgcatttgcgttttgcagatgaattcaacaagttagcagaagacttcctacaatgagaatgcacactccagtcttggtggttccttcgtgtggggcttgatcgtgttgctgcctgttaacatgatgcctttgaaactctccgcctttgaaactttctacccctcccttcaatcttatcctaaccaaatgagaataatgacatattgaaaacagcctctagcttcannnnnnnnnnnnnnnnnnnnnnnnnnnnnnnnnnnnnnnnnnnnnnnnnnnnnnnnnnnnnnnnnnnnnnnnnnnnnnnnnnnnnnnnnnnnnnnnnnnnnnnnnnnnnnnnnnnnnnnnnnnnnnnnnnnnnnntttcaaaaatctacccaggcccgaagagggcaacaacatccggggggttccccaggatggcttccaggaaaagttgaaagtgggggcaaggaatcccccttggagcccccactttccaaagcctggccagctgcaacctgggaaattttggcaatccccttggcacccccgcaaccgtgggggcccacccagagaccaacgaacccttgggtcccttagntcaacaatagtaaatagagggcacaaccacccactcattcctctggntcgggccccccctcttacggacccattcgaaaaaaagcctttctccccaaaacacaatttctcactattgg

SEQ ID NO: 263447 - DNA, 1026 bp, Homo Sapiens
  misc_feature (581)..(581): n is a, c, g, or t
ggtcttacaaagctcctattcacatgaaccctatggttaattagaaagaacttgctgtctccagaaaagggaatggaaataataactatgtatcttcttttcatgtaatttggtcacagaataaggtattcaagttaagtctaatccaagtcttagagatctttaagtatcctaaaatagcagcctaagtagtcatcatgtaaagaagttgactttcaggaatgtcagcattgacctctccttgccactgttactcagctaaacataacttgccattcttaaaaataaaaaagctcccacccagaaactctagtgatactcagttttgacctcttactgcttccatgtgggacttcttttcagcttttaaccattggaattttctacctgctatgttcctctctggaaaatatcaatttggaaatgctgcctttcaaatcaatgccatgatcatccatattgttgagtttgttgttggtgttccagaagtgtccccattttacaactttatgcacacacctggcaaatcattaacatgagcattcaacagtactgggatgggtggggtgggggtagggggnctcaccaacagaactggccagttgacattgcctgaaaaggcaccacctttaagggccagttgtggggttggtaagcacagttatgaaaatttctatctagcctccgttttgaatggttttaagaaattttgtatatggaggatggaaatgcttatatatttattgaaaatccttttatttgaaattaaaattattttggtatataattgtttgatatttggggagggtttttggagggggagataatgtcactgataaataaaaagctgttgattttgcaaaaaagtactgctagtgactgataaggatgcctttgttttgtacctgaaccaaatccttggttttacctttccttaatccaaaatatttaggcatctgaacatttttcaccaggattttcattatataccggggatttttaatttggtgccaatactttacaatt

SEQ ID NO: 263448 - DNA, 627 bp, Homo Sapiens
  misc_feature (376)..(500): n is a, c, g, or t
  misc_feature (502)..(502): n is a, c, g, or t
  misc_feature (509)..(525): n is a, c, g, or t
  misc_feature (529)..(559): n is a, c, g, or t
  misc_feature (562)..(562): n is a, c, g, or t
  misc_feature (565)..(581): n is a, c, g, or t
gggggagagggctcacagagtctcctctgtacgtggccatggccagacaccccagtcccttcaccaccacctgctccccacgccaccaccatttgggtggctgtttttaaaaagtaaagttcttagaggatcataggtctggacactccatccttgccaaacctctacccaaaagtggccttaagcaccggaatgccaattaactagagaccctccagcccccaaggggaggatttgggcagaacctgaggttttgccatccacaatccctcctacagggcctggctcacaaaaagagtgcaacaaatgcttctattccatagctacggcattgctcagtaagttgaggtcaaaaataaaggaatcatacatctcnnnnnnnnnnnnnnnnnnnnnnnnnnnnnnnnnnnnnnnnnnnnnnnnnnnnnnnnnnnnnnnnnnnnnnnnnnnnnnnnnnnnnnnnnnnnnnnnnnnnnnnnnnnnnnnnnnnnnnnnnnnnnanaaaaaannnnnnnnnnnnnnnnntttnnnnnnnnnnnnnnnnnnnnnnnnnnnnnnntgnggnnnnnnnnnnnnnnnnnaaaaaatttttaaaaacctttttttggggcgcgggggcccccaaag

SEQ ID NO: 263449 - DNA, 807 bp, Homo Sapiens
  misc_feature (485)..(485): n is a, c, g, or t
  misc_feature (633)..(634): n is a, c, g, or t
  misc_feature (638)..(638): n is a, c, g, or t
  misc_feature (640)..(640): n is a, c, g, or t
  misc_feature (643)..(643): n is a, c, g, or t
  misc_feature (645)..(645): n is a, c, g, or t
  misc_feature (649)..(649): n is a, c, g, or t
  misc_feature (655)..(655): n is a, c, g, or t
  misc_feature (667)..(667): n is a, c, g, or t
  misc_feature (702)..(702): n is a, c, g, or t
  misc_feature (705)..(705): n is a, c, g, or t
gggtgtagctttggaaatctgtctttgttgctctgggagaggggactcctggaatgtgtctgtgaataaagactagccgaagatactgtggcctcatgaataggaatgtctgcccatatgtcaggattggaaataatggatgaagatcaattaatcaaagacgtcttggataaattccttaattgtcatgagcaaacatatgatgaagaatttctgaacacttttactcatctttcacaagatttgctgctgcttccaggagaagtggagcaggatgtaagcaccagcattccttcctgtatcccttttgtggcccagcctcctacctgtgaagtgaagccaaagcccagtgttaaaagaatggacaaacagacggaagagatacttggagatgaagttcaacttttttcacttgatgaagaatttgattatgacaatgtgatgctaacctccaagtttagtcctgcagagatagagaacatcanagagctatgcaagcagcagaagagaaaggacaccagcccagacttacaggaaccctgtgactgattcacagaggcatttttttgtgtgtttattttaattttgttcttattcaagtaacattagaataaaaaataatccaactataannaaananacnanaaanaccaanccacaccaaacnaatcaacagggggaaatgccgaaaggccccggagnccngacatgtcgggcccgcctcggccccttaaaaaacttttctaaacatttccttttggggcgggggccccattagggtaatggaaactggggcatagactgttt

SEQ ID NO: 263450 - DNA, 861 bp, Homo Sapiens
gggaaaagttctccaaagaagagctgaaaaaggcccaggatgttttggtgcaggagatggaagtggttaaacaaggaatgagccatggagagctctcaagtgaagcttataaccaggtgtgggaagaatgctacagtcaagttttatatcttcctgggcagagccgctacacacgggccaatctggctagtaaaaaggacagaattgaatcacttgaaaagaggctcgagataaacaggggtcacatgacgacagaagccaagagggctgcaaagatggaaaagaagatgaaaattttgcttgggggttaccagtctcgtgctatggggctcatgaaacagttgaatgacttatgggaccaaattgaacaggctcacttggagttacgcacttttgaagaactcaagaaacatgaagattctgctattccccggaggctagagtgtctaaaagaagacgttcagcgacaacaagaaagagaaaaggaacttcaacatagatatgctgatttgctgctggagaaagagactttaaagtcaaaattctgaagtaccgtttatattctgtcacaggattaattaattgccggttttcatactctaaaaggctgaaactgatgtttatcttcattgacaaatttacccaccatctgtgggtttttcagttgtttattttaaatgatatcgaacttacacattctgggtataaagacccttaactccacagggacggaaatttttaaagtttaaattattaaggctatcattcttttagtaatgtcatatttgcaaacttttttagttttggcctttaatttaaaaagcctaattttaaagtgctgcctgtgagtaactcttgaat

SEQ ID NO: 263451 - DNA, 732 bp, Homo Sapiens
gatttttggatcgatttgtataccgaaatccaaagccccataaaggcaaagaaaacacagatagtgttgtgatgcagccgaaaagaaaacattttattaaggatattcgtcatcttcctgtgaacagtaaggagttccttgcaaaagaagaaagccaaataccagtggatgaagtgtttttccacaggtattataaaaaagttgctgttaaagagaaacaaaaacgggatgcagatgaagaaagtatagaagacgtggatgatgaagaatttgaagagctgattgacacatttgaagatgataactgtttcagctctggaaaggatgatatggattttgctggaaacgtgaaaacagagaacaaaaggagctaaggataacacattagatgaagattcagaaggtagtgatgatgaacttggtaacctggatgacgatgaagtttctttaggaagtatggatgatgaagaatttgctgaagttgatgaagatggaggaacattcatggatgtgttagatgatgaaagtgagcagtgtaccagaacttgaagtccactccaaagtcagtactaagaaaagcaagagaaaaggtacagatgatttcgactttgctggctccatttcaagggccaagcaaaaaagaaaagaaacttacactgattccagcctatctgtatctgctgaagagtttggccatctattggatgacaatatgggatccaagttgaatac

SEQ ID NO: 263452 - DNA, 973 bp, Homo Sapiens
  misc_feature (733)..(733): n is a, c, g, or t
ggacagaccttgtggccacaggctcccacagctcctgtgtgcggctttggcagtgtggggaaaggcttccggcagcttgaccttctctgtgacatccccctggtgggttttatcaaaagcctcaagttctccagctctggggacttccctggtggctggggtagggcaggagcacaggcttggccgatggtggagaatcaaagaggctcggaattctgtctgcatcatcccactccgcagggtccctgtacccccagctgcctggttcctgacactcttaatcctccttaatttaagtgctttccccaggcttatgccgcaccctcctttgtatttaaaaatccttccttcttttgggccaatagaaagtgatagagttgtgttctttttaccctcttgtttgggctgccaacggaccgcacgcagtactcttttccagaaacttttcctgtgcgggtgccctagttccaatgtaggaaaagatgaaccatcggtcatgacgatgctcttcccatgtggaatacctctgttcctctagctagttactcttgaaacctggcccccgtctgagatccatacgccacggccgtgctcacctaagagagatccgagagacatcatccggttcacggccgattttttgtgcgccattctgcctcccctttcccttcgcgccttagacgcctccccggtactcctttgccctggcgtttgggattcgtatcttgcctgncacctatggctagtttgtactcggtacttccccctcctcattatatttccacacgcacatgccgactctttatcagcccatattgcttttccacctcccacccgcacctcttactatcacgttaacctcgggactacgcagcgctgtattacgtcacagcttatatcccgtccgccttccgcgcgactgtggtctcaaagtgttctctgtgcgacgcgttgtatgttatcggcgttgtcg

SEQ ID NO: 263453 - DNA, 636 bp, Homo Sapiens
gggataccagcaggcccttaagccttccaggacactaaggtcgtgggagcgggactgcaacaagcaatgccagataactgagaaatcatgttctttgtggactatttcagacaaccaggttccgacagtccagcccagaacttttccttctcattttgggttttctcttctcctgctttcctggggagagattaagcgctcattaagcagaggagcccactttgaggagagcaaagcacaagcttgcctgaagaatggatcccaacttctccccggcagctctgcctccctaagtctgtgaagccgcagccctgccctgtcctgtcctgtcctgacttcatctctccttctgcccaagtctgtgtcccatcagacttgcagcctttcagcttaacagttgcccggtcctgctggccccttttcctctggcccccctcttctgaaacaggatgtgcacacatggcccatagccctaaggactactgccagaccacacagcccacacctggccctgttcacggctgttccacccacccctctttattctggagcatatcagggaaagaaaagttgatgatagattgccttcaccctcacagcgcacaaataaagctacgatgccaactttgcagatgc

SEQ ID NO: 263454 - DNA, 648 bp, Homo Sapiens
  misc_feature (35)..(35): n is a, c, g, or t
  misc_feature (73)..(73): n is a, c, g, or t
  misc_feature (374)..(498): n is a, c, g, or t
  misc_feature (500)..(501): n is a, c, g, or t
  misc_feature (507)..(507): n is a, c, g, or t
  misc_feature (509)..(509): n is a, c, g, or t
  misc_feature (521)..(534): n is a, c, g, or t
  misc_feature (542)..(560): n is a, c, g, or t
aaagttgtgtatgatggtgaacctttgggaatagntccttatcaacttaattggatacttttagcaaataggnacttaattctcagcactgaacatgaattacttccttggagtttttttcaatcatatttttgttgtttcccaggaatttatttgatattaatgggcgtaaaacagcatcattgtacttaagctatggatgtttttattttatattttctttatttataactgtgccaagtattattttgctacttaccgtgttattctgtggaaagaaaaacctgtaaagtgtttaataaattagccctccttacataaattaaatgtcaaaattttgtaaaatattaatcagaataaatactgactcttannnnnnnnnnnnnnnnnnnnnnnnnnnnnnnnnnnnnnnnnnnnnnnnnnnnnnnnnnnnnnnnnnnnnnnnnnnnnnnnnnnnnnnnnnnnnnnnnnnnnnnnnnnnnnnnnnnnnnnnnnnnnannaaaaananaaaatttggggnnnnnnnnnnnnnnacaaaaannnnnnnnnnnnnnnnnnngggcgggggggccccaaaggaaaggaaaaagggccaaacgtttttcccaaaaaaaccccggccaaaacaaaggggttggatccccccc

SEQ ID NO: 263455 - DNA, 1312 bp, Homo Sapiens
  misc_feature (22)..(22): n is a, c, g, or t
  misc_feature (33)..(33): n is a, c, g, or t
  misc_feature (855)..(886): n is a, c, g, or t
  misc_feature (1172)..(1172): n is a, c, g, or t
tatcgaaagacgtcttaaaganaatgcaaagangaaatgatgacaaatccatatctgatgcacgggctcgtttccttgagagaaagcagcagaggacccaggaccacagtgacacacgaaaggaaacgggcctaaggtggtgaacccctcccaattcaggaagtgggaaaaggagccccgggaaatgtgccttcctactttgcccagttatttcagaccagcacctacccaagaggaggtggtcagcacttgttattggcctatgaactaaaagcaaatcaaagctcataaatcaaagctcatcagttcccataaatgcagttgtcaaagaaaagatttggttgccatagtcataagcaatgatacatgaaaccaatgaaagacagtacatgtaataatattttcctcagtacaattttgctggccttaactggtatcaaacgctgtcattgagatgttttcaaagaacattgagttgtatttaatcagcgtgtactccatttgcattgaagcattaaaaattatttttcttaaaatctctttaaggccttcttgttgctgttagaatagtgctatatatcaggtatgtgaccatttatttcagaaggctgaacataagaggtttctactcagcaatacttagatgtctaactgtttaattgctacagagctttatagatatttagagaaaagacttaatcaattagtaaataaaattgcctatggcaggattctttcttgaattaatattaatcccttaattgattttttctgggattatacaaattccctttttatataaaagtatattggtttaaaacagtagctatagcccataacccaaaggaccgatgnnnnnnnnnnnnnnnnnnnnnnnnnnnnnnnnagttcttttttagctggacctacgtacttatatcagcaccatgtatgtaggggtgatagtactttcaaacagcgcctccacctggcctactctgttatttccacctgtttgggtagggccatttaacttccattatgcccaaacttgggatgggattttcgaagcagacaacactatttcatcgtgtttcaaattggaaccttgaggctagttagtatcacactcaggccacactcagcacttgcccactcttgtttactgccttgtaatctagttatttgtgtanttgtctccctcactagattatacgctccttgtgggcagggactgtgtcttttttcatctttgtatctttcatgcacctagcaataggctttgcacatagtagtcactcagtgtttgttaaataaagctattagtgtcatt

SEQ ID NO: 263456 - DNA, 434 bp, Homo Sapiens
  misc_feature (18)..(18): n is a, c, g, or t
  misc_feature (26)..(26): n is a, c, g, or t
  misc_feature (102)..(102): n is a, c, g, or t
  misc_feature (247)..(247): n is a, c, g, or t
ttttaaccaaggtggccnggaggtgnacctgtttatgcctttgagagtgttccgaatttaaaatcaggaaaatcatgtcaggtgagtgagtcctttcaaatnaatccttcgggcatgaaacctgagccctagtaaactatgaaagtaaactcgggcacattaccccgaaagtctcaatgtcatattttcaccccccatcaatattattgatgattgctcattttctaatgtgggaccttgaaatttncccaggtgattaaagaacctttttgtttttcagattcattgattccaggtaaatcagaggaacaagcaacatgaacagaaatatgtagaaaaagcttattatgcagaagcataattgttgtttcagaagtccagctatctggtgcactttaacaatagagaatatattaaactctttccaaaataaa

SEQ ID NO: 263457 - DNA, 630 bp, Homo Sapiens
  misc_feature (119)..(181): n is a, c, g, or t
  misc_feature (518)..(549): n is a, c, g, or t
  misc_feature (608)..(608): n is a, c, g, or t
ggaggagacaaagcaagcctcatcaggcccattgcttgctctgctctcccttgtacttaccagtgcttgacaatatacagttatttactagcttggttattgacttcctacccagcacnnnnnnnnnnnnnnnnnnnnnnnnnnnnnnnnnnnnnnnnnnnnnnnnnnnnnnnnnnnnnnnctattggcgggaagaataaatccggaagagcaggaccagtggacttgctacataatctgtagtcttgggagccgcacagggttggtgggtaccctcgaggcacaccagacttgcaggaaaaaggcatactccagaggaagctgaggcatgcctgctcgagagccagctgttccatgtgcaattttcctctgatagtttctggtcgctgttgccacggtgataatgactgggctatgtcattatctatccgccaacagtaagagaagctttgcagtcgagatattgtttagcagatggagtgttttctgttgaacactaagtactgccacaagttacnnnnnnnnnnnnnnnnnnnnnnnnnnnnnnnnacaatgttgctgggaggtgatctgttttatgcttttgaggagtgtttcgaatttaaaantcaggaaaattcatgttcagtt

SEQ ID NO: 263458 - DNA, 1272 bp, Homo Sapiens
  misc_feature (588)..(875): n is a, c, g, or t
aatattctagcgcgtggctcgttctcgctcgccaacagcggtggtgggcgcggcctgtctcttgcgcgggagtaatatcggggcggggagacagggggttgagtagatgttgatgtcagtatgttgccctcgcgtgatggtttctttcactcagaggaattattatggtatattagggtgggcacacacaaatgccctctgggtgtgtttcgttttccccacgggttttttacttatcggggcggtggatgcgttatatcgcgggcggggtgttttcttacagcgcccgatttttttcccggcgcgtagtggtacacagttttttatatcaccgcaacagttttgtgccagggggggtggggtggaatttccgcgtggggagggaattctctagagtttgacttcaccccccgccttctggtggagaggggtgtgtaaatgagggcgggcgagaaaaacctttatatagagtgtgaggccgggattggcgacttttcttggccagggggccgggctattaaattggtagaaaaaccccccccgggggaagtccctcgcggagagggtgcccggctaaccgcctcatgnnnnnnnnnnnnnnnnnnnnnnnnnnnnnnnnnnnnnnnnnnnnnnnnnnnnnnnnnnnnnnnnnnnnnnnnnnnnnnnnnnnnnnnnnnnnnnnnnnnnnnnnnnnnnnnnnnnnnnnnnnnnnnnnnnnnnnnnnnnnnnnnnnnnnnnnnnnnnnnnnnnnnnnnnnnnnnnnnnnnnnnnnnnnnnnnnnnnnnnnnnnnnnnnnnnnnnnnnnnnnnnnnnnnnnnnnnnnnnnnnnnnnnnnnnnnnnnnnnnnnnnnnnnnnnnnnnnnnnnnnnnnnnnnaaaacaaatatttttaattaaattctcaaacatgaaagtataaacgttaatatttgttgaaaaatatatacggcatttcccccgtgtgaacacaatggcttccggtaacactacccacttacaatgagatcttttaggcacttgggtgtagaatgtgcgagagggaaatgcaactttactttcctgctacctataggggcaaccacaattagatctcatgaaatattgttttcaacactgttagcattaacaccgacttaaaacatacggtgaccggacatataacctttaaagtcccagtatatttaaaacaggagaaatctggtaagttgttaggattctaaattccttttagtctgttcactgaggatattaaatttcagtagacagaaccccc

SEQ ID NO: 263459 - DNA, 771 bp, Homo Sapiens; identical to SEQ ID NO: 178312
  misc_feature (533)..(614): n is a, c, g, or t

SEQ ID NO: 263460 - DNA, 341 bp, Homo Sapiens
ggtaaagaattaagttttaaataacattacattttacaatctgacatctggagtatattgaacataggctatttcttgatataacactcatttaattgtggccatccaaatgaatattattgcagaatttatcttgttcataatgatttgtaaatggtgttatagctgaatacctgtgcatgaaaatgggcaatattttcatctgtttacttgtagtgccatagaggccaatatgcacaatattaactaatgccaagacatggctgtttaaaaaatttaatgttcaaacagttatcactgatgcttttgcactatttattaataaaatcatatattgtgta

SEQ ID NO: 263461 - DNA, 731 bp, Homo Sapiens
  misc_feature (347)..(359): n is a, c, g, or t
  misc_feature (487)..(503): n is a, c, g, or t
atatgacacaaggagcaaggcagcaagcgcgtgttaatccttgcctgtaccccgcccggaacacataccttactatagcatgattacgggagcgggcggaccgtacatctgtcgtatattgagatgccgaggcagcggaaacccctctagtggaaacaggggcccgtggctgggctatggcaggacggaggaggcatgagagctcggacggaagacagcttgagggttggcagccggggggggttatttgaggtggggggaatgccccaagcggggtagttcataaacccaagagttgtctcttggttagacaggtaagaaccaatttcttaactgagcctggatannnnnnnnnnnnncccaaagcgataggttgttaaagaaggttctcgaggggatcgaaggcgcccgacaaagacggtcgggtgagggtcgttgtgaatattcgtggcaggaattttttcgtaggtgtggtcttatgggggannnnnnnnnnnnnnnnngttgtttccacacccagtttggtggagtcaccaacaaacttcaaacaaagatatgccaactatgttcactatacagtacagccacggtcacacactacccacagcgcggtggcagccgctgctcaatgaggagacgatcacaccatttcggagataagcagtgccattgtgtctggaggagaagagagaattaaaaataaaatagaattcaacaaaaaatatatatag

SEQ ID NO: 263462 - DNA, 1185 bp, Homo Sapiens
  misc_feature (87)..(87): n is a, c, g, or t
  misc_feature (97)..(97): n is a, c, g, or t
  misc_feature (112)..(112): n is a, c, g, or t
  misc_feature (156)..(156): n is a, c, g, or t
  misc_feature (184)..(184): n is a, c, g, or t
  misc_feature (451)..(543): n is a, c, g, or t
  misc_feature (714)..(723): n is a, c, g, or t
  misc_feature (889)..(901): n is a, c, g, or t
ggcccaataagccggggtgtctaaagggacagcttctcttcccactcaatattgcccattttttccaaagaaaccatgttaaaaaanaaaaattatnaggacatggactagncctcatttagcatgtttgcatagcaaccagtcaagagcatttanacttatttctgctgatatactcaccttngaactgctcagaaccctggtgctttatttttgttttaatcttttgttgcccagtgatgattttcctattctgcaaatagtgtatttcctggattacacatagtatggtttcctgaagtattctgataaatgtgttttttaaaacctcaatatactttttagaaaaggagcatctggttatgcataaagcagagctaaaactaaatttctttcatgtcctccctacttcctcagtgtcaatcagattaaagtgtgtaatcctaaaaannnnnnnnnnnnnnnnnnnnnnnnnnnnnnnnnnnnnnnnnnnnnnnnnnnnnnnnnnnnnnnnnnnnnnnnnnnnnnnnnnnnnnnnnnnnnaaccctgggcggcccccctcgggcctcttaaaaaaatttttcaaaaacctttccttttgggggccccggcccccccaaggggtaaaggggcccttgggccccaatcgtttctcccaagaaaaaaacctcgggctattggaacaacggcggttgggacttccccccccaatnnnnnnnnnnccgccccggggcgggtacacccagggcctgtttcttgataacaaaatccccccaaaaaggggggcctctcttcaggggcctccctttcccggggaagtcccccctcacacgcgggggggtgtttccctgcgggggcggcccttcctattattttaccatcattttnnnnnnnnnnnnntccctcggtgggtcccctatacccttcaccaaaaaaagtggcgtggggggaattcccttatttcgcaccactatatcttctcgcccccccctgttgtgggggaaaaacctttccccttcaaccaccaggcggtgtgtactgtataaagcacaccacatccatatcttcctctgcccccgccgtgcgtataataactacaaacacactggatcctcagggtagcttcatgcgtaaacgaataaataatattttccaccccccctgtgtcggctatgacacaaaca

SEQ ID NO: 263463 - DNA, 380 bp, Homo Sapiens
ggcaggaattgtagacattaaggaatttcactttcagttctacccactacttaagtacttgtcatgtactcttagaggaggccagtaatgatcagaaccattttactttaaaattaataatattgtattagagaatatattaaatggttatattgggttatgttaggatatatacttgaatggaaatacatgtactattagcaatcatatttcatttatccctgtaattagacaagaaagcataatatagctctactcatgggtacacataccagtgtataagatttttagaagtttactttttaaaaataaaagcaaaatgtaagatcttaagagttatgatcattaactctaccagatatggagatttgctgtgcccc

SEQ ID NO: 263464 - DNA, 1528 bp, Homo Sapiens
  misc_feature (321)..(321): n is a, c, g, or t
  misc_feature (829)..(829): n is a, c, g, or t
  misc_feature (1313)..(1395): n is a, c, g, or t
acttttatggagatccactagaaaacaggtctcttgaaaacattgttcagccgcctggagaaatgaatgataggttagatccttcctctttccaaacaaatgatcatccttggacagtccccactgtcttccaacctcaaacatttcaaagaccttctgcagattcactccctaggggttctgctaggttaacaagtcaaaatctgtattctaatgtatttaaacctgctgatgtggtctcacctaaaatccccagtgggtttcctattgaagatcacgaaaccagcccactggataactctgatgcttttctctctactncatttaaagctgttccctagcgcttctagcaattccttctacgagtctgagctaccacaaggtttccaggattattacaatttaggccaattcacagatgacgatcaagtgccaacacccctcgtgggcaataacgatcactaggctagtggtgggtttcctgctgccctctgttatcatgatagcctgttacagcttcattgtcttccgaatgcaaaggggccgcttcgccaagtctcagagcaaaacctttcgagtggccgtggtggtggtggctgtctttcttgtctgctggactccataccacatttttggagtcctgtcattgcttactgacccagaaactcccttggggaaaactctgatgtcctgggatcatgtatgcattgctctagcatctgccaatagttgctttaatcccttcctttatgccctcttggggaaagattttaggaagaaagcaaggcagtccattcagggaattctggaggcagccttcagtgaggangctcacacgttccacccactgtccctcaaacaatgtcatttcagaaagaaatagtacaactgtgtgaaaatgtggagcagccaacaagcaggggctcttaggcaatcacatagtgaaagtttataagaggatgaagtgatatggtgagcagcggacttcaaaaactgtcaaagaatcaatcccagcggttcctcaaacggtacacagactattgacatcagcatcaccctagaaacttgttagaaatgcaaattctcaagccgcatcccagacttgctgaatcggaatctctgggggttgggacccagcaagggcacttaacaaaccctcgtttctgattaatgctaaatgtaagaatcattgtaaacattagttctatttctatcccaaactaagctatgtgaaataagagaagctactttgtttttaaatgatgttgaatatttgtcgatatttccatcattaaatttttccttagcattgnnnnnnnnnnnnnnnnnnnnnnnnnnnnnnnnnnnnnnnnnnnnnnnnnnnnnnnnnnnnnnnnnnnnnnnnnnnnnnnnnnntcttggggggcgcctcggccctcaaaaaacttttaaaacctttcgtttggcgccggggccccatagggaagggaaccgggccaaaacggtttccaaagaaaaccggggcaggaaaaggggttggattcccccc

SEQ ID NO: 263465 - DNA, 1119 bp, Homo Sapiens
caggctggtacggtccggaatctcgggatatcgtcgacccacgcgtcgataaaaacaaaaacgatgaaactgctttctgggggtggttacttagttacctgccctttgcatgcatgtgtgaaccagctgtgagctgcaaggcagtggccagagcctcgccctcctgactcttcctgcaggtggctcaggaaggattcagcctggccacttggctaggactctgccagcacccatctgagactgacctcttccgggcctttggacactatgaccttgatgctgcccttcaggcaggaaacagggctggtgcctttcttcacctgcatggccagcttccttccctggcagtggagagggcagccaacaggttctaatgtcagagccatcctttaccaggtgggcctgcttgtccccgtcttgcctgccacatcactctactttttggaaggccatggctgattaaagaagttcttgtagtttcccaagcaaagtggaatctagaaacagtgaaaaaagttcagataactttgaattgcattcaagaagtacacttctttcccattgtccgtgggctcttgggagtctccgtgatgccaggctagagtctgattatattaataattcaaaatggtaactcccaaggtaatgctttcttccattttcatcaggttcttttatccccactgcaccccctacccttctcccttgcctatcctggatggcttctcagaagctcggccctagtcctccctgccttggcggggccagagcccactactgctgaggcagcactgctctcgtcagctgtgttgcctttaccaagtgtcttcagagggttaatgagttagagtagctggcccctggggagagggtgccctcccctgggtttgatctttagggtctgactttctgcagagaagatgttttacagatgtgtcaaagctgatgtaatgtggttgggggaggaaatccagacccaaagtgtttgtcagctgggtgtacaactgcctatgtgatcctctgtcttaaaatgatttctgtctgtgctgcgaaacaaagacaaggtgaggtgtttttcttttttgtaataatataaagctgtgtgtttctgaaccaaaa

SEQ ID NO: 263466 - DNA, 345 bp, Homo Sapiens
ggctaacttacggcgggcactgggaatggaaatttgttcaacctgcactgtgtttcagtggtctccaagcttttggaccacttaatatggactcttaatattaaaaaattaaaaggacgggcccaacctaaggttgacagtttttaatatgtactgggcaaaataaactgctactatcttactatcaacctaatgtcaaaaaagtaatatttttaccttacaccaagagagatctataattagaataaaggacagtccttcacatcagaagaaagttggcagcattttgctaggatatatttttgaaaatctaaatgtagaaatttattaaacagtttccactta

SEQ ID NO: 263467 - DNA, 1279 bp, Homo Sapiens
  misc_feature (246)..(296): n is a, c, g, or t
  misc_feature (510)..(510): n is a, c, g, or t
  misc_feature (514)..(553): n is a, c, g, or t
cggtgtggcgcgaggcgacacgggggttgagtcaacaaggttggaggtgcgcgcgtgtggtataaatagacggcgggcgtgttaggataaaggatatgcacgcgtggaggtcgcgaggaaataaggaaatgtgggtacggagaatgggtgggatgaggtgcgacttgcaatctattgttagtacgaaggctgaggatgcagggtctgctcggcagggacaattgagtaataacatagggttgcaannnnnnnnnnnnnnnnnnnnnnnnnnnnnnnnnnnnnnnnnnnnnnnnnnntaggtataaggacttgtgggggggacagaaaaaggggccttgattatgttaggggttggtcggcccagtgtttgggatttttaaaagccaggtccgggcggggtactgttgaccagttgtaatgtaaaaggtattgtttcttccataaaagccaagggaaaaagcaaaagctttttagtttcactggaaagaattctctctctttgtctgtctntcgnnnnnnnnnnnnnnnnnnnnnnnnnnnnnnnnnnnnnnnnacgattacaaagaagttgttttttactgaataagagataaaattttaaaataagcatacgtctgtacaaactgttctggcaaaactatcttaaatatttttccacagtagtaaaatataacccttctacaaatattggttcgctgcatttaattaatccactgtatacctattttcacttcctacttctacaaaaatagaaataacagctaacaggaggtttggagtttcctcatttatgtcttttcctatgaaccttgatttaaagctggacttgcaggaccattgacagaatgttctggcccctcagtgccactcgtgggttcagaaccttcagcctgttcctttgcttcagggagcttttctggggcaccaagtggattaacacagttaagcatcctgctttactttgtccacttcattatcaaattcaattttatcttcttgatgggttgtttttctttacttgtccattctgaggcagggtagggtgctgggcaatgacgtcatatagggaattgatattgctcgaatgtggaaaccatgcctggcctagctttgcgtagagcttttaccacttgaaaaatatccactacctcttctgtttccgcactttctaagagatttaacaaagcacaaaatattcccgtttgctgagatccatccctgcagtgaatgagtagaggtgtactcttgtgatgcttgttcccttcagaggaattcttct

SEQ ID NO: 263468 - DNA, 421 bp, Homo Sapiens
  misc_feature (214)..(227): n is a, c, g, or t
gggactctagtatgtaaatgttacttgaatctgtgcttcataatagtgtgtggcatgtatgtgcagactcttggatgctttatgcctgcgcagcaggagccctgtcctcacgttcccaggagggcggcttcacccttcgtaaccaggagacaaggcggccatggatttgcccttgattctattttgctaatggaagatagaaaggagagaaggnnnnnnnnnnnnnnaacattctgaagatggtgctgtgtcaagaaggaccttttttttcccctctcccctattttttaagtaccttggaggaggagaggttggtgacatgcatggtggggatctatggcctctggtgctttgtcctgtatttggtttaatgtttttgtcctaatcttcaatcaataaaattgtgcgtatttaactaaaa

SEQ ID NO: 263469 - DNA, 820 bp, Homo Sapiens
ggttctcctcctctcccagggcctccttgctccttcgttcacagctgggggtccccgattccaatgctgttttttggggagtggtttccaggagctgcctggtgtctgctgtaaatgtttgtctactgcacaagcctcggcctgcccctgagccaggctcggtaccgatgcgtgggctgggctaggtccctctgtccatctgggcctttgtatgagctgcattgcccttgctcaccctgaccaagcacacgcctcagaggggccctcagcctctcctgaagccctcttgtggcaagaactgtggaccatgccagtcccgtctggtttccatcccaccactccaaggactgagactgacctcctctggtgacactggcctagggcctgacactctcctaagaggttctctccaagcccccaaatagctccaggcgccctcggccgcccatcatggttaattctgtccaacaaacacacacgggtagattgctggcctgttgtaggtggtagggacacagatgaccgacctggtcactcctcctgccaacattcagtctggtatgtgaggcgtgcgtgaagcaagaactcctggagctacagggacagggagccatcattcctgcctgggaatcctggaagacttcctgcaggagtcagcgttcaatcttgaccttgaagatgggaaggatgttctttttacgtaccaattcttttgtcttttgatattaaaaagaagtacatgttcattgtagagaatttggaaactgtagaagagaatcaagaagaaaaataaaaatcagctgttgtaatcacctagcaa

SEQ ID NO: 263470 - DNA, 1087 bp, Homo Sapiens
  misc_feature (653)..(653): n is a, c, g, or t
  misc_feature (679)..(679): n is a, c, g, or t
  misc_feature (894)..(894): n is a, c, g, or t
ggctccaaagagtgatcactacaccattcaaagagatctcgatgggacctgctccctccataccacagcctccaccctagatgatgatgggaattatacaattatggctgcaaaccctcagggccgcatcagttgtactggacggctaatggtacaggctgtcaaccaaagaggtcgaagtccccggtctccctcaggccatcctcatgtcagaaggcctcgttctagatcaagggacagtggagacgaaaatgaaccaattcaggagcgattcttcagacctcacttcttgcaggctcctggagatctgactgttcaagaaggaaaactctgcagaatggactgcaaagtcagtgggttaccaaccccagatctaagctggcaactagatggaaagcccgtacgccctgacagtgctcacaagatgctggtgcgtgagaacggggtgcactctctgatcatagagccagtcacgtcacgtgatgccggcatctacacatgtatagctaccaaccgagcaggacagaactcattcagcctggagcttgtggttgctgctaaagaagcacacaaaccccctgtgtttattgagaagctccaaaacacaggaattgctgatgggtacccagtgcgggctggaatgtcgtgtattnggagtgccaccacctcagatattttngaagaaagaaaatgaatcactcactcacagcactgaccgagtgagcatgcaccaggacaaccacggctacatctgcctgctcattcagggagccacaaaagaagatgctgggtggtatactgtgtcagccaagaatgaagcagggattgtgtcctgtactgccaggctgggacgtttacacccagtgggcatcagcagtcacagaggcaccaagnccaaaaaaagtacggccctcagccagtcgctatgcagcactttcggaccagggactagacatcaaagcagcgttccaacctgaggccaacccatctcacctgacactgaatactgccttggtagaaagtgaggacctgtaatccagcattcttgttaaagctgaaacactgaaacagccattgccttgaccaa

SEQ ID NO: 263471 - DNA, 416 bp, Homo Sapiens
gggggccccagtgctgccagcccacccgcagcaagcggcggaaatacgtcttccagtgcacggacggctcctcgtttgtagaagaggtggagagacacttagagtgcggctgcctcgcgtgttcctaagcccctgcccgcctgcctgccacctctcggactccagcttgatggagttgggacagccatgtgggaccccctggtgattcagcatgaaggaaatgaagctggagaggaaggtaaagaagaagagaatattaagtatattgtaaaataaacaaaaaatagaacttatttttattatggaaagtgactattttcatcttttattatataaatatattacaccatctgcgtatatgtaccatatagtgagttatttttaccaagttttgtgttgtgtatttgttgtgtttt

SEQ ID NO: 263472 - DNA, 1022 bp, Homo Sapiens
ggtacgcgccggaattacgggatatcgtcgacccacgcgttcgctgagacgtgtgacctggatgatcctccaaaccctattggtcccaccccctgggaaaggccatggtgccagtttgaaaggtgctagctacctgaagccttgatatttcttcatggctgccgcacattcttccaccttggccagaacaggttctgaaaaccacttctctaccttcaccaccaccactgcccatcttgatctctttgagggttttcccatttcacttgatcttatttttgtttatcccttcctgcactttgtcaagagagtcctccagtttctatccaggaatgttcacatccaaagggttggacccacggatcattctgaatcttcctgcccctcctcactgcttaaccctgagaaccacaaatataatggaagcagttccccccaccctcaccccatctctttaagctcatcctagcaagacctctagagaccctagagactcgactttagtccttccccgccatggcacagtggggaaggtgtcaatggggagtgtcacggacaggaggtaggatcctgccgctcgcgtcttagtgtttctccctcaagactttccttctgttttgttgtcttgtgcagtattttacagcccctcttgtgtttttctttatttctcgtacacacacgcagttttaagggtgatgtgtgtataattaaaaggacccttggcccatactttcctaattctttagggactgggattgggtttgactgaaatatgttttggtggggatgggacggtggacttccattctccctaaactggagttttggtcggtaatcaaaactaaaagaaacctctgggagactggaaacctgattggagcactgaggaacaagggaatgaaaaggcagactctctgaacgtttgatgaaatggactcttgtgaaaattaacagtgaatattcactgttgcactgtacgaagtctctgaaatgtaattaaaagtttttattgagcccccgaa

SEQ ID NO: 263473 - DNA, 482 bp, Homo Sapiens; identical to SEQ ID NO: 14378

SEQ ID NO: 263474 - DNA, 530 bp, Homo Sapiens
gggtttttacaaactgagaaagtagctccagcagcacccgagaggccaaggagaaaagcggaggaagctgggtaggccctgaggggcctcggtaagccatcatgaccacccggcaagccacgaaggatcccctcctccggggtgtatctcctacccctagcaagattccggtacgctctcagaaacgcacgcctttccccactgttacatcgtgcgccgtggaccaggagaaccaagatccacggagatgggtgcagaaaccaccgctcaatattcaacgccccctcgttgattcagcaggccccaggccgaaagccaggcaccaggcagagacatcacaaagattggtggggatcagtcagcctcggaaccccttggaagagctcaggcctagccctaggggtcaaaatgtggggcctgggccccctgcccagacagtcctggtcccagctcctggaaagctctttgctcttagaagatctccctttcctccagcaaaatgtcatctcgccaggtgccatggcttgtac

SEQ ID NO: 263475 - DNA, 692 bp, Homo Sapiens
acaagggttgtgtagtgggggggtttttgtttgtggacaatcactttaatagatgtccataggtagttcatatgaatgcttaagttacaaaattagctgccatggtccaaatgtatgggactttaggaaagcttttcttactcaaaagataactaagactatcaactttgatttctaaaatgtaatttaaaggtttgtaaaacaaggccactactataattatataatattaaagtaattaagttttatgttagttattttaataacaacttcatgaactgttaaaaatattacatttgcatctctcagtttacatatttctgtattaacttggagaaaaacccatgtgaaaagtttccatgcagttacaaaggcagcagcacatgctgttttcacagcaacttgttattgcctcagaacaggcctgcactaaagcatcaacaaaaaatacccaccaccccactcccaccagaaaacccaacccttacccatccccggcaaaaattacctggtacaagcaatgacctaaaaatgccttcctggtaagaagcatttataaaatgcagagatctgaacaagctaagtgctcgtgcagatacatgggcctctcctccaagagtgggttccgcaagaggtggaaagaactctcaatagtttaggaaagctcattttcaaaagtatacttacacatg

SEQ ID NO: 263476 - DNA, 366 bp, Homo Sapiens; identical to SEQ ID NO: 14393

SEQ ID NO: 263477 - DNA, 633 bp, Homo Sapiens; identical to SEQ ID NO: 15109
  misc_feature (431)..(431): n is a, c, g, or t

SEQ ID NO: 263478 - DNA, 1206 bp, Homo Sapiens
  misc_feature (868)..(1053): n is a, c, g, or t
  misc_feature (1062)..(1136): n is a, c, g, or t
ttgctttaggcaccattctgcatcttgaacccagactgaagtgtgcctctcacagatggaaggtgcacacgctcctgtctcctcctcactctgccacgttcacttggctttttcattggtacctaggaatttaagaatatcgaagcgagagtagtaacaaaccatagatgagcagactcccacaccgggttttcttgcccgtctttaaggcactgtttctaaattttgaacttagctctgaatccccaagaacttgagcacagcaagggttgctgagctgctgtcgccgcagccctggcccctggtgctggagctgcagcacctttgggagaggtcctgcgtcgtcctcagctgcgtcgctgtgaactcccgctctccactgtgttcctcagtgtctgcttttcaggaagtctgctgtgacctttgcccaacttctgagctcctcagggactaggaacaatttcagtagcttttgccctgaaccaaacgagaaaacaaaagggaactcccgtatgaacccacgtcacgtggtgcactcagagtgtgtgcggcatgatcctcggttgctcctcctctcactttagtagagtacgcggtggacagctgatctccttcagtcgtctacccacttccgtcattgtcctccgctagaataacagagtagttggtagtcatggccagaaggggggtgggggcagtgtgaggacttggggtttctgtgctgtgtgacacaaggagataagtgacaatcttgaagtcctaacttccactattctagaaagtatagtggtgatttgtgtgcaaagatttgaagttttaaaaaagtaccaagttcctgaaattcaataaaatatttttattaattttnnnnnnnnnnnnnnnnnnnnnnnnnnnnnnnnnnnnnnnnnnnnnnnnnnnnnnnnnnnnnnnnnnnnnnnnnnnnnnnnnnnnnnnnnnnnnnnnnnnnnnnnnnnnnnnnnnnnnnnnnnnnnnnnnnnnnnnnnnnnnnnnnnnnnnnnnnnnnnnnnnnnnnnnnnnnnnnnnnnnnnnnnngttttgggnnnnnnnnnnnnnnnnnnnnnnnnnnnnnnnnnnnnnnnnnnnnnnnnnnnnnnnnnnnnnnnnnnnnnnnnnnngggggtaaatctttttttctttgaaaaaacccccggaggaaaataagagggggtttttttccccccccac

SEQ ID NO: 263479 - DNA, 377 bp, Homo Sapiens
cccacgtcacgtggtgcaactccaaaatgtgtgcgggccatgaatccctcggttgcctccctccctcctcacctttaagtaagaagtaccgcggtggaacagcctgatcctcccttccagtccgtcctaccccacttccgtcattgtccctccgactagaataacagagtagttggtagtcatggcccagaaggggggtgggggcagtgtgaggacttggggtttctgtgctgtgtgacacaaggagataagtgacaatcttgaagtcctaacttccactattctagaaagtatagtggtgatttgtgtgcaaagatttgaagttttaaaaaagtaccaagttcctgaaattcaataaaatatttttattaatttta

SEQ ID NO: 263480 - DNA, 756 bp, Homo Sapiens; identical to SEQ ID NO: 231478
  misc_feature (507)..(517): n is a, c, g, or t

SEQ ID NO: 263481 - DNA, 848 bp, Homo Sapiens; identical to SEQ ID NO: 98019
  misc_feature (698)..(698): n is a, c, g, or t
  misc_feature (773)..(773): n is a, c, g, or t
  misc_feature (791)..(791): n is a, c, g, or t
  misc_feature (837)..(837): n is a, c, g, or t

SEQ ID NO: 263482 - DNA, 469 bp, Homo Sapiens
gcggcccagctgcccatgagcattcggatcaacagccaagcctccgaaagccgccaggactctgctgtgacactgacgggcaccaacggcagcaacagcatcagcatgtcggtggagatcaacggcatcatgtacacaggagttctgtttgctcagccgccggcccccacgccaacctctgctcccaacaaagggggcggcggcggcggcggcagcagcagcagcaacgcaggcggccggggaggaaacaccggaaccagcggcggccaggctgggccagcggggctgtccacaccctccacatctacctcaaataactcgttgccttaaccgcatcactccccacccgccacccaccctggagcccgccggcctgggcagggggtccaggtgggccacacaggggccaggatggcggaagatacgggtggggagggaagatatccagaaaggagccacagctgacgcc

SEQ ID NO: 263483 - DNA, 786 bp, Homo Sapiens; identical to SEQ ID NO: 169517

SEQ ID NO: 263484 - DNA, 673 bp, Homo Sapiens
  misc_feature (100)..(113): n is a, c, g, or t
ctatcaacagtctaaaaagaaaaactgaggtctttttaatcttgattacagcactcacggcatgcaccctactcagtgtgggtgtcttcgtttgggggcnnnnnnnnnnnnnnggcacttctgaggctagatatgtctggctgaagatttgatgtggttcctccttaagctatgcgtcctgttaataataggtactgtactgggctctgtgtaagtgtcgttggggtaggacctatattttaatactgttcctaacatttcattttactagcgagaaatctttgatttcattttattctttgtaattctagacactagattgtagtttagccataactgatgttttttaaaaagggatatattttcttgcacagttgttcaaaaaagagacaagtttcagtcctcaatgctgtcctttgttttacaggtacaagttttctagctcagacaaactatgaaaaactgtagactattctcaaggtattaactcgcagaccctctgggggtaggggctgttttctaagttacaggcagagtgggactgagatggtacagtgtgcacagacaggtactgagctgacagactgggattttctgtactaaaatgttactttgtatcaaaagttaaacaggctttagtacaacaaataaaggtcaatttctgtaaaaaaaa

SEQ ID NO: 263485 - DNA, 577 bp, Homo Sapiens; identical to SEQ ID NO: 178326

SEQ ID NO: 263486 - DNA, 611 bp, Homo Sapiens
  misc_feature (59)..(59): n is a, c, g, or t
aaatgaatccatctcagaatactgtggagagattatttctcaggatgaagctgacagangagggaagtgtatgataaatacatgtgcagcttctgttcaacttgaacaatgattttgtggtggatgcaacccgcaagggtaacaaaattcgttttgcaaatcattcggtaaatccaaactgctatgcaaaagttatgatggttaacggtgatcacaggataggtatttttgccaagagagccatccagactggcgaagagctgttttttgattacagatacagccaggctgatgccctgaagtatgtcggcatcgaaagagaaatggaaatcccttgacatctgctacctcctccccctcctctgaaacagctgccttagcttcaggaacctcgagtactgtgggcaatttagaaaaagaacatgcagtttgaaattctgaatttgcaaagtactgtaagaataatttatagtaatgagtttaaaaatcaactttttattgccttctcaccagctgcaaagtgttttgtaccagtgaatttttgcaataatgcagtatggtacatttttcaactttgaataaagaatacttgaacttgtccttgttgaatc

SEQ ID NO: 263487 - DNA, 1474 bp, Homo Sapiens; identical to SEQ ID NO: 14443
  misc_feature (110)..(110): n is a, c, g, or t
  misc_feature (618)..(626): n is a, c, g, or t
  misc_feature (707)..(792): n is a, c, g, or t
  misc_feature (869)..(877): n is a, c, g, or t
  misc_feature (1068)..(1211): n is a, c, g, or t

SEQ ID NO: 263488 - DNA, 831 bp, Homo Sapiens; identical to SEQ ID NO: 14446

SEQ ID NO: 263489 - DNA, 1594 bp, Homo Sapiens
ggtaccgcccggaattccgggatatcgtcgacccacgcgtccgttaatcttcttcccatcatgttgaagtgatgctgtcagtggtgtttgtattacaaatgcggtgcccagttgcttggtaacccttggaacacttggtacatacacagcattcacagtgcagtcacacggtggagaactagatttagaatagaaatgaacaaagcagataatgatgcaggtaatgctgctatagactcactgctgaattatgaaactgtgaagtattttaataatgaaagatatgaagcacagagatatgatggatttttgaagacgtatgagactgcttcattgaaaagtacctctactctggctatgctgaacttggtcaaagtgctattttcagtgtcggtttaacagctataatggtgctcgccagtcagggaattgtggcaggtacccttactgttggagatctagtaatggtgaatggactgctttttcagctttcattacccctgaactttctgggaactgtatatagagagactagacaagcactcatagatatgaacaccttgtttactctactcaaggtagacacccaaattaaagacaaagtgatggcatctccccttcagatcacaccacagacagctaccgtggcctttgataatgtgcattttgaatacattgagggccagaaagtccttagtggaatatcctttgaagtccctgcaggaaagaaagtggccattgtaggaggtagtgggtcagggaaaagcacaatagtgaggctattatttcgcttctatgagcctcaaaagggtagcatttatcttgctggtcaaaatatacaagatgtgagcctggaaagccttcggagggcagtgggagtggtacctcaggatgctgtcctcttccataatactatttattacaacctcttatatggaaacatcagtgcttcacctgaggaagtgtatgcagtggcaaaattagctggacttcatgatgcaattcttcgaatgccacatggatatgacacccaagtaggggaacgaggactcaagctttcaggaggagaaaagcaaagagtagcaattgcaagagccattttgaaggaccccccagtcatactctatgatgaagctacttcatcgttagattcgattactgaagagactattcttggtgccatgaaggatgtggtcaaacacagaacttctattttcattgcacacagattgtcaacagtggttgatgcagatgaaatcattgtcttggatcagggtaaggtagccgaacgtggtacccaccatggtttgcttgctaaccctcatagtatctattcagaaatgtggcatacacagagcagccgtgtgcagaaccatgataaccccaaatgggaagcaaagaaagaaaatatatccaaagaggaggaaagaaagaaactacaagaagaaattgtcaatagtgtgaaaggctgtggaaactgttcgtgctaagtcacataagacattttctttttttgttgttttggactacatatttgcactgaagcagaattgttttattaaaaaaatcatacatttcccattttctataaaaa

SEQ ID NO: 263490 - DNA, 511 bp, Homo Sapiens
  misc_feature (15)..(15): n is a, c, g, or t
  misc_feature (38)..(38): n is a, c, g, or t
  misc_feature (224)..(224): n is a, c, g, or t
cccccagtcataccncctaggatgaagcctacctccanccgttagattccgattacctgaagagacctattccttggtgcccctgaaggatggtgggtccaaaccaccagaacctccctattttccattggccaccaccagattggtccaaccagtgggttgattgccaggatggaaatccattggtccttgggatccaggggtaagggtaggcccgaaaccgnggtaccccacccatggtttgcttgcctaacccctcatagtatcctattcagaaatgtggcatacacagagcagccgtgtgcagaacccatgataacccccaaatgggaagcaaagaaagaaaatatatccaaagaggaggaaagaaagaaactacaagaagaaattgtcaatagtgtgaaaggctgtggaaactgttcgtgctaagtcacataagacattttctttttttgttgttttggactacatatttgcactgaagcagaattgttttattaaaaaaatcata

SEQ ID NO: 263491 - DNA, 807 bp, Homo Sapiens; identical to SEQ ID NO: 42793

SEQ ID NO: 263492 - DNA, 1473 bp, Homo Sapiens
  misc_feature (442)..(504): n is a, c, g, or t
  misc_feature (1126)..(1126): n is a, c, g, or t
gatttgtctgtgtagacactaaaagtattacacaaaatctggactgaaggtgtcctttttaacaacaatttaaagtactttttatatatgttatgtagtatatcctttctaaactgcctagtttgtatattcctataattcctatttgtgaagtgtacctgttcttgtctcttttttcagtcattttctgcacgcatccccctttatatggttatagagatgactgtagcttttcgtgctccactgcgaggtttgtgctcagagccgctgcaccccagcgaggcctgctccatggagtgcaggacgagctactgctttggagcgagggtttcctgcttttgagttgacctgacttccttcttgaaatgactgttaaaactaaaataaattacattgcatttattttatattcttggttgaaataaaatttaattgactttgnnnnnnnnnnnnnnnnnnnnnnnnnnnnnnnnnnnnnnnnnnnnnnnnnnnnnnnnnnnnnnnccttgtcaagccccctagcccctcaaaaaagttccctaaaccacttcttttgccccgccggtcccacccagcgaaaacgaactgggcacttcctctgtgttcctgggccgccctctggcatagaaactagggctctgcaatcgtcgcgcccacaacaaaaccccccgggagcgaaaacccagaggtgtttcgtaacacaacattttccgagtgggaattttcctggaggggggtcttccccggagggtctttctcaagcgaggacccttctctaggaggagagcctccccaaaggcccatattttccgggcaccctaacttttgtgggccaactttcttctcggcgatcaaaccttctgtttccaaaaaccacactgttgtccagggcccattttctcttgctccccgcccgccctttgttatatagcccccaccaccgatatgaatatacgggtgacaatatctgtgtatggaaacatccacatctgttataattttccgcgccccaaacgactgcgcggtagactcttaataacccgttccgttttattaatacgacgccaccctttgtggttcggtataaacaagaccacgatcgtggccggccgcgtatatgtgggtngtttagtaacacacacctgcggtgtatgtgccgcataatacacacctctgtgccagttgctcccaaataataatcgggcgcgccccacacactatctttcgatagtcaccaccaccgaccgggcgtgcgccgacataaaaaacccctctcccccgcaccagaaaatatattgcctccctccgcaagacactatcaccgtctattttaaccactgtcgtccgacagaacgaaataacaccgcccgttcgcgcgcgggtacacatttcgtcggcgcccggagaatattctcattccctactcatatactccgcgcgcaacacattcccctccgccgcgtgaaccatata

SEQ ID NO: 263493 - DNA, 856 bp, Homo Sapiens
  misc_feature (806)..(806): n is a, c, g, or t
ggtaagaagcaacgagcaaaaaacctttctgtaggctgagacctctcggtgcacctggtgaccctgggtggaggggacttgctgtgaagtcttcctcgccctctgccctcttgctgcttctccacattgccaggaaaagctgctgacgcctgccctcctctcttgagtcgagggctgaatctttctcctctaagcagtctggtcaggaaccttggtttcttgagaggcccccaagatgccgcagctccaggggctcttcctcctcaccagaaatccctggggcttccacaatgtggaactcactcattgtcaggtgtccgtggagtgtttttggcatggtgacctgtctgggcccagcatgttgcagatgtgtatttatgcgcaatggtatgcatatctctgtgtgactgtcagtgttgcaagctggctggatccaaccatctcttctgaaataatgcatccaaagggttgatattctgggggaggtcactgcagaaggatggaactgacctttattccccagtgggcagttactgagctttcctcctcagagccatgctggcagcccctgggacagagaacggtgtggctttggctgcctctgcatggaatcttgccccggactcctgaagactgcacaaggaatgaggaagatcagggacaaccctgggaactgaataactttcaaagccagtgctcagcttctctgctccgtactagcgtttacaggtcttaattcaaaccagatgcctgtactagtttttagacccccaagtcaacctttctgagccacaagctccgctggnataatgatgcctgccctatctacctcacagacttgttatgaggttaaagt

SEQ ID NO: 263494 - DNA, 1223 bp, Homo Sapiens
  misc_feature (506)..(616): n is a, c, g, or t
  misc_feature (717)..(725): n is a, c, g, or t
  misc_feature (1175)..(1175): n is a, c, g, or t
acgttgacgatcgataatcgctactttgatttgcctggcagattcgccggccgacagtttgagaagtcggagacaagcgaggacaagagtatgtgcgtgtgctctcacaccccagtgcacagagcagtccttccctctctccagcagagcctcccacaagcggagtagacagttcgcatacagtcagctccagatggacttactgaccagacgtccggccccgggaaacagctgcagctgtgagctctatgtgagctccaccgtgggaggaactaggtgggggccaggaccctgtgcaattgctcagtggcttccccagacgggccttctcagaagctgacatggagcggcctctgcaggagctgggactcgtgccttctgctgttctcattgtggccaagaaatgtcccagctgagggcctttgtcccattgtccctctgtgaccccttcatctttgataaagcactgacatctccttcctaataaatagaccctgagttctgtnnnnnnnnnnnnnnnnnnnnnnnnnnnnnnnnnnnnnnnnnnnnnnnnnnnnnnnnnnnnnnnnnnnnnnnnnnnnnnnnnnnnnnnnnnnnnnnnnnnnnnnnnnnnnnnttacaacacataccctaccacctactcttttaccacccctccaacaccttcccaaaactaccccttaaaaacatatcctcttaaacctctttttctttctnnnnnnnnntccgccattaaaccaatatatctaccaaatcctctttcgatttgcggccagcgcccgataatgcagacgcaacggcacccaacgcacacagataccgtcccctctataaaaaaacaacataccgcccgatcttacacatagccttcttcgcctccccccccttcaaccccacttatgagcctgcgagtgcaacgcctccgaggatcctccccaacccctcctccacgcaaggagcgcttttcacccatccctttcccgcgaccgcccaccccgccccccgacaatcctccccgtccatacccagtatcccgaacctatccccccctacttgcccccgcccgcccgatccgatgcgcgcggcaggctgtcacatattatatcattccttccaccgccacaagagccaccaccccaccgaacacaagcgaacgccgcccaaaactcgctgcncaacccgccgcgcgcggcatacacacacccccaccgcttctctcattg

SEQ ID NO: 263495 - DNA, 893 bp, Homo Sapiens
  misc_feature (312)..(312): n is a, c, g, or t
  misc_feature (444)..(444): n is a, c, g, or t
atctctccgagcctcggtttcctcatctccagccctaaaatgacgacacgccccacaggtcttgggaggattaagtgaggggacatgagcctggaagctccgaccccaggagccagcccatcaacctgaaccattacgccaccaagaagagcgtggcggagagcatgctggacgtggccctgttcatgtccaacgccatgcggctgaaaggcggtgctggagcagggaccatcctctcactactacaccaccctggtcaccctcatcagcctctctctgctcctgcaggtggtcatcggtgtcctgctcgtnggtcattgcacggctgaaacctgaatgaggtagaaaagcagtggcgactcaaccagctcaacaacgcagccaccatcttggtcttcttcactgtggtcatcaatgttttcattacagccttcggggcacatnaaacagggttcctggctgccagggcctcaaggaatcctctctgaatgcagcctgggacccaggttctgagcctggaacttctgcctccttcctccgtgatctgccaggctcgtgggcactttccacagcccaggagagcttctgaaaggacagtatagctgcccttgctccctacccacagcacctgagttaaaaagtgatttttatgttattggtctaagggacttccatcttggtctgaagtcctgagctcagacgcaggtactgccagccataccttcctggtagcatctgctggacctaagtaaggcatgtctgtctaaggccaagtctgcccggcttaaggatgctggttctgactctaccccactgcttccttctgctccaggcctcaattttcccttcttgtaaaatggaatctatatctataaaggtttcttcaaatccaa

SEQ ID NO: 263496 - DNA, 984 bp, Homo Sapiens; identical to SEQ ID NO: 14489
  misc_feature (291)..(293): n is a, c, g, or t
  misc_feature (295)..(308): n is a, c, g, or t
  misc_feature (310)..(333): n is a, c, g, or t
  misc_feature (336)..(336): n is a, c, g, or t
  misc_feature (338)..(340): n is a, c, g, or t
  misc_feature (343)..(390): n is a, c, g, or t
  misc_feature (394)..(395): n is a, c, g, or t
  misc_feature (400)..(402): n is a, c, g, or t
  misc_feature (404)..(409): n is a, c, g, or t
  misc_feature (411)..(453): n is a, c, g, or t
  misc_feature (461)..(475): n is a, c, g, or t
  misc_feature (482)..(502): n is a, c, g, or t
  misc_feature (523)..(535): n is a, c, g, or t
  misc_feature (607)..(618): n is a, c, g, or t
  misc_feature (641)..(733): n is a, c, g, or t
  misc_feature (754)..(767): n is a, c, g, or t

SEQ ID NO: 263497 - DNA, 978 bp, Homo Sapiens
  misc_feature (444)..(444): n is a, c, g, or t
gggggcatggggagcctgacgttttgaaggatgagcttcaactctatggagatgctcctggagaggtggtaccctctggggaatcaggactccgaaggagaggctctgacccagcaagtggagaagtggaggcctctcagttaagaagactgaatataaagaaagatgatgagtttttccaatttcgtcctcctgtgctttgccatcggggccttgctggtgtgttatcactattacgcagactggttcatgtctcttggggtcggcctgctcaccttcgcctcccctggaaaccgttggcatctacttcggactagtgtaccgtatccacagcgtcctccaaggcttcatccccctcttccagaagtttaggctgacagggttcaggaagactgactgaggccacttccaggtgggcagcagaggcaggccccagggggacanccactgcgacccctggacccacaagggcagagcagcattctgagagacgcacaggaagaccaagccagaccaataaacagaacacttttccctccagagaaaacaaaaacagaaccaccgcgcaccccccgccggccgcctccccgcccccaaagactccctaatccccaaacctgaccgggaggaggccgcgacgccacgcacagcgcaactagccctggccctcgaccgtcctacacccagacacacttgcagaccagcacgatgtccgggcgcccctcccgtggacgctcaccgcccggcgaaccgggcgcaggctgatatcaacgtcacgctacgcagtctaccagaagcgcggatctgggacatctaatccgcggagtgccccgccccaacccctacataaccgtcctgccgcctcctgccctacatcgtacaaaccaacaccgggcaccagagaccagaggagagtatcgtataacagtgtaatgctcgcacgtcgctgcggtataccacgccggtaatagcagagac

SEQ ID NO: 263498 - DNA, 465 bp, Homo Sapiens
  misc_feature (32)..(32): n is a, c, g, or t
  misc_feature (46)..(46): n is a, c, g, or t
  misc_feature (90)..(90): n is a, c, g, or t
tgtttaccccgggaaggcccccaaacccctgncctcatgaccccancctccctggccctccccaaaatgctgggaattaacgggcgggancccaccgcccccgggccctttttttaagttttaagtaccctataaagaacactgaaaggtgatgtgtgtggatgagcctaggaagacctgaaataggctctctctaaattaatcaaattaatcctgaagccattctgcaatactgtctttaatgtatactcacttgttatagaagcccagggttttttcccctaatttgtatcattgctatatgtgttattgtaccaaactacactgttttaattgctgtaaattttaatatgtcttagtatctgggtgtgggaatcttgaaagcatggagtttgtgttattcaccactgtattctcaaatatcagaagagtatctggcctactaagtgcacaataaacatagtt

SEQ ID NO: 263499 - DNA, 639 bp, Homo Sapiens
  misc_feature (58)..(58): n is a, c, g, or t
ggtcgatggagcagtgatcatcaccactccccaggaggtgtcactccaggatgtccgngaaagaaatcaacttctgccgcaaggtgaagctgcccatcatcggggtggtggagaacatgagtggcttcatctgtcctaagtgcaagaaagaatctcagatattccctcccacaaccgggggcgcggagctcatgtgccaggacttggaggtccctctcctcggcagagtgcccctggatccgctcataggtaagaattgtgacaaaggccagtcttttttcattgacgccccagattccccagccacgttagcctacagaagtataattcagagaatccaagagttttgtaatctccatcagtcaaaagaagagaacctcatcagttcctgaaacgagagaatgttcaggaccaagcagttaccgagcgaggcactcactgggcagcacatccagccagacccgaccagctccgggatggggtgggtcacagcaaaaggaccagatgctggtgtggtccgaagccactttctcagagacactttaatcattgagtatttgtacacttttctttagaacatatataaagggcattctctacaaatgtgccgttttaagaataaaaccccctcaaatctca

SEQ ID NO: 263500 - DNA, 1294 bp, Homo Sapiens
  misc_feature (418)..(493): n is a, c, g, or t
  misc_feature (520)..(520): n is a, c, g, or t
  misc_feature (539)..(539): n is a, c, g, or t
  misc_feature (554)..(569): n is a, c, g, or t
  misc_feature (595)..(604): n is a, c, g, or t
  misc_feature (746)..(752): n is a, c, g, or t
  misc_feature (754)..(754): n is a, c, g, or t
  misc_feature (756)..(756): n is a, c, g, or t
  misc_feature (760)..(760): n is a, c, g, or t
  misc_feature (763)..(764): n is a, c, g, or t
  misc_feature (766)..(766): n is a, c, g, or t
  misc_feature (770)..(770): n is a, c, g, or t
  misc_feature (781)..(781): n is a, c, g, or t
  misc_feature (785)..(786): n is a, c, g, or t
  misc_feature (1161)..(1161): n is a, c, g, or t
ctccttcgagcccctttccccgcctcctctcagcctgtccggatgacagtgttcgcctcctgtttagactgtacactcttcaggggtaggggtgcccgtcagttccttcaatcagctggcacacacttgtatagtgaaatgtttacatgtgggaaaactccgccttagacaaactaccaaagtacaatcgtgtctctctctagccggaatgctacagagagaaatggaaccttagatttgcaacaaaagtctgtaaactggtctgtttgccaaagtgaacactggatgactaaggagctgaagaaggcccccagaagcggatttgtggtgggttattttatttctcctgtggccaatcttctgtgaaatacaatgtgctgttggtgcaacagatgattcaataaatgtctacagcagnnnnnnnnnnnnnnnnnnnnnnnnnnnnnnnnnnnnnnnnnnnnnnnnnnnnnnnnnnnnnnnnnnnnnnnnnnnncacaccaaaccaccacaaacttttacncataactaaccacccaacncaaaaaattcgtcgnnnnnnnnnnnnnnnnaaaaatttttcaaaaatattcgattnnnnnnnnnncccccaaaaaaaagggaacgcggccaaccctgggttcccaagaaaacccgggtaaagacaaaggggcggggatcccccccaaaaaaaccccgggacccggtcgaaaacaggggtcgggttggtaccggggagtaacccaatnnnnnnnangncggngcnngngggnggaccgccgcngcgnngggccggtgcgatcggggggggcgcgcccgcggcgggcccttgccggctgctcgccttcgacgcgcccccgcgcacgcgcggctccatgacgcccgggctggtccgtggcatctccgaggagccgagctgccatgaccgcgctctagccggcccggacggccctgcgcgcgccgcccgggctggtatatcgccggggcgacggctgagtcctgcctgaagggcgccaatcgtgcttcgcacgttggtgggtttgtatttgctgcgattgacgagactgagattggatgagtggaagccacacgatcatccgtccgatggagtgctcatgagcatgagatcagctgcgacatcgacgccacggggcgcgcctctgnttgagcggcacggcgtgtaggcgcaccgccgtgcgcactggacaggcgcgggtgagaggcaccagctgcgcgcgccttacgtacgggactctcacagcgtgcgggacggttgcgggatgcgtcggaacgaggg

SEQ ID NO: 263501 - DNA, 762 bp, Homo Sapiens
ggtcattttaacattatattctctacaaagaccttatttccaaataagataatatttggaggtattgggaataaaaactccaacatataaatttgaggaaggcacgatttcactcataacaatcttaccctttcttgcaagagatgcttgtacattattttcctaataccttggtttcactagtagtaaacattattattttttttatatttgcaaaggaaacatatctaatccttcctatagaaagaacagtattgctgtaattccttttcttttcttcctcatttcctctgccccttaaaagattgaagaaagagaaacttgtcaactcatatccacgttatctagcaaagtacataagaatctatcactaagtaatgtatccttcagaatgtgttggtttaccagtgacaccccatattcatcacaaaattaaagcaagaagtccacagtaatttatttgctaatagtggatttttaatgctcagagtttctgaggtcaaattttatcttttcacttacaagctctatgatcttaaataatttacttaatgtattttggtgtattttcctcaaattaatattggtgttcaagactatatctaattcctctgatcactttgagaaacaaacttttattaaatgtaaggcacttttctatgaattttaaatataaaaataatatggtctgatatactgaaagagcagcattcatgctgggaaacattttgtttgtctgttcttttgctcaaacaagcgcct

SEQ ID NO: 263502 - DNA, 528 bp, Homo Sapiens
ttttggctgagtggctacaaagactttatcaaattattttaaatgttggcatttaagtattcatgtgtatacagttacatggaaccttcaggtcagtggggcacaaatgtggtatacacacgatgagcctggcagggaagcaaatgagaccaggcttggagctacagggatttaaaaaaattggatgtctttctgagggtctgagaagaatagggcagaagaggaaagggtcactttaggggtctggcttaacccactgcctagatctccaactgaagagctcctttcccatcctcaggggaagagtgcctgttttcaaacggcatccctactacacatataccccccttccctaaaatcttgatgtggcaaacacacccaagaacccacaggaatatgtccttataaatatgtttgtatcagagaaaacaaggcactttgggagcattatggcttacgtctactacatgtacatcattctagacagaaagtaaaaactggttagttcctcaagtgaattaactgacc

SEQ ID NO: 263503 - DNA, 433 bp, Homo Sapiens
  misc_feature (179)..(179): n is a, c, g, or t
  misc_feature (307)..(307): n is a, c, g, or t
  misc_feature (313)..(313): n is a, c, g, or t
  misc_feature (350)..(350): n is a, c, g, or t
  misc_feature (379)..(379): n is a, c, g, or t
  misc_feature (387)..(387): n is a, c, g, or t
  misc_feature (393)..(393): n is a, c, g, or t
  misc_feature (413)..(413): n is a, c, g, or t
tttttggtaaacatttaaaaattttatttagagacaagtctaccatgtcaccgtaagtttatgctactgctgggaaatgaacaaatgtagccccataaggaagaaaagttgagagatgccatatgtttaaagacatggtagtcagacttctttgtaatcacatttctatggataaatgncatagtataatttttgaaggtataaagacaatttctaaggatttatattctagttaatacctacaactctaaacattacttaatacctcatttaagctgatttctttttctccagtcactttggcaanggggangtaggtttggaatttgtgggctctacccacagggttncccaatttaaaacacggctaccctatacngggcccgntccaanggctgggcctgtttggaggngttccccgggggacctgggg

SEQ ID NO: 263504 - DNA, 687 bp, Homo Sapiens
  misc_feature (26)..(26): n is a, c, g, or t
ggcacgagcttgagggtggcaaaccnctgagcgggctgctgaatgcgctggcccagggacactttccacgggtaccccggcatcacagaggagctgctacggagccagctatatccagaggtgccacccgaggagttccgcccctttctggcaaagatgagggggattcttaagtctattgcgtctgcagacatggatttcaaccagctggaggcattcttgactgctcaaaccaaaaagcaaggtgggatcacatctgaccaagctgctgtcatttccaaattctggaagagccacaagacaaaaatccgtgagagcctcatgaaccagagccgctggaatagcgggcttcggggcctgagctggagagttgatggcaagtctcagtcaaggcactcagctcaaatacacacacctgttgccattatagagctggaattaggcaaatatggacaggaatctgaatttctgtgtttggaatttgatgaggtcaaagtcaaccaaattctgaagacgctgtcagaggtagaagaaagtatcagcacactgatcagccagcctaactgaagatgatgtatgaaggagttggagttgttgaaaccaaggtgtccatgatccctccccactgaccttttctaagaaaattcttgtgcctgcattggtattaaatcctcgcattcagtcctc

SEQ ID NO: 263505 - DNA, 533 bp, Homo Sapiens
gggggagcaattcacttgagaggctgtgtggtgacttcagtggagagcaactcaaatggcaggaagagtgaggaagagaacctttttgagatcatcacagcagatgaagtgcactatttcttgcaagcagccacccccaaggagcgcacagagtggatcagagccatccagatggcctcccgaactgggaaagtaaagagactcctgcaattcctcctcccctcctgagggaagcccatggacaagctcaagcccaggacctgtccacttctgtgacaaatcaacgggaaacagcccaggggtgggaagttttcatttgcaggggggtctgaatgtaactcaccatgtggtgtgcaaggttcccctgcattgtattgctcactgcagcccctctgcccctatccatgacccccaagcagatataacaagctgtgcagcctcagtaggctgcttgccctctccaagcctcagggcctcttctggaaaatgaagaaattcaactagtagattcctgaggtccccctagctaaaaa

SEQ ID NO: 263506 - DNA, 546 bp, Homo Sapiens
  misc_feature (23)..(23): n is a, c, g, or t
  misc_feature (201)..(201): n is a, c, g, or t
agtgcagcgaagggacacttganaggctgaggttcccaccccttcacagtgttgattgctattagcatgataatgaactcttaatggtatccattggctgggacttaaatgactcacttagaacaaagtacctggcattgaagcctcccagacccagccccttttcctccattgatgtgcggggagctcctcccgccacgntttaatttctgttggctgaggagggtggactctgcggcgtttccagaacccgagatttggagccctccctggctgcacttggctgggtttgcagtcagatacacagatttcacctgggagaacccctttttctccctcgactcttcctacgtaaactcccacccctgacttaccctgggaggaggggtgaccgccacctgatgggattgcacggttttgggtattctttaatgaccaggcaaatgccttaagtaaacaaacaagaaatgtcttaattatacaccccacgtaaatacgggtttcttacattagaggatgtatttatataattatttgttaaattgt

SEQ ID NO: 263507 - DNA, 598 bp, Homo Sapiens
  misc_feature (169)..(169): n is a, c, g, or t
cccgtcccccgtgcctttgcccccaggaaagccagccctacctggggccgacgggacccctttggctgtcctcccgggcgcaaagagaagccatctgatcccgtcgagtggaccgtgatggatgtcgtcgaatattttactgaggctggattcccggagcaggcgacanttttccaagagcaggaaattgatggcaaatctttgctgctcatgcagcgcacagatgtgctcaccggcctgtccatccgcctcgggccagccctgaaaatctacgagcaccacatcaaggtgcttcagcaaggccactttgaggatgatgaccccgatggcttcttaggctgagcgcccagcctcacccctgccccagcccattccggcccccatctcacccaagatcccccagagtccaggagctggacggggacaccctcagccctcataacagattccaaggagagggcaccctcttgtccttatctttgccccttgtgtctgtctcacacacatctgctcctcagcacgtcggtgtggggaggggattgctccttaaaccccaggtggctgaccctccccacccagtccaggacattttaggaaa

SEQ ID NO: 263508 - DNA, 1063 bp, Homo Sapiens
ggtaatccagaagttcatggtcaagtagaagtgaaaactgagaagaggccaaacttcgttgatcgacaggcatccacagttgagtatctcccaggcatgctacattcaaattgccctaaaggtctcctacccaaattctccagctggtctttggttaaactaggccctgctaagtcttataactttcatacaggtttggaccaacagggctttattccaggaacaaattatcttatgccttgggacattgtcatcaggactagagctgaagatgaaggagacttagacacaaactcttggcctgctccaaataaagctattcctggaaagagaagtgcggttgtaatgggaagaggaagacggcgagatgacatagctcgagcttttgtgggctttgaatatgaagactctcgaggtcggagattcatgtgctctgggcctgacaaagtaatgaaagtaatgggaagtgggccaaaggaatcagctttaaaagccctaaatagtgacatgcccttatatattctgtcatcctctcaaggtagagggctgaaacctcattatgcttcaacttattgaggctttttgttgtggttcctgatgctcctttgcagataatactaatgcctcaggttcagccaggcccaccaccatgtccgggtattctacccagaaaaacaagaaatcacccttccacctgatgggcctttgggttgagatttccttatgcatatgtgactgagagaggaccttgtttcccccctaaggaaaatgtgcagttaatgagctacaaggtgctccgtggggttccttaaggcagtaacacaataagtgttttcccagccagttcaatccctatacttgagctggtttttgtttttggtatttgtggctgtgtttttggtatgtgtttactgtgttttcccaaatccaaaatgtgttttggttacaggagttcagtatttggaaactaatttgttctactttttcattatattgttgatatttattgtaaacgtgactacaactttctaataaagattggttgttctaaaaaagaatataa

SEQ ID NO: 263509 - DNA, 614 bp, Homo Sapiens
  misc_feature (45)..(86): n is a, c, g, or t
  misc_feature (550)..(550): n is a, c, g, or t
  misc_feature (602)..(602): n is a, c, g, or t
tatcattaaggttctaactccatcccccaaaacaaccttacattnnnnnnnnnnnnnnnnnnnnnnnnnnnnnnnnnnnnnnnnnntttatccaaaaagtaaggcatcaactttacaaaaaaataattgaaggaggggaggaagttggaggaatgagaaaagagggaataagaagatggtcccctgaccctccaggggccaaccccagcctgccgggcatctactctgaaggggtcacaactcagaccaaacttcgcatctcaccaactatggggtgggcaagctgggcggggaagctgggagacaccatccaggccaggaagggctcctgtgtattccagtttaagcagacagaattcggggtgggggagagaatcccgatttgtgataaaaggatcctaagtccttagtgcagcaggagtggctgggaaggttgcagggcccacagcaaactccatagccttcctttgaagcccagggaaaggtcagaggctgccagccacagaggagggccttttttgaggatctccagagtgggcgccctgctgcnactaccctttcaccctgccccaagacagcatgacactgagacctgcgaggantgggggattatt

SEQ ID NO: 263510 - DNA, 763 bp, Homo Sapiens
atctaaggtttcccctaaaatgcttcttcttttctaaccaacattggggcccagaaaatccacctttccaaaatagggggcagttccttgggcaccgggtgagccttgtcttccagttgcttgttggaaaatatcctggtagtcagggatgatccgctctgcaaacgccttgtccagcatctttttgtaccactcctgcagtcgttttggcttgggtattttttgatcaggtgggtggcaatggaagatgtaatcatctccttcacttggaggacaggcccagatgtgccctgtcacataccctaatttcttcacatactctaaatatccaataaggatctcatggtaaacggctgtgcggaggcaacgtggcccggaagaaatgaatactatccagataagaaatgtacacacgcctcgtgtttggaggggggcaatcagagccgtattcttggacgtgcattccaaaaaagcagacatccacgccgtcaatttcctcaaaagcaaacagagctttggttcgatatgggaaagattcagacatttccccagaatccacaaaccgtgacttcatcccgggcttgacctccaccgtcttgtctgagctggccaccactcggacaaaaacctccccggcttcagggtgattctggcgccgcaaaaatttgttcactcggtcttccaagtggtttcccagtcttgtggtctgcagcctcttagcactgaatttgttttcttttcgaggtctgccagttttcttccc

SEQ ID NO: 263511 - DNA, 541 bp, Homo Sapiens
  misc_feature (268)..(268): n is a, c, g, or t
tgctgccaatcagttaaatggaattcagttttcgtcactgaacaaaaggatgaatggcaccactcggcacagagagccacagttaaggcaaactgagaaaagccacttttagttccttcttgcccagattcctgactgcacatgaagccctcgtggcagagcttacttcctctggttcaggtggccaggctgtcccaatcccaactccccaggtttacctgcgttaggtaagagcggggtcccacacagactcgccacacaaaacacngctcactgcagtcatctcaacagttcatttcccgctagtttaatggaaaacaaaactaactactttggttagttaattgtggtttcatttactttaatcccctatgaaggctcacaggctcctctgggacacttaagagccctggtctatcctaacacggctcactgaatgacacgccctggaaggagctggaaaactacctcgtgtttggaggggggcaatcagagccgtattcttggacgtgcattccaaaaaagcagacatccacgccgt

SEQ ID NO: 263512 - DNA, 379 bp, Homo Sapiens
  misc_feature (176)..(176): n is a, c, g, or t
  misc_feature (185)..(199): n is a, c, g, or t
gtgtgagccaccgtgcccggctgaagatttttcttaattgcaataaatattcagcattttttctaatgaaaatgaattttgtttaccagtaaaagtatgcattttaaaagactttcagatttatgcccttttaccgtgaagctgctaaactaaaagtaaatggaagaaaccaagtnctagtaggnnnnnnnnnnnnnnngtgggggtgggatgggggaggttagttacacttaaaatatcttctccagagactgtatgctcctatactagactgtaagctctttgagggcagtctgtcagatttatctttgtatcttccccagcgcctagtgtaaggccttgcacataataggcgcccaataaatattgatgaagaatg

SEQ ID NO: 263513 - DNA, 393 bp, Homo Sapiens
gggggaatgaaaaaatacacaaaataatggtctttgtcccagtagagttcatagtctatttagtgtgcatgtttttccttaatgatgtatttgatctgacttttttccttctcaaaagaatcatacttgggattacaggtacatttgatgttatatgatggataagtgaaaagtttttaaaggagattttataccttttcacattaaaaaaggtatttatattattactttgtagtgattgtcttaagaaaaaatatagcccaaatgtatagtaaaatcagcagctcaagaagaatttctgcttctctttgtagttgatgctttgttttttcctgcagtcagaaattccttgtatttgtcaaatgtataatcagcttgtattgtttttaaatt

SEQ ID NO: 263514 - DNA, 479 bp, Homo Sapiens
ttggtctcattggaatctgcctcctaatgatttttttcaggaaaacctgtttggttatcctcattcaaaagcactggacagagaatgttactgtgaatagagcacatattactctttttagcaacctagcatgatgccaacaagactattcttgaaagagcaaaggttcctgtaaatttaattagggctagatttgagctgcttgtaagtcacaggttttccagatgtctgccaacaagaaatgactcatactgtgatgataccttttgctttgccttgtggacaatgtgggtttttgaaatttgcacccttcaaacaatgatttatcagagaaaggggtctgttttcaaaaaagattctgtaatgaattttatgtgtggcatatacttatttcttgagagaagattttaacttattgtttttattttatggttacatatgatgataacctgctattattaaactttttctaaaaagtg

SEQ ID NO: 263515 - DNA, 344 bp, Homo Sapiens
  misc_feature (17)..(17): n is a, c, g, or t
  misc_feature (36)..(36): n is a, c, g, or t
  misc_feature (58)..(58): n is a, c, g, or t
gaaaagagccaaagggnccccctgaaaatttaaatnaggggccctagatttggagccngcctggtaaaggccacaggtttcccccagatgtccggcccaacaagaaatgacctcatacctgtgatgatacccttttgctttgcccttgtggacaatgtgggtttttgaaatttgcacccttcaaacaatgatttatcagagaaaggggtctgttttcaaaaaagattctgtaatgaattttatgtgtggcatatacttatttcttgagagaagattttaacttattgtttttattttatggttacatatgatgataacctgctattattaaactttttctaaaa

SEQ ID NO: 263516 - DNA, 410 bp, Homo Sapiens
gggggcccctggcggggtatccatgttccggtggctggaggtgctggagaaggagttcgacaaagcttttgtggatgtggatctgctcctgggagagatcgatccagaccaagcggacatcacttatgaggggcgacagaagatgaccagcctgagctcctgctttgcacagctttgccacaaagcccagtctgtgtctcaaatcaaccacaagctggaggcacagttggtggatctgaaatctgaactgacagaaacccaagcagagaaagttgttttggagaaagaagtacatgatcagcttttacagctgcactctattcagctgcagcttcatgctaaaactggtcaaagtgctgactctggtaccattaaggcaaaattggaaagagagcttgaggcaaacaaaa

SEQ ID NO: 263517 - DNA, 979 bp, Homo Sapiens
  misc_feature (17)..(17): n is a, c, g, or t
  misc_feature (22)..(22): n is a, c, g, or t
  misc_feature (35)..(35): n is a, c, g, or t
  misc_feature (48)..(48): n is a, c, g, or t
  misc_feature (80)..(80): n is a, c, g, or t
  misc_feature (456)..(468): n is a, c, g, or t
  misc_feature (481)..(566): n is a, c, g, or t
  misc_feature (573)..(573): n is a, c, g, or t
  misc_feature (703)..(711): n is a, c, g, or t
gggggaatatgattttnaaaanccaaatatttacnaccaacaaaaaancctagggatcacctgacccttgtaatggttanttatgttggggagggaggggggctgagaaggggaaatcagcagtgtgcaacatctttataatttggtactttaattacaaatccacaaggaaacccaataagttgaaatccctatataacaggtttatatatatagaatatgtatatttgaagccctctacagactgagtctatgttttactaattctttgttcactgtgttacccatcttggaataagttgtgaatgtcagctccctctctctgaggcctccagacttagctcctcaggagggtaatgagccaaggttgagtgtttccatacaatgcttttacctttgatcccaggagaatcagaaactccaacattttggaatcttcaagggcacatactgagnnnnnnnnnnnnnttgtttatgagcnnnnnnnnnnnnnnnnnnnnnnnnnnnnnnnnnnnnnnnnnnnnnnnnnnnnnnnnnnnnnnnnnnnnnnnnnnnnnnnnnnnnnngaccttngggacgcttcggcccccaaaaaatttttcaaaacaacccatttggcacggggccccggcaggaacgggacccgggaaaaacctgtttctaaggaaagctgggtttcgcccagggctaaaaatccccgccnnnnnnnnncccccggggccaacccaagagggggaccaaagcccattggggttccaagcgcatgaaggccatccgaccccgaaatcaaatgaagcccgatcttaaattaccccccgccctggtattaattcaataagggttggtgctaaattgaaaatttctcgccaacggggaagcccaaacccaaaatggcctggggggacacttgaaatcccttgggcgggcattggccaaactatgaatggcccccggggtataaaaaattggggccgaaggg

SEQ ID NO: 263518 - DNA, 432 bp, Homo Sapiens
ggggacttctatttataagttacctgtatttatatttatatgcccgctctcatggtgaaggctggacaaggtggtcctctggcccctccttcttacctcagatgcctgaacagaacaaggcaaacccgtagcagcctctcaggagctgacaggtcctctttcggggctcaggagggtgggcacacacccagcggcctgcagagtaagcttattacccacaactgtgcccgctttgtgcttctaaggtgcacacctagcctaggtgagacactgcagccaggcaaccaccgacacacgccccttctcaaagccagaggtgagtggggcaggtgcccggggctgggtgagtggaattaggacacacacaggcttgggcttcaagttcatttattgatgcattggttggacacaataaaaccacaattgttaacc

SEQ ID NO: 263519 - DNA, 322 bp, Homo Sapiens
  misc_feature (267)..(267): n is a, c, g, or t
tgagccaccgcgcccggcccttagtttgctttttaagcgaagagaatgcaggtgttgagttgcatgtgtgaaaactctgaatttactttggttgatacatcttcgctcccactcccattcagattctggttttatatggattgtatttgttttcatctgtattaaattgctaacttatctgttcttaaagaatccacctgaaaagtgtccttttatttcttctgccaccctgttttatgaatgctgtggactgttttttatgaatgnaaaaataatttgttgtataatagcagattttctgaaattaaagacagcttacttt

SEQ ID NO: 263520 - DNA, 422 bp, Homo Sapiens
  misc_feature (63)..(93): n is a, c, g, or t
ccggctggaggaggacaggctgctgctgctaccgaaggaggatgtctgtcgctgggccttggnnnnnnnnnnnnnnnnnnnnnnnnnnnnnnngcatacacagcgcctccagtgggagtgacagttggatacagccaggcagggtttctgccctgccgaacactttccctcccacctgcctgctcctggcgccttctccctaggggtagactcttctgcctactgaagtgggtttgctgcacattgactggtcaggggcagagtctgggtgctgtcctttggccacgtgtggggacttgtctagaccagaatgaaagggacagggtcccagacacgtttgggggtcctgattctgggctggacacggttgtggatccagagaagaggcctagtctccaataaatcttaggaattttgcagga

SEQ ID NO: 263521 - DNA, 1169 bp, Homo Sapiens
tcacatagtttggtcttaaagcttaacagcttaaaattggcaaaaacaagcttgtgccttttaccatgtaatacttgaaaagtaagtacctctttgctacaagtagaatgaatagggaaaagtttaagcctgtttttttaaaaatattattttaaagagctctatttgtagaggcaaattataggcagattaccagtttcttataaatacaaacttgtacatggacattctgcaaacccagctgtcatattcttgcaactacttttgcaaaagcatactaaaaggttttaaaatgtgaaaaaacattatttttttcagagcaagaaaataatttactgttggtcttcaataatgtgtaaagtttttccagataaactaatcaaataaattagaacaatgtgacaacattgcaaatttgtcattagatgcattccttctaacgttaccagaggaggatgttactgatgattcaaggctgtttctgaagtctgtgtgttgctactgtccccagtgatggtgggacttacctctgtcctacttgatcacaaattatgttagggggaaataaagatttaatatttcattaaataaaaaagaaatttggttttgcctcatttaagagcaacaagaaaatggtggtgtgttgactgtgtttggccgcagggcacagacctttatggaagtcctcgctctgcatggcatcccaccagcttttcacctttcattcttattcttcacttttgctgctgagcctagctgtacaaacttgcactttcatttgctaatataaattcaattttattttaccattttagagactactaatgattaaatgtagaaggagaggatgcacatgtttttatgtggagtgttaaaaaagataaatttataccactgtaatgtgcagcatttattaaaagagaaattggttgaactgctaggttgaatgagagacttcatctattggactattttttttaatccaggcatatggtctttagtaatggcttgtaatttgtgaaaacattaatttgggggttttccctgttttcagttgtccatgtacacatagtcattatattagaaaagaaagctgttcaacaaacttgtttaatttgtttaaatcaacatagcatgaaacaccaaataaaatgtttgacatagaaaaa

SEQ ID NO: 263522 - DNA, 744 bp, Homo Sapiens
  misc_feature (523)..(523): n is a, c, g, or t
  misc_feature (660)..(660): n is a, c, g, or t
  misc_feature (693)..(693): n is a, c, g, or t
  misc_feature (699)..(699): n is a, c, g, or t
atatttttctgcattctttaaagcacaagagaatttggttataaaagaaatgggctgactaggcatgatttttttgtcttaaagagcttaacatgtaaaattggcaaaaaaaattttttaccttttataatacttgaaaaataagtacctctttgttctacaagtagaatgaataggagaagagtttaagcctgtttttttaaaatattattgcaaagagctctatttgtagaagcaaattataggcagattaccaggttcttataaatacagcttgtacatggacattctgcaaacccagctgtcacatttttcttgcaactccttttgcaaaagcagactaaaatgttttaaaatgtgaaaaaacattattttttcaaagcaagaaaataatttactgccctcttacataatgtatttataaagtttttccagataaactaatcaaataaattagaataatgtgacaacattacaaatttaatttgttagctgcattccttctgatgttaccacgatagantgttactgatgattcagggctatttctgaagtctgtatgttgctgctgtccccagtgatggtggacttatctttgccttacctgatcacaaattatgttggggaaaataaagatttaatatttctttaaataggaanaaggaatttggttttgctcgtttaagagcaatngagganaatgatgggaatgttagactgtgtttgggcacacagggacacggg

SEQ ID NO: 263523 - DNA, 960 bp, Homo Sapiens; identical to SEQ ID NO: 831

SEQ ID NO: 263524 - DNA, 1509 bp, Homo Sapiens
ggtctcagctaacctctgagagttactataaagaaaccctaagtgtcccaacagtggagcacattattcaggaacttaaagatatattctcagaacagcacctcaaagctcttaaatgcttatctctggtaccctcagtcatgggacaactcaaattcaatacgtcggaggaacaccatgctgacatgtatagaagtgacttacccaatcctgacacgctgtcagctgagcttcattgttggagaatcaaatggaaacacagggggaaagatatagagcttccgtccaccatctatgaagccctccacctgcctgacatcaagttttttcctaatgtgtatgcattgctgaaggtcctgtgtattcttcctgtgatgaaggttgagaatgagcggtatgaaaatggacgaaagcgtcttaaagcatatttgaggaacactttgacacaccaaaggtcaagtaacttggctttgcttaacataaattttgatataaaacacgacctggatttaatggtggacacatatattaaactctatacaagtaagtcagagcttcctacagataattccgaaactgtggaaaatacctaagagacttttaaaaataggctttcttatatttgatatttggaagaaaaagccgtaaggtgtatgtagaccacttaatcactaaatatctttgcctataggactccattgaatacattagccattgataatctacctgtttaaatggcccctgtttgaactctcaagctttggaagacctacctgttcttccagaagagaacgttgaaagtgccatgtttcccttttgcgtgatctctgttgatggcactctggaattgtttcagttaagtcattttagacatagcatttattatcactgtggatctctacttggttgggtgttatggaatttcttcgaagaaatatattttgaagaggtgtgggaggaaggaatacattttataaaatgttgtagtgaagcccacaattgacctttgactaataggagttttaagtatgttaaaaatctatactgggacaggttacaagaaattaccggagaaaagcttgtgagctcaccaaacaaggatttcagtgtagattttgtctttcttgaacttaaagaaacaaatgacaaagtttgaatggaaaagcctgctgttgttccacatctcgttgctgtttacattcctttgtggagcctacatcttcctaagctttttagcaggtatatgttgaacacttctgttttcatggttgagacagaatcagaggccatggatactgacaactgatttgtctgttttttttctctgtctttttccatgactcttatatactgcctcatcttgatttataagcaaaacctggaaaacctacaaaataagtgttgtggtttatctagaaaaatatggaaaatattgctgttatttttggtgaagaaaatcaattttgtatagtttatttcaatctaaataaaatgtgaattttgtttacc

SEQ ID NO: 263525 - DNA, 1714 bp, Homo Sapiens
  misc_feature (188)..(188): n is a, c, g, or t
  misc_feature (201)..(202): n is a, c, g, or t
  misc_feature (229)..(229): n is a, c, g, or t
  misc_feature (249)..(249): n is a, c, g, or t
  misc_feature (254)..(254): n is a, c, g, or t
  misc_feature (398)..(398): n is a, c, g, or t
  misc_feature (476)..(476): n is a, c, g, or t
  misc_feature (580)..(580): n is a, c, g, or t
  misc_feature (685)..(685): n is a, c, g, or t
  misc_feature (711)..(711): n is a, c, g, or t
  misc_feature (1695)..(1695): n is a, c, g, or t
ggccttccaacgacagagggacgaaggagggtgggaacgcaagattgttactcgtggcgggcgagcgaaatgaatcatacgagaggccccagactatgtatcctatctgatatgacagacgagcgcgtggtactcgtattatggggagacgagagactaacgagggatagtgtgctaaatgcgtagtnaggcggaacgagnncacacatatatagtcacaggtagagtnagtcgaaagaagagtgtctnctcgnccccgcgacacgcaccacatttcagtagagatatctgacgagacgcgtcgggtgaagacagccgcgcaacaacaagaagtgatgtaacacgagcgcgctctacggtcgacgtggacacccacacaacgctcgcgtgtgattcantggcgacacgcccgcgggcgcacgcgacaaatgtggatattgatgagtatagcgcggacagacaagcaacgccgcgcntatacacggggatggttgccacacgagatggagcgcgcggcgcgagcgcgagaatattatttaaaggaggtgtgtgtatagtggcagataacgacagcgtgttngtgtgtagagtgtagcacgcgtgtctcccaccagatgtgtggcgcgcggaacaaatgtgggtcttatatatacgtaggaaggctggccgagacacagcaacatcncgggtgctcgcgggtgagacatatgntggacaagacgacgcgcgcggaggggagcgcgtcatatacaatataagagatgataaacgtgagaagcgcgacgccgggcgctgtggagagaatgcctccgcgtggtgtaagatagaaagacacacgccgcagacagataaccaccctcctcgaagaggagcctccacccatttctgtgaggaagtgtgtggtgcgaagaaagcgcgcgttgtgagtttctcgcctcccgcggcggcccagtgtctgttgtatttggtgtggagagaaataccacagcccgggctttgttctgatgtgcgcgcgaggagtatcttcatggaggggaaacagaggatagtgggggcacagggttcgggtggacctcagggtgaggggcgccccgggcccccaaaacaagaaggtgttttagagaaaagcttttttagaagggccggggggcggcccgaaccctagagtaagcaatggggcggcggaggagcgggggataccgaggtaaaaggaaggaggagggtggtaatgcggagtaggagagacaccggcacgggggggagtaagcgcgggctgcagcgtggttcggtttaagttaagaaaaaagcctttaaaatgtttttaatacaaaaatactcatacacaattttccaaacacagctttccattttaaatgctattttcccccaactggcaagtctcaactctctatttcagtatatccctccccccaaaaagtgaatttcaagtttttaagtctaactatcaaacctggtgacagcacccagtattcctaaaaggaatctgaccttacattgtatgaagtttagacaccaataggcacatttaagtttgtatttaatttctgacggggcatttcacacctcaacagggtatggtgaggctgtgacaccccgtggacacagcattttactctactgactaacagtcatcaactacactcataggatcaagatatttgggcaactgacagnctttggcattaactgaatt

SEQ ID NO: 263526 - DNA, 412 bp, Homo Sapiens
  misc_feature (38)..(38): n is a, c, g, or t
tgcccaaataccctggcccctatgagtgtagttgatgncctgtttgttagtccagtaggagtaaaaatgcctgtgtccccacggggtgtccacagccctcacccatacccctgttgaggtgtgaaatgccccccgtcagaaattaaatacaaaccttaaatgtgccctattggtgtcctaaacctcatacaatgtaaggtcagattccttttaggaatactgggtgctgtcccccaggtttgatagttagacttaaaaacttgaaattcactttttggggggagggatatactgaaatagagagttgagacttgccagttgggggaaaatagcatttaaaatggaaagctgtgtttggaaaattgtgtatgagtatttttgtattaaaaacattttaaaggcttttttctta

SEQ ID NO: 263527 - DNA, 698 bp, Homo Sapiens
ttttgggtttgtttaaaagactttattgaaaccaaatgtcacagcacgttagtcataaaaatcatcagaatcatcggtgttatggtttctggggcgtaaagcagcctcaatttctgagttactgtcatcagactcatcccagagggcttgacaaaggacttccttcactagatgaaaaactagcttccgaagcaattttgttagctgtctttgtctcgaatgcaccgctgccaatattcaaacctgacaagtgtgacacagaagcatctgtcttttgaaacctgtcttcagtttgatttgtattatcctgaagggtggccttcttcagcaactgataggcttctgtttctcttctttgacagaattatcatgttctttcaaggtggcaacatgctgacccacctgtgccctcggtacgtctgagtctggtgtttgtccaggttctcttgttggtgcgttagtggaggattccttttctgaatcaggagagcttagggtttgcaaaatacaatttttttcagtggatagggcaactctttcttgctcagcatggattaattttaaggcctctattccatcttctccctccatcttgccacctggatttggctgtggttctgggctctctaaaatcagatcatcttcacttattgaaatggtaaggtcactgctggtgctccaactttcctcctcctccc

SEQ ID NO: 263528 - DNA, 513 bp, Homo Sapiens
  misc_feature (49)..(49): n is a, c, g, or t
  misc_feature (68)..(68): n is a, c, g, or t
  misc_feature (84)..(84): n is a, c, g, or t
  misc_feature (130)..(130): n is a, c, g, or t
agcccaacccttgctttttggcctcaaccggtttccttccaggggaccnaggagtttcaaggtggctnttggagccaaggggcnaggaaaggaaaatgtggctgcagattatccccaatcacagaaacangaagcctatccagttgctgaagaaggccacccttcaggataatacaaatcaaactgaaaacaggtttcaaaaagacagatgcttctgtgtcacacttgtcaggtttgaatattggcagcggtgcattcgagacaaagacagctaacaaaattgcttcggaagctagtttttcatctagtgaaggaagtcctttgtcaaggcatgaaaacaaaaagaaacccgtgatcaatttaaaatctaatgccctctgggatgagtctgatgacagtaactcagaaattgaggctgctttacgccccagaaaccataacaccgatgattctgatgatttttatgactaacgtgctgtgacattggtttcaaataaagtctttaaacaaact

SEQ ID NO: 263529 - DNA, 820 bp, Homo Sapiens
  misc_feature (351)..(351): n is a, c, g, or t
  misc_feature (353)..(353): n is a, c, g, or t
cggcggagagtagagagctagagggtgagaagcgctgggccggaccagaactgtcttagcttttccctctgcggctgctctggttggttactttgagcctgcctcctcagcgccgcaggagagacttaacagcaaaaatgactgtgtcctgagttcagcccccactgctctgggagcttccccctggtttctgcacctgaagaatgtcatcccagccgaaggttcttaggagcggggagcaacaaagaaaaacaaagaaaagcagacctgaaaattgggacctgggagaaatagacgagtgctctaaaccagtatcatggctccagttcctctgacaaggattcacatggngntgcaattctgactgtgctggtgatgctggttccaaggtccctcaggaacccctccccccagtctggtctgcccttgaactctatactggccccagggtatccccaggattgtcagaaaggcctgggccaggattcacctgggagagggatcagcatctcctgcgcgtggaataaccagcaacctaatcaaacatgtccgggccgccttcggccctcaagaaacttttctataaccatttccttgggagcccccgggccccaacaggcacagcgcaccatggggccaaagctggttttccgtagggaatccctgggttctgtgactagggggctggggatccccccaccaaataacaaccccccccgcgccgagaaaccgagggcgtctctggaaaaaaactccccgttgggagtgttttggggacccttcactggggctattttcccccacgggagctccccacgcg

SEQ ID NO: 263530 - DNA, 793 bp, Homo Sapiens; identical to SEQ ID NO: 910
  misc_feature (634)..(634): n is a, c, g, or t

SEQ ID NO: 263531 - DNA, 1146 bp, Homo Sapiens
  misc_feature (455)..(466): n is a, c, g, or t
  misc_feature (771)..(783): n is a, c, g, or t
gactctgttaagcataacgtttgtctgtcacattagtagattctgagattaaaaaaaatttttaaagagtgatcatttaaataatttctaaaagggtcttttcaagctctaacaaagtcactaacaaatgcattattttctacagaattagatgttagtagtacagtactgcatattcagggaaaaagtgtgaggaattgatttcaaaatagttcgttcttgtgtttgacctaagaatgattgtcgcatgaagtgtttgtttttacagtttagcatatataaacaaacatgataggattccttaagatgttaccacccagggggccacaagccagcctgctgtctcaggaagctgtagaaggagtgtttgtcaatttcttgtcactggtttgctgacttactgaggattaattgttgccttacaatgttactgaaataaactgtttaatataccnnnnnnnnnnnnttagaagaacggccaccaaaaagaaaatgaaaatggtcatacactgcttccaaaaaaaatcctgcaaaagaccaaagccttgaattcccaccaataaaaacccccccgggggtaacccccagtgttccggaacaaacccaccatgaaagttttgggggcccctttttggtattaaaaaaattttgttctccaactttggtctgggggggtcgggcttccccccctcgcacagggaaacctcttctcaaaatttctgtttccaaaattaaatatcaccggcttcttgaaaaaaaggtgggaaggtnnnnnnnnnnnnngttaaatataatcgcaccccgcgccatactaccaaccggttccctccagaaacacttttaggaggggggtcggccgtaagaggaatttttttcccccgtggcgcccaatacccacggaggggccccaccccccacggcgcgccctcaaatttatgagaaaatagctctccacacaccccacaccttggactggtaaaccattccccgccgcggcgtggatgcgattatgttacacacgacaatatacccctcccctcatcacgatacacccccctctttcacacgggtaattattggccacccagccctttttgcctctctcccacaggcgcggcccccacaaacccactgtttgcccatcaa

SEQ ID NO: 263532 - DNA, 406 bp, Homo Sapiens
  misc_feature (15)..(15): n is a, c, g, or t
  misc_feature (254)..(254): n is a, c, g, or t
aaaatgcctatttgntccggtcatactgttgttccagcagatgagcccgccccacctacagaacggctactgccccagggaccctgccccaggcccccaccccaagggcctccccaagggttgagatttcctgcagaccctatagcccagcacacttagtcctgcccctatatagagttcctcttcgggaagcttttgataaggaattctcagaccgataggatgtctgtctgggctttgctgcgggacagtcntaactgtgggggctaggggaaagcaggagagtatcgatcaaagagtaagccacacacggataatcagttactagggatggaggtgtgagggttcattatattattcattttactgttgtatatgtttgaaaatgtctataataaaaagcttt

SEQ ID NO: 263533 - DNA, 1058 bp, Homo Sapiens
tcttcggagttgtaaattgaggagtgcatccttgctcgtcttgaaccattctgtttgcaatggtgagaccttacataacctagccttgcagggccgccacacaaccctggagtcctagagctggaggaacctttgtatccatctgacttctcattttgcagaatatgatgagaaagtagaggatcgctctgttcaccactcttgctattccattagtggggagatgcctgctagcatgtgtgaggggaacactctgatacactgggaagtatcggaaattcccagaaacacaaacataaaataactctcctagacccaggtactggggactgtctcagtccgtgtggcatgataaataaaaggttaggatcaagtctttgtatttttcaagatgtggtagctgattattcctgttttaagtactctgaaattgatctgtgatcaataatactaatatgttatcttttaccgtattctgcctctcactattgattttaattagttaggagtatttgagctgttatttcttgagcttaatatttttttaggagttaactctttaagggagataatcatggctgtagacaagccagggctggctgacgtgccttagaaggtttgaatgcaataaagcggtgtttggcgttctcctgcattgtagtgcgggtacaaaatgctatttgttcgtcatactgttgtcagcagatgagccgcccactacagacggctactgcccagggacctgcccaggccccacccaagggctcccaagggttgagatttctgcagacctatagccagcacacttagtcctgccctatatagagttcctcttcgggaagcttttgataaggaattctcagaccgataggatgtctgtctgggctttgctgcgggacagtctaactgtgggggctaggggaaagcaggagagtatcgatcaaagagtaagccacacacggataatcagttactagggatggaggtgtgagggttcattatattattcattttactgttgtatatgtttgaaaatgtctataataaaaagctttaaa

SEQ ID NO: 263534 - DNA, 600 bp, Homo Sapiens
gattgtgcaaagtttttgctagttttatcttctgactttgggactagtttttgctgcagagttgtgttgctttgtgattttcctctgggatagtgtactgtacacaaccagatgtgttccacactccgtgactccgcagtttgtcctggagtgacatacacatccaccatggaaagggaagcatctctgcctgtggattctcaagtacttggaagcacctctcctgaggaacctacaggattctaaggtttcctaggtcactgaacaactaatcttggtcccctgaatatttctaggtttgtaagtgcagcagttttatttcctctagaactcatcctgtttcaagggaagtacctaagaagatatagagtgtttctagggtaagggacctgcaggtgtaagcatagatgaaataactgtcctgtcacatgtgcagcaggccatggagtgtagcgggcatcgctgccgccattcctgcagcatcaccataagcagtgcagggtgtctccatcgagctgtttggttccatgtgtgtttaacatgtgcagaagtagcttctctgtttaagtttaataaagttgagtttcaccagtcaaaaaa

SEQ ID NO: 263535 - DNA, 873 bp, Homo Sapiens; identical to SEQ ID NO: 178358

SEQ ID NO: 263536 - DNA, 1141 bp, Homo Sapiens
  misc_feature (806)..(823): n is a, c, g, or t
  misc_feature (889)..(1007): n is a, c, g, or t
gggtaagaaacaaggaaatcactccagattctgtcattccaaggaaagggaaggggacagttcaggtttctcagctgttcttaggggtcactgagcgtctacctcctcctccagaggagcctggctcagaacacctagaggagggggccggggatgcaccccccaccagaggctgccttcagcgtctcacgggtgcaggacagcgctcaggcttgggctctaagctctgtgtctagtgtagaacatggggaaggagcatcttaggaactgctgaagtaacttcttactgctctcacaattctaaggaagcgggagaacggcctcctaccaacagcgcccaccccagagctgcctgggaaagggcagttttactgaaaggtgctttactgttcacctgcatctttcagcagctcccctcctgccctcacctggtcttttccctctttatccccaagcctttatgcttgagtcccttccccaggggctgcccacccgacagttccaggcattccctacctgagcttcttgtctgcttttccttctcccactgcaagcggctgcttgtggggcctgggatgagccctctctgtccccaccggccctccttgccaagccattcctgggtgagttcaggcctgcgggagccacacattcatctccacctggacacttgagccgcatggccagacccctcccacctgatgcggtggtgcgtgtgatttgtcaaaagaaagccttctggatgctgttaagatgtacccttcaggtgaacctggtatcagacccacagtacttgctgtttgagnnnnnnnnnnnnnnnnnnggtcacctgttctccagcccttttctcttacctggtatttccttcctttctcctcacatcaccccnnnnnnnnnnnnnnnnnnnnnnnnnnnnnnnnnnnnnnnnnnnnnnnnnnnnnnnnnnnnnnnnnnnnnnnnnnnnnnnnnnnnnnnnnnnnnnnnnnnnnnnnnnnnnnnnnnnnnnntttgtgggccgcctcggcccccaaaaaatttttaaaaccattttttgggggcgcgggcccccaaggaaagggaaaaggggcaaaatcggtttccaagaaaacccggggaaaaacaaggggtgggattccccccc

SEQ ID NO: 263537 - DNA, 765 bp, Homo Sapiens; identical to SEQ ID NO: 178361
  misc_feature (258)..(266): n is a, c, g, or t

SEQ ID NO: 263538 - DNA, 287 bp, Homo Sapiens
  misc_feature (33)..(33): n is a, c, g, or t
  misc_feature (231)..(231): n is a, c, g, or t
gtgatggaatccctgggcctgaagccgtcccgnaccctccagcacatcgtgacgctactgaagacccaggcctgaggactatagacaggtcagcaaaggcctgccccgtcgccctggccaccaccatggccaccatgcggagtgtgaattactgaccccaccacacaccggaccaccaagagagccagggctgctgtttcgcgactcaccagcacagatttgctcagaaanctctgcccaagattgggcagaagttactttaaaaagacttggttcagctggtcacg

SEQ ID NO: 263539 - DNA, 603 bp, Homo Sapiens; identical to SEQ ID NO: 175862

SEQ ID NO: 263540 - DNA, 1125 bp, Homo Sapiens
  misc_feature (11)..(11): n is a, c, g, or t
  misc_feature (90)..(128): n is a, c, g, or t
  misc_feature (666)..(666): n is a, c, g, or t
  misc_feature (672)..(672): n is a, c, g, or t
aaagaattttngtgggtcggggggacagtaaacttcctgggccacgtgggtccttcaggagtttttcaggcaagtttttcctctgttttnnnnnnnnnnnnnnnnnnnnnnnnnnnnnnnnnnnnnnnctaatgtgcgtgagaatgggcctggcacacctggggtgctcgggggtagggctgccatgctgcagagctgatggagtgatgttgtgggcacaaggcatctgtcagctgcctcctttaacagccatgccttctggaatctggaagaggacaccactcctgcagtcaccgggcagccacatagcagctgcaggtcccaggagggcctgaggtcaaagctgtggaaggccctcttggtatcagggctctctccccatggcctcttccccacctctgattgctggttgtggccccatagctcatcacccctgtctcctgctgaatgtgcagggctgatgtggcactgaggagctgactttggtcaaaggccaggctctgcccagcaggggacttgactgcccctcccgctgcgtgtccaggtccaaagtggagagcctgcctttgggtttagttcccgaatcagaatcccatctcaccagggcgaaattttaatttaaaaacttaaaaagagacttttatacccgagcaaccccgacgaagnaaaccntcccttggtcggccgccctcggccctcgaaaaacttttctaaaaccattccttttggccgggcgggccccaggtagggtaagtggaacatggcccatagcctgttttccctaggaagatccctgggtacatggactaatggctttgggaattcctcacccaaataaaaaaacgccccggggggggaaaaccgaagcggttcttgaaccaaattcccggattggaagttccctgaagggccatttactgggaatcctattccacaggggaagtcccaaagccagagccttggattattcaaaatttaacggcccccgggcccctggccacttccatttcggaaaatacctggggtgggaaatttccctttaaaggccttttcctgggcgcgactctggggaaagccccttccaccaaaaggggggatagtggatgaaaacccctgaaaatcccg

SEQ ID NO: 263541 - DNA, 815 bp, Homo Sapiens
agaagctgagaggaactcctcactcagctagcttcaggagccatgacatcatctctaccatggaaattccactcactctcctgtgcccccacatttgtcctaggcctcagagtccctataaagagagattcccaactcagtatcagcacaggacacagctaggttctgaagcttctgagttctgcagcctcacctctgagaaaacctctttgccaccaataccatgaagctctgcgtgactgtcctgtctctcctcgtgctagtagctgccttctgctctctagcactctcagcaccaatgggctcagaccctcccaccgcctgctgcttttcttacaccgcgaggaagcttcctcgcaactttgtggtagattactatgagaccagcagcctctgctcccagccagctgtggtattccaaaccaaaagaggcaagcaagtctgcgctgaccccagtgagtcctgggtccaggagtacgtgtatgacctggaactgaactgagctgctcagagacaggaagtcttcagggaaggtcacctgagcctggatgcttctccatgagccgcatctcctccatactcaggactcctctccgcagttcctgtctcttctcttaatgtaatctcttttatgtgctgtattattgtattaggtgttatttccattatttatattagtttagccaaaggataagtgtcccctatggggatggtccactctcactctttctctgctgttgcaaatacatggataacaccgttaattccatgtgttttcataataaaactttaaaataaaatgccccccccaccaa

SEQ ID NO: 263542 - DNA, 991 bp, Homo Sapiens
  misc_feature (560)..(560): n is a, c, g, or t
  misc_feature (874)..(874): n is a, c, g, or t
  misc_feature (940)..(940): n is a, c, g, or t
ggtctcagccaagacaggagactctgtcttcctgtgctttcagaaagttgctgctgaaatccttgggatcaaattaaacaaagcagaaatagaacagtcacagcgtattgtcagggcagaaatagtgaagtacccggaagaagaaaatcaacataccacctctactcagagtagaatctgttcagtacagtagtgcagagggtggtgaaggcagatattgtaaactacaaccaggaacctatgtcaaggactgttaaccctcctagaagctctatgtgtgcagttcagtgagcgcatttttcttttgtgttgatagttctggctgcccttcacctctaggtgggcccgaggacttctaggaacttgttttatcagtgaccatctctgtagttcagttaacactttactcccaacttgcttcatcattgctattgcctcacagtggcaggcagctccttggatttgaaagaattcaactttgggaccacacacttttgaattcaaaatggaaaacccattccctggaattagactgcttcattgcaaaagaatgatggtgntttctttgtatggcctttgcttctttttttcattgatgtaaattttttttaacttaatatgaaaactctccaagtcttgatcatcagccaggattttgccacagcaatttcattctcttatcggaacttgtatgtgtcaaagtatacttcagagtgcaaacattaagcaagtaatatattttacctacagatacttatgaagacattctttcgctatcgtgagtaaaagtatataaagctgtttctaactgaaaatgcttgaaataagcctgtaatagaaatattttttcattttttaaaaagggcctaaatgnttaatattggagtttgtaactcacaaagtaatatttgatattggatttttattaccggatcgttgnccgtatgtattggggaaaacctccgggttaaaagctttcctgaattctgaa

SEQ ID NO: 263543 - DNA, 824 bp, Homo Sapiens
  misc_feature (488)..(498): n is a, c, g, or t
  misc_feature (500)..(507): n is a, c, g, or t
  misc_feature (510)..(510): n is a, c, g, or t
  misc_feature (513)..(578): n is a, c, g, or t
  misc_feature (583)..(583): n is a, c, g, or t
  misc_feature (606)..(620): n is a, c, g, or t
ggggtgtttagattctggaggagaaaaaatgagttacaatgtcaggtgtttttaaaaattccttttagagacagtcttttgggaaccaaagtattttactgtaaatctttaaaataacagaattcagtgctctttcatttgttaatgctgtccagatttttcacaccagttatactcagttaatactagttttcagaacattagtccaaggctatttcaagttttccattgaatatatgcttatggttaaaagaaaaacgaatggttttataattctgtgtattttgtcatatgccttagcagagtaagtcatttttccattttacttaggaataagctttttcgaactgaaaattcatggtaaaataggatttctatctaatgttaatccattgcttatttgtattcaattccattgtctacagtttgcttaaatgttgactaagaatgattggagtcaataaatttgtactgtattttgcttcgannnnnnnnnnncnnnnnnnnccnccnnnnnnnnnnnnnnnnnnnnnnnnnnnnnnnnnnnnnnnnnnnnnnnnnnnnnnnnnnnnnnnnnnaaaancctttcacaaactcttccttcgnnnnnnnnnnnnnnnaccaaaacacaaaaggcgacaaaatcgggttccccaaaaaaacttcgggggattggcgtggggggtggggaccctcgagaaataatatatacaccctctgcggccaccgggcggtcctcccacaaaaaaatcgcagagcggagtgtcctcacgctctttccatcgggaggcatctccccgcggtataccatagccggcgcctaa

SEQ ID NO: 263544 - DNA, 346 bp, Homo Sapiens
  misc_feature (301)..(301): n is a, c, g, or t
actttgaacattagcattaagttggttaccgtacacatccaaaggcccagcatctcagaaaaatcattaggcggcacacctgtaccagagtctcacaagaataaaatatacaatgctacattgagtggttaaaaatacacaaaaaagtagttttaacaatctataaattttttatacttaaaatcatgattgagttgaaataaaaaagtgcatttcaattgctaaaaaaataatatcggtatagttaacacaagggggaaatcagtacattgaggggatctgacagggatgctgggaaaanatgactcaggggaagccggggcaggcatggggctcctttgggggg

SEQ ID NO: 263545 - DNA, 395 bp, Homo Sapiens
  misc_feature (40)..(40): n is a, c, g, or t
  misc_feature (145)..(145): n is a, c, g, or t
aatacccccctgtttccccatttcaaatttggtagggggnaggggatgggaaccacctccccagtgatgggtaagaggacctgttatgaaacgaaacacccccccgtgttaataacttgggtctgaaatctgtttttatgagccngggccccctgtgcctctagtatacttgtattgactctcatagttacccttttagttttactgtgttctgtgaaaatttgtaattggttgagaatcactgtgggcgtccattcttattcaactaaatctccacaggttttttgagctggtgtggattagtttaactcttgtattcaaccattagtgctaccaccttctcacattacaatacaattactggaagcaagtactgcatttcctatgcaacaaga

SEQ ID NO: 263546 - DNA, 1069 bp, Homo Sapiens; identical to SEQ ID NO: 1559

SEQ ID NO: 263547 - DNA, 1010 bp, Homo Sapiens
  misc_feature (50)..(50): n is a, c, g, or t
tctgtgattcctggggaagctgaggacaaagtgagttcagagcctagcgncgttcacctgtggtgctggaggagcggaggactcaaggtgcaacgtccgagagagccttttctctctggatggcgctggagcacacttccctgacagagaagaggagtattacacagagccagaagtggcggaatctgacgcagccccgacagaggactccaattaacactgaaagtctggaaatccccaaaggtgaactgtgagggagagaaacattacaggatttagaaaattttcactcttgaaaattttaaatatgttcacaggaccttatggattttctgaacccaaacggtagtgactgtactctagtcctgttttacaccccgtggtgccgcttttctgccagttggcccctcactttaactctctgccccgggcatttccagctcttcactttttggcactggatgcatctcagcacagcagcctttctaccaggtttggcaccgtagctgttcctaatattttattatttcaaggagctaaaccaatggccagatttaatcatacagatcgaacactggaaacactgaaaatcttcatttttaatcagacaggtatagaagccaagaagaatgtggtggtaactcaagccgaccaaataggccctcttcccagcactttgataaaaagtgtggactggttgcttgtattttccttattctttttaattagttttattatgtatgctaccattcgaactgagagtattcggtggctaattccaggacaagagcaggaacatgtggagtagtgatggtctgaaagaagttggaaagaggaacttcaatccttcgtttcagaaattagtgctacagtttcatacattttctccagtgacgtgttgacttgaaacttcaggcagattaaaagaatcatttgttgaacaactgaatgtataaaaaaaattataaactggtgttttaactagtattgcaataagcaaatgcaaaaat

SEQ ID NO: 263548 - DNA, 435 bp, Homo Sapiens
ggtgcctgctttcagttgagggttgggggcaatgatgagcatatgaattttttctcactctagcaattcccttttctaaatgacacagcatttaaactcaaatctggattcagataacagcacctgcacatcctgcacctcctccctctcccttcaccctcacccctgcccggcccaagctctacttgtgtacagtgtatattgtataatagacaattgtgtctactacatgtttaaaaacacattgcttgttatttttgaggcttttaaattaaacaaaaatccaactttatttttagttgtaactgcttgaggtatgttttatgaattaagtgacagatttgttatcctttattaacgtactttgttggtcagcactgggctgacaaaaattttttcttgctaataaatttagttgcctgagccaaaatctcc

SEQ ID NO: 263549 - DNA, 651 bp, Homo Sapiens
  misc_feature (255)..(255): n is a, c, g, or t
gtacacaagtagagcttgggccgggcaggggtgaggtgaagggagagggaggtgaccctgctacctgccagtgcatactccaggcacccttcggcactgtcccatcaacacagagctgggagtgtgtccctgtcccacggtctttctaggcctgacttggggagagcacgtaacaggaagagagacctctgagccctggccaccaggctgcaggctgttcgactgttcctttcactgagaatgctactcttgaanacccagcaaatgaagaaaacgcgcctacagaaataccacaacagtagcctttaggaagctttttcttctggagagaactaggctcccatctccacaacccaggccttgggggtaactcggctttttttgcctgtgggttcctgccatcgtgggtctggctttcttggctttttgctatggtatttcccctggaggaatttcacactgtgcaaacagtctttctcttggctattttggtcagctcagctgggccgtaagccaacaaagcagtttctaagcccaggcttttccagttgcctagcctggaagaattcagagctggtgagggaaaagcaggccctggctggttttagagaacaaagttggccctcaaagaaagctcacaaatggggtatt

SEQ ID NO: 263550 - DNA, 397 bp, Homo Sapiens
  misc_feature (13)..(13): n is a, c, g, or t
  misc_feature (43)..(43): n is a, c, g, or t
  misc_feature (136)..(136): n is a, c, g, or t
  misc_feature (144)..(144): n is a, c, g, or t
atacccaacaaanagtaaggctttaaggaaagctttttccttnctgggaagagaaactaaggctcccatctcccacaaaccccaggccttgggggtaaactcggcctttttttgccctgtgggttccctgcccatncgtgggtnctggctttccttggctttttgcctatggtatttccccctggaggaatttcacactgtgcaaacagtctttctcttggctattttggtcagctcagctgggccgtaagccaacaaagcagtttctaagcccaggcttttccagttgcctagcctggaagaattcagagctggtgagggaaaagcatgccctggctggttttagagaaaaaagttggccctcaaagaaagctcaaaaatggggtatgctcgtgcc

SEQ ID NO: 263551 - DNA, 470 bp, Homo Sapiens
  misc_feature (26)..(26): n is a, c, g, or t
  misc_feature (39)..(39): n is a, c, g, or t
  misc_feature (44)..(44): n is a, c, g, or t
  misc_feature (62)..(62): n is a, c, g, or t
  misc_feature (68)..(68): n is a, c, g, or t
  misc_feature (113)..(113): n is a, c, g, or t
  misc_feature (196)..(196): n is a, c, g, or t
  misc_feature (236)..(236): n is a, c, g, or t
  misc_feature (253)..(253): n is a, c, g, or t
  misc_feature (291)..(291): n is a, c, g, or t
cccccggcctcagaggtcctctcctncccgttaaccggnctctnccccccagtcaggccccngaaagnccccgggggaccagggacaacactcccccagcccctgtgttgaanggggaccagtgcccgaagggtcccccggagtatgcacctggcaggtaagcagggtcaccctcccctctccccttcaccctcancccctgcccggccccaagctcctacttgtgtacagtgtanattgtataatagacaantgtgtctactacatgtttaaaaacacattgcttgttanttttgaggcttttaaattaaacaaaaatccaactttatttttagttgtaactgcttgaggtatgttttatgaattaagtgacagatttgttatcctttattaacgtactttgttggcagcactgggctgacaaaaattttttcttgctaataaatttaagtcctgaggcaaaatcttca

SEQ ID NO: 263552 - DNA, 599 bp, Homo Sapiens
aagtgatccatgttggacataattgagtttttaaatcagtttattgggttctagggctgtagaacacatagatactagatttttaatttgttcatggttattctacatttctagaaagttcttatcagcaagatggtcccataagcaaatttcttgtggtttgtacagatttgttaaaatgtgaacgttttctaactgcctcgtagggtagaaaccaatatttttcaggatgctgtatttcactcctgtaaggactttttctttattgtcacattcataatgctgatacttacatgtaagttgttcatgttgcagaaaaaggttatacgtaccacggattctctttaatattgtacagttaaactgtatttctgatgttgcaagccattttgttttttcattgtacatagacacattgtctctttaaaatgctgctgaaattgtagagagtatagccaaaacagtaataaacaatgacagttaaaatgtaaagactatgaaaattacattggaagggagctttcaagatggtaggatattgactaactgagctccttcacttaaaaatcagctgaataaattccttaagtatacttcaa

SEQ ID NO: 263553 - DNA, 806 bp, Homo Sapiens
  misc_feature (35)..(35): n is a, c, g, or t
  misc_feature (51)..(51): n is a, c, g, or t
  misc_feature (77)..(77): n is a, c, g, or t
  misc_feature (104)..(104): n is a, c, g, or t
  misc_feature (125)..(125): n is a, c, g, or t
  misc_feature (135)..(135): n is a, c, g, or t
  misc_feature (168)..(168): n is a, c, g, or t
  misc_feature (182)..(182): n is a, c, g, or t
  misc_feature (231)..(231): n is a, c, g, or t
  misc_feature (582)..(737): n is a, c, g, or t
  misc_feature (750)..(763): n is a, c, g, or t
ccaaggaaccgggcagcaatcttggaaaagccttnctgaagctttataagnaccctggaaggggttttggagggggnaacagttacccaagggctgccctttangtctttggtccaccaaagccnccttggatgntatggttctgttaaaggacttaaaagtgattgnttattacccagggnctttcctggaccttcggggaggagactccaaaaaagccagagaggagcnacaaagtggaaagttaattggggttgggcttgcctttatccgggttccctcattttccttccaatttaaaccctgaacataacaccccttctccgataccctatcccagcagacccccgggttgggaagccctgtattaaattttgagaatgtacacagttttcttttgtacagtgctttacaactgctaaaagttaacttgtttaaagcaaaacaagaccttgaaaggtcaatcatattaaagctggtttgattattaatagttatcttttaggaagaagcttttttccctatgtaagatgtcatactgcagatttaaaatatagactatcaataaaatgcatgaagtgnnnnnnnnnnnnnnnnnnnnnnnnnnnnnnnnnnnnnnnnnnnnnnnnnnnnnnnnnnnnnnnnnnnnnnnnnnnnnnnnnnnnnnnnnnnnnnnnnnnnnnnnnnnnnnnnnnnnnnnnnnnnnnnnnnnnnnnnnnnnnnnnnnnnnnnnnnnnaaaaattgggcgnnnnnnnnnnnnnnaaaaatttttttaaacctttttttgggcggggcgcccccaaag

SEQ ID NO: 263554 - DNA, 902 bp, Homo Sapiens
  misc_feature (850)..(850): n is a, c, g, or t
ggtcatcaaaacataccttctcagggacacttcagtgagagggagagaatatctatgtcagaagtggccagtcatggaaaaccccttccatctgctgagagagaacagctacgactagaattgcagcaattgaaccatcagattagccagcagacccagctacgtggactagagagggaggcaaacaccctggcaggccagtcacagcccccaccaccgccacctccaaaatggcctgggatgatctcaagtgagcagttgagcttggaactgcaccaggtggaaagggaaatctggaagagaacacgggaactgagtatggaaaaccagtgttctctggacatgaaaagcaaactgaatacaagtaaacaagcagaaaatggacaaccagaaccacaaaacaaggttccggctgaggaccttacattgacattcagcagtgatgtaccaaatggatcagccttgacacaagagaatatcagcctcctatcaaacaagaccagctctctgaacctgtcagaggaccctgagggaggaggggataataatgactcccagagatcaggagttactcccagttctgctccttaaaatatgaggagtcctacttttatcttctgctcctaatcagtttgtcaggcataggggtaggagaacgcataacttctaaactttttctcttaagagcggtcagagaaatccaggaaattcaccagaggcaatgtgcacaaacaccactactaaaaacaaaccctgcacatagttcacattaatgcatttttttaatttaaagaaaaagaaaattagcagtatctgcaagcaattcagattaaatttggttttggtctgngaatgaactttattttaataactttggacgccttggatccagggctttaaaa

SEQ ID NO: 263555 - DNA, 769 bp, Homo Sapiens
ctggggagaagtgagggctgggcagctgattttgtcactgtcttcacaacctccgtgctgggcttgtagaccactgtcctggctgctctcatgcctgcctgataccctgcttggtcaaatccccggctgcttccttctgcacccagaaattccttcccactcatgttgttcccacacacaaaccaagagccaaaaatgagtgtgtctattttatatttaaacccagctgtttggaagcaattataaaacttctcccacacaccaagaaccccagaactccccacccagaaggaaaggagacttagggtcctggtcccacagtctttaatgctgtagagtaggagaggggacaggcagagtgagggtggtaaaggactactcttgtccctgagaaggcagaggtgctggctggcctgcccttccccaggcttggataccttgggcctttcccttattcctgcaccaacagcaaactcagaaggaaaaaacaaaacaaaactctaaaggtaaacgcggtccttctccctctctcatgtggctcctcctgcccctacctgggagaaggttcaagtattgcgctgatgggtttgggcaaggaccacagaggctggcatggagagccctgcctcctcctactcctcctgtctccttacctgaaaaggaggggagggatggataaaggaatgggtaaacaaaattaattggtaacacataaagttagtaaatgaataaatacaattaaataaatgaataaataaacaagcgaaga

SEQ ID NO: 263556 - DNA, 1405 bp, Homo Sapiens
  misc_feature (85)..(85): n is a, c, g, or t
  misc_feature (618)..(629): n is a, c, g, or t
ggactagatgttattagagtcttcggtgcgtgtgtgtaagtagggtactaattacggtggtggtcggtgtccagagcgaccaagntacacatatctgtcccgggctcacgagactcgtggtctggtcagttggttagtggcacggagaaacgcgagtagtttctaacgacagtggggcagagagacctgtttgcacgtcttcttcatgcacgcgaacctacgtcgagtggtagagaggcgatctatagtcgcgctaattgggagcacggtgtagtctatagtccacgccggagttattctggcgatgctcggtgttggggcgaggtgaggtgatataagaatgtggcggtgtgtgggatgggataatgtgtggcggaggtggtcgggcggaatgggcagaggtagcgatagtgcctgctgtggctgccgagatgcgactgtatggagattgtagaggtcgtgttctggaggcgtttatgtcttccaagtgagcttggagtgtttgtgttgtccaggatctccgagagtcgcggtgtagaccagacggagagttgtccttatgtttgggatagtgggcgccaagcgccccgaattctgtttgtcgtggcggggtggtgnnnnnnnnnnnnggggaagaatttccatggcctcattggtatgtttcatgggtttgtcttccgaaaccaggctctgacagctatatccaggtacatttgtgggaccgggcgggccgaaaagaaatgttctaagaagctcttcgggtggcggagggcgccgcgcacagatgggaggtcgttttgagtgatggttggttctggtgtgggggttcttctcgtgcggtaaaatcaatcagaaatttatttttcttatgtaagtacaaaacacctcttttcatcagtggaccccactcctaggcaacctggccatggtgcccggatgcaggcagtattcaagagtttcttccaaagtcaccagggtgaaaagccattctactacaacctctacatgaccttttaaagtgtacaacttataggacagtcctttctggagtactgtggagggtgaatcaaagcttccagtgtaagtttattgtctggcgaaaacaccagagccaaaaattccaccaaggccctggaaagactgaagtcccctctgtctcatacagtaatcatccatgagatctcccggagcctgggtgatcattacgcccatgatacctgaggcagcgttggactctgccaggggctcctcagacccaaagtggagctcactttggagagtcggagctcatggccgttagcacctaaggatgtggctgaaaggcacagagcaagaaagggcttcagagaccaggcacaggttaattttagaactggagcacacgtgagagttgtagtttcaccac

SEQ ID NO: 263557 - DNA, 766 bp, Homo Sapiens; identical to SEQ ID NO: 178379

SEQ ID NO: 263558 - DNA, 992 bp, Homo Sapiens
  misc_feature (920)..(920): n is a, c, g, or t
  misc_feature (937)..(937): n is a, c, g, or t
  misc_feature (955)..(955): n is a, c, g, or t
  misc_feature (964)..(964): n is a, c, g, or t
  misc_feature (976)..(976): n is a, c, g, or t
ggtagctgcgaatccatctcccttggcctctccaccttcatgatcgacctcaaccaggtggcgaaagcagtgaacaatgccactgcacagtcgctggtccttattgatgaatttggaaagggaaccaacacggtggatgggctcgcgcttctggccgctgtgctccgacactggctggcacgtggacccacatgcccccacatctttgtggccaccaactttctgagccttgttcagctacagctgctgccacaagggcccctggtgcagtatttgaccatggagacctgtgaggatggcaacgatcttgtcttcttctatcaggtttgcgaaggtgttgcgaaggccagccatgcctcccacacagctgcccaggctgggcttcctgacaagcttgtggctcgtggcaaggaggtctcagacttgatccgcagtggaaaacccatcaagcctgtcaaggatttgctaaagaagaaccaaatggaaaattgccagacattagtggataagtttatgaaactggatttggaagatcctaacctggacttgaacgttttcatgagccaggaagtgctgcctgctgccaccagcatcctctgagagtccttccagtgtcctccccagcctcctgagactccggtgggctgccatgccctcctttgtttccttatctccctcagacgcagagtttttagtttctctagaaattttgtttcatattaggaataaagtttattttgaagaaagatattgtttctttagtctcaaaacaagagactaggaaagatccaaaacacagagcaggagtccacaggggaacctgccctgcctcagtaaaaatacagtgttgttgctgtaggaagactcccggattctaccccagggtacttcatgagaacgaaccccttacagagaggccntacaaaacagatttagnggggaagacagaggggtncaagggagntggtctctcttnttaaagtaggaacacc

SEQ ID NO: 263559 - DNA, 1657 bp, Homo Sapiens
  misc_feature (548)..(559): n is a, c, g, or t
  misc_feature (1165)..(1178): n is a, c, g, or t
cttgcataccttctataccatattcaacccacaggagtttggaagaaccgattgctaacttatgctacattcatgtcagaagaggtgggaaaattcttacaacaggagccatactcataggaaatcaagttgctataaataaaactaactagcaataaatggataagtgatttattggggggacactgattaaaataatttgggttgggaaccttaaccttgcaacactgctaaggttaactcctatgaatgtggtaaatgaaacacgtccagggtgggggactgagggatcagagatgttacatgagccatccatttcttcacagtggtctcagagatctgaactcttttccacacttaaagttaggtcatgatactgggatctaattgacagcagaggtcctctgtctggtgtgagacacccctttctctattagtgcttcttttcttttggctactcgtgtggtaggtagaaaccaagtttgtgatgttcaggagatgtacacacctctaagccactagtaatcaagtgttttaaaaagtagttnnnnnnnnnnnngggaaagctcaaattaacataatcaaaatgtttttaaaataaatctatgtaatgagaggtgaccagcaagcctgtatctatgccagagtgtggtagaagagaagaaggcactctcactgaattttataagtatactgaagtcacctaacctcttagtagacatggctcttgccaaagaataccacggaaagagctcttctcttccatgacatcctcaccatatcctgttcttaggtcactgccaaccaataaagcaaagctcccagcaagttgacaaaaagaagggggaggtctgggggaaaaggggaggagacgaaggacaagagcagaacaacaggaaccccttctatttgcccaagacaaagagactttccaaatcactgcagttgtcacaattacacacctggaggaatcaatgcacagtaatggagggcacacgaccacaggaaggaacttggcattctacattactgagacataagcatattaacttgcttgacgtttgtttatttattttaaattcagcccactgcctttggggcctgtccagaaccactccaatttcctttatgggtgagtatcttacatctgtggagtgactggacnnnnnnnnnnnnnntgtgcgtcccccttgctcaggatgtctgggtgtatgtacgaaggcactaaagcggttttagagaaattgcaggcagcaaccccacccactccctttacctgtcgagctggagtttcccttcccactgggaagcttaatgtttaaaagaaagctgtggtcatgcttgggaattctgacccctggccccaggagggaatacaaaagaattcaacatcaccaaaaactgaaaggaaacactccacatctccggctaagggatggggataattaagcagcagatcttcaaaacagcaattaaaacgagcacaacagtagctgggagctaaaaaagtaaaatcacttgttccttattagattcttctatattttctcctcctcccaaaacaaacggaggtaagacagacattcttcattaataggacagtccatagataattttcctctagtaatgcctatatttaaaatttgttccaaaaatt

SEQ ID NO: 263560 - DNA, 736 bp, Homo Sapiens; identical to SEQ ID NO: 1637
  misc_feature (45)..(84): n is a, c, g, or t

SEQ ID NO: 263561 - DNA, 1204 bp, Homo Sapiens
ggggaaccccaaaaagccgaaacggaagcaggatgaataaagaaagggagagcacatgaagctttgctaattataacccctcaccttgaccagagtcattgatgtcctgatgtgaaacaacccttgcccaaccccacgaagtctcctatttaatgtgatggaagcacaacccctctctcactttgctcctatttctttctgctcttgggatttctggtttaggaagagatgtggttcaggtgctaaacagtgtgtctgatgatcccttctctcccactcacatttcaacccctgcccttgtttggagctaagggaagggcaaaaggctcagatatgattctctatctcttgtgcctgaggcctggagcctaaggagctgtagggtctgaggggcaggggaggcccatatcttgtttcaggtaaaggacccagtatttcccctccttgtacttttgccttaggttctcaagggacaatagtcttcatgttggattctccaacaggctgggtgcatgtatccccctactcctaccctcatctcatccttaaggcccagaggtagcttggacaagccctcccttttcataatcatttggggaggcatgggctgtaattcctttaagctttctccacttctgtctcccacatatactaaaattcctaggtactaggctgtgtgtcttgggatcttaagatcaatgaacctttccccaatatctagtctttgcaaattctagtagaagatttccacagtgaaatcagtgagccagaccaactctacatctcctgcctaacctactgcctaagtcattagggctgagggctcggctgtaggggcttcttaggctgagagtgccccagctgacatctgtgttggcttttgtcaaaacattactctgcacatgctcatgtatatgcgggaggagagagtagatttgattgagtaatgccacccttaccatgaaggggtcgaactcttcatcagcgtgcccttggttgaactttggcccacctagagagggccaccgccgtgatgaaggcgtccctacaaagaaagtctcccccggtttttaaagaggtttggaggcccgaggagaaagaggggggtgaagagacccaggggggtgggttttgtttatcttattaataaaaaagaaagtgtgtgtgtgcgccccaccggccgcggtgtgtctcctgacgtagg

SEQ ID NO: 263562 - DNA, 833 bp, Homo Sapiens
taaacccggccaactaggatgtttcagttgaaaataaagccccatttttctcccaaggaaatttcctgaaatgtttgcagtatgaaaatccaggaaccattatgcaggctttctaaagtaaaaaaatatcccaatgcctgaaaataaacatctttacagttatatttctatttcttaaaccttttgggttgtggggtggaaggctgtcatgaaggagaggttatagtttatagataagttattaaaacaactctctctggtacatttataaagattttctttttgcagtaaataatttaggtcaaagtgatgacctcccatgctctaattctgattgattaaaccaacctgaagggtaaactggagactctttggcctgttagtcaataacaaaatggtttgtaaagaaaagaaaaaataaataccatatacaaataagtataactagcattcaagtctgttgcacctgtgtgttttagtgaaagggagaatgaaacttgtatgcatttgacgtgagcaggtattcacacagctaggaaacaggaaaagacggtaggatggcaacatcaccttctattgcacatttagtttaagacagcactttccgttgaaacacaactaccccaatggcatagtcttgtgatgtgggacagctaacgtgatggacgtctgcgcagcacacccgagagttaggacggccactctgttagtgcaggtgagtgtaggtgcctcctcagctacactatctggaggatgtcacctgagtgcaactgggcaggcccttccccaacacatgatgtaagtcagccacgccaaaaacaaaggcaaccccc

SEQ ID NO: 263563 - DNA, 989 bp, Homo Sapiens
  misc_feature (683)..(683): n is a, c, g, or t
  misc_feature (791)..(824): n is a, c, g, or t
acttctttcattagctctagggaaatatgcatcattcacacatcctcccacagtttccagcaagcttaagagtggctgattttatatcacccatcacctcttttatcactaccaaagcatcggcaatattgtactgttgccatgcttctttcagagtaaggtgagggttttttcaatacagtcagcaaagtggtcaaacatatgcttgattatgttcaaatgcttcagttataccctgacccaagggctgaagaaagctagggccttcctgagggagaaacacagtatcaacattagaatgaacaaagaataatgaatctgggtgattgggacctctgtccacagttagcaacattctgatttccagattttttttgttaaatgacttcggatttgatggataaaaaaattgtaaaactaatccaaaaagtggcagtggtgattctgggtgtgattacaagaaaacaggaaggcgtttatctctaaaagacaagtggggtgttagagtctttgtaaagcagcagtggttttatcattttgtcacctgaggcactgccacaaaaaaatgagggaaatcctgtccttagcttcctctaagctttcccagatttttgtcttttgccccaaaagtaggaaggcatgcactgcaaaagatgggtcatctccttggcggttgaagaccntgttgaggcacaaagcctctctccagttgcttggaatactcgatacccactcaggatttaagggtccttcctccccatcaacttcgtatgttgcaaaacagcagcgannnnnnnnnnnnnnnnnnnnnnnnnnnnnnnnnngatacttatttgggttgtcctccccagatgtttcccattggttccctgtagatgtatttggcctggttgcagagggccttccgggtcagatgccgccctctgtcatctggccttccacctaaaaggttaactgggtctccaccttcacgatgtttacattacagc

SEQ ID NO: 263564 - DNA, 1365 bp, Homo Sapiens
ggggtggcgggcggctccgggagccaacatgcctcggtatgcgcagctggtcatgggccccgcgggcagcgggaagagcacctactgtgccaccatggtccagcactgtgaagccctcaaccggtctgtccaagttgtaaacctggatccagcagcagaacacttcaactactccgtgatggctgacatccgggaactgatcgaggtggatgatgtaatggaggatgattctctgcgattcggtcccaacggaggattggtattttgcatggagtactttgccaataattttgactggctggagaactgtcttggccatgtagaggacgactatatcctttttgattgtccaggtcagattgagttgtacactcacctgcctgtgatgaaacagctggtccagcagctcgagcagtgggagttccgagtctgtggagtttttcttgttgattctcagttcatggtggagtcattcaagtttatttctggcatcttggcagccctgagtgccatgatctctctagaaattccgcaagtcaacatcatgacaaaaatggatctgctgagtaaaaaagcaaaaaaggaaattgagaaatttttagatccagacatgtattctttattagaagattctacaagtgacttaagaagcaaaaaattcaagaaactgactaaagctatatgtggactgattgatgactacagcatggttcgatttttaccttacgatcagtcagatgaagaaagcatgaacattgtattgcagcatattgattttgccattcaatatggagaagacctagaatttaaagaaccaaaggaacgtgaagatgagtcttcctctatgtttgacgaatattttcaagaatgccaggatgaatgaagagtttactaaaagtaaccatctaaagagcttgtggccaaaccagcagaacattcttctcttcaaaggatgcaatagtagaaagctacttattttaatgaaaaaaagtaaaacttcgttctttatcagcctcatgcctgaatcaaatttttaattattctgaaactgctgctgtttaaagtggaatcttttagtattataacagcatcactttagattttgtaagtcaaaattgaaatgaatgcacatagatttatatataaattagcacctgagctaaggttaaggctggtctaaacttattttcactttttgtattatttttgagatgcaggaattactgtaacaaaatatgtatgtccgaagggaaaaagctgcaaggatatatataagaccactgcttatctgtatcttcccattttcctatattgaaaatgtatattatttatataacttaaaaagtaaaaataactatgttttga

SEQ ID NO: 263565 - DNA, 945 bp, Homo Sapiens
  misc_feature (716)..(777): n is a, c, g, or t
  misc_feature (782)..(783): n is a, c, g, or t
  misc_feature (788)..(812): n is a, c, g, or t
ggggtgcctggaggggactcgccgccatctcaggtctcttggctttgccagggcccaccggagaaaactgacgacccgtttctgtaatccttatgggagaccaaccttgtgcctccgggagatccactctcccacctggaaacgcacgggaagccaagcctccaaaaaagcgctgcctcctcgctccgcgttgggattatccggaaggaactcccaacggaggtagtaccactctaccctccgcacctcctcctgcatcagccggcctgaagtcgcaccctcctcctccggagaagtagagaaataaatttctcccaccctaaaccagtctttgagtgattgcagtatgactccatttccctggtgcattcatataatagttcacctggtgaaaacaatgaagattatttacaatgctaccctgctttttctggtgtcctgaacctggaagttgtgctttttaagtcttatgatgtaatcagcgcgatttcacttcctgaatttcgatgaattctaagacatgggcaagatcgggttgtaagacctctgagatttaaggccatgccctggatcatggtgaacttaccaaagcaaacaatgcctgtgagatggtcctgcagcagccaaccagtgaactcttttggtgacatcctgttcttgttgtataactttatattcctataaatccattaaggccccaataaagtttgtctctnnnnnnnnnnnnnnnnnnnnnnnnnnnnnnnnnnnnnnnnnnnnnnnnnnnnnnnnnnnnnnccccnnaaaannnnnnnnnnnnnnnnnnnnnnnnnttgtgggcccgccctcggccccccaaaaaatcttttctaaacacttctctttggggcgcggcggccccccaaaggaaaagagaaaccggtggcataagttgttttcccaagggaaaccccggggcctagtaat

SEQ ID NO: 263566 - DNA, 958 bp, Homo Sapiens
gctaatataaatacaatctgggggcaatatttattaattaaaactacgtcttatagtttacaaagatgctaatgaacaacaaaagtataattgacctttaaaatcctcagtgagacagaggcttcacatcttcagaattctaaagtgtgctccaggcagggaggcggggctgtggcacgcaggttcccaggggcagcacctgcagactgcaggactcggagaccaaaaggatccacaaagcaagactccagtctcctgtagaattccattccccaacccccactgtccttgtattcctgcctccccagattccatttccaaggcaagtcctcagtttatcgtcgggagaatctgttcttgaaagctttaattgtcttggccatcattggggcaattttcttcacagtgggtttcctaggatcataggaaacagtgctgctgaccactggtgccaagtgggcactgctggtgcttgggccatcataggccggctcctcagggctggggttaaagctgatactactggcggaagcatggctgcttcccatggggtacggggctggcttgatcttgattttctcagggacagctgctcctcccgttcctaacttttcctgcctcctccggacgtcacgaggtggcttggccacagagttgacaaaggccatctttgcttgtcggcctttgggcttattggcatgtgcgaactggatattctttgttagtactcgtagccgctgctctcgggcgtcctgaagccgcaggtacatctctcgccacgactcatactcttcgggtctttcttccttaaagtctcggtgacatgaactttccataattgatctgtttcttcaattaatacatgattgtattcccggaacgcgtgggtcgacgatatcccgggacattccgggaccgtaccagcctgctttataacgcagggtgtatatgccacatt

SEQ ID NO: 263567 - DNA, 1817 bp, Homo Sapiens
  misc_feature (1749)..(1749): n is a, c, g, or t
  misc_feature (1770)..(1770): n is a, c, g, or t
  misc_feature (1781)..(1781): n is a, c, g, or t
  misc_feature (1798)..(1798): n is a, c, g, or t
gctgatagctttacaagcgctccaaagcaaacacctgacagtggaaaacctctaaaaatatccagaagagttcttgggcccctaaagtagaacccgtgggagacgtggtaagcaccagagaccctgtaaaatcacaaagcaaaagcaacacttccctgcccccactgcccttcaagaggggaggtggcaaagatggaagcgtcacgggaaccaagaggctgcgctgcatgccagcaccagaggaaattgtggaggagctgccagccagcaagaagcagagggttgctcccagggcaagaggcaaatcatccgaacccgtggtcatcatgaagagaagtttgaggacttctgcaaaaagaattgaacctgcggaagagctgaacagcaacgacatgaaaaccaacaaagaggaacacaaattacaagactcagtccctgaaaataagggaatatccctgcgctccagacgccaaaataagactgaggcagaacagcaaataactgaggtctttgtattagcagaaagaatagaaataaacagaaatgaaaagaagcccatgaagacctccccagagatggacattcagaatccagatgatggagcccggaaacccatacctagagacaaagtcagtgagaacaaaaggtgcttgaggtctgctagacagaatgagagctcccagcctaaggtggcagaggagagcggagggcagaagagtgcgaaggttctcatgcagaatcagaaagggaaaggagaagcaggaaattcagactccatgtgcctgagatcaagaaagacaaaaagccagcctgcagcaagcactttggagagcgaatctgtgcagagagtaacgcggagtgtcaagaggtgtgcagaaaatccaaagaaggctgaggacaatgtgtgtgtcaagaaaataagaaccagaagtcatagggacagtgaagatatttgacagaaaaatcgaactgggaaaaatataataaagttagttttgtgataagttctagtgcagtttttgtcataaattacaagtgaattctgtaagtaaggctgtcagtctgcttaagggaagaaaactttggatttgctgggtctgaatcggcttcataaactccactgggagcactgctgggctcctggactgagaatagttgaacaccgggggctttgtgaaggagtctgggccaaggtttgccctcagctttgcagaatgaagccttgaggtctgtcaccacccacagccaccctacagcagccttaactgtgacacttgccacactgtgtcgtcgtttgtttgcctatgtcctccagggcacggtggcaggaacaactatcctcgtctgtcccaacactgagcaggcactcggtaaacacgaatgaatggatgagcgcacggatgaatggagcttacaagatctgtctttccaatggccgggggcatttggtccccaaattaaggctattggacatctgcacaggacagtcctatttttgatgtcctttcctttctgaaaataaagttttgtgctttggagaatgactcgtgagcacatctttagggaccaagagtgactttctgtaaggagtgactcgtggcttgccttggtctcttgggaatacttttctaactagggttgctctcacctgagacattctccacccgcggaatctcagggtcccaggctgtgggccattcacgacctcaaactgggcttcctaaatctgccagcttttcctgttcattngaaagcttcgggaagttttangggctctggtncccggcctggtttttcntttctggactctatctggg

SEQ ID NO: 263568 - DNA, 830 bp, Homo Sapiens; identical to SEQ ID NO: 164693
  misc_feature (799)..(799): n is a, c, g, or t

SEQ ID NO: 263569 - DNA, 716 bp, Homo Sapiens; identical to SEQ ID NO: 2151

SEQ ID NO: 263570 - DNA, 889 bp, Homo Sapiens
aagtgcatagagctgccgatgtggtgcttagtgattgcggtttcggtcgctctcccgtgtttcccgggctgggtatttgcctcgcaccatggcgcccaaggcaaagtgggcacgagagggaagaagcagatatttgaagagaacagagagactctgaagttgctacctgcggatcatactgggggccaatgccatatactgccttgtgacgttggtcttcttttactcatctgcctcattttgggcctggttggccctgggctttagtctggcagtgtatggggccagctaccactctatgagctcgatggcacgagcagcgttctctgaggatggggccctgatggatggtggcatggacctcaacatggagcagggcatggcagagcaccttaaggatgtgatcctactgacagccatcgtgcaggtgctcagctgcttctctctctatgtctggtccttctggcttctggctccaggccgggccctttacctcctgtgggtgaatgtgctgggcccctggttcactgcagacagtggcaccccagcaccagagcacaatgagaaacggcagcgccgacaggagcggcggcagatgaagcggttatagccattgacattgtggccacaggccactggccctgggtggctctgtcagggtgcacagcccctcatgcctggagcaatgagggtctagtccaggggccaaaagcagtctgaggtattgggtatacttatactctatagggtcgttgaataaatggcttaaaatgtgaaaaaaacaaccaaccaaaacaacacagacggcccgcagggcgaaagcaggacaagaaagaaaaagcagaaagaagccggcaaatggccataaaatttttgtagaacagggaac

SEQ ID NO: 263571 - DNA, 1042 bp, Homo Sapiens
  misc_feature (193)..(193): n is a, c, g, or t
  misc_feature (262)..(284): n is a, c, g, or t
gcccagaaatctttattacaaaaatatttcgcaagccaaaaagtttaagttgcaactatatacaaaatggggcctgttcccttcccagcagtcttaaaataaactcctgaaaccatgctccttccgcagggttggttcgacctcttccttttcctggggttcaatacacaaggtatgtgggattctccagggntgccaggctaaagctaaagctatacatcttccttgggccttattcccttatttccccctccaagaattnnnnnnnnnnnnnnnnnnnnnnnggcaccaagaaaacattcctttaaaatactgaatgtgtgtgtgcatgcgtgtgcacacgtatgtgctgtctctgggtaaaagagagggagacgaaggtttacaagcccaatcttttggaatttggaactagcctgagccaggtggctgggtcactgtggctcccagatgccacacgggagctctggccaaagctgtccacatggtctgttggctcagctaattcctggatgccatcattgaaatcaccaggtgaccatcccccagagagctgggtctatgctgagctcctgcagtttcacctgtaggacctccaggaatgggcaggatggctcagctacttttacagcctgagccagaaatcccttgggcatcccaaggccaggagtcatgaacattagcgtctcaactctaagagttatagtgaagactgaataaatagggcttgcgacatctgcttgccctgggcccggtcaggccctcacacccgactggaagggtgggggttaaagggtaactgggtcacaccctctggccaaccttctgggacagagggggaatcagcccgagcttcacagctgcaccatccccctggctgtcttcaatttattccagtttgatcccagtagggtttgagagcagaaatggaagatttcttcttcaaggatcagctcagaaagccgggatgggggcggtcactaaaggggtaggatagacggccagggccactatccctaccctctgtgtgttcctaaagtcc

SEQ ID NO: 263572 - DNA, 712 bp, Homo Sapiens
  misc_feature (268)..(294): n is a, c, g, or t
ttggctttgtgcaatttttgtgtaactttacttgtacctatattttctgtttacagttctttttaaggggaggggtagggttctaagatcttgttgtttattgtagataaaaattttttcgtgttgtagaaaagcatgggttatgcgtttgactgaaaaagacactgtattatttaccaaaggggtattgtttttgcatttgtttataaatgcattattttggtactgtaaatttggacataatttctgagtttattactactggcannnnnnnnnnnnnnnnnnnnnnnnnnnaaccgtaagtgcacgatgcaggtgcataggccccagaccaaactagaccaccagcatgttcatgtccagacctcggcagtggcgtgcactgcttgtgcacctcagttcctccagtgttggtttgtttgttttttaattcagcatcctgctggttttactttccaagcaagatctgttgcgactcccaaatgcgttttaatgagctcatccttatttgcctttcttcttacgtattttgtgtattagattgtgcaggagatattctagaaggcattaatggtttgcattcaaaacgatgtggtttgtccaagttattttctgtctttattactgagacggattaatctccttatttttttcttgatgatttgaagttgtaacagttgtccagctattgcttaataaaattttgcagata

SEQ ID NO: 263573 - DNA, 431 bp, Homo Sapiens
  misc_feature (32)..(32): n is a, c, g, or t
  misc_feature (79)..(90): n is a, c, g, or t
  misc_feature (390)..(390): n is a, c, g, or t
ccgaggtctggacatgaaccatgctggtggtnctagtttggtctggggcctatgcacctgcatcgtgcacttacggttnnnnnnnnnnnnaagggaaaaagaaaatgcccagtagtaataaactcagaaattatgtcccaaatttacagtacccaaaataatgcatttataaacaaatgcaaaaacaatacccctttggtaaataatacagtgtctttttcagtcaaacgcataacccatgcttttctacaacacgaaaaaatttttatctacaataaacaacaagatcttagaaccctacccctccccttaaaaagaactgtaaacagaaaatataggtacaagtaaagttacacaaaaattgcacaaagccaaagaaaatggaaacanagtaagccacaacccattagagttttatcagccagaggtaa

SEQ ID NO: 263574 - DNA, 1312 bp, Homo Sapiens
  misc_feature (436)..(436): n is a, c, g, or t
tgaagcctatttggggttaagtttgtaagtgtttaattgtgcaaattgccaccctgtgtacctcctccatgtctgtctgcgtgttttccaccaaagaatgcaaagcagacttccaggtgtttaaattctgttcactcaacaatgccagatgaatggaagagggaacacactgagatgacttagactctggtccaccaaccagacccttggaaaggaatactaaaatcattacaaggtatggattttaaatggatgaaacttcaaattatcttatttggatagaagtctatattctagcctcatttgcatgaagtcagatagccagaagaaattccattgctggttttcacgaaattcacttgtcttttgctaataaacacatgggcccgttcccagattattctctagccaagccccacctttgttacgttgaaantccctcatttattttcttctcaaaatgcccattatccaaatgcagaacctctgcatctccaagccagttatgctgaatttgtcaaacttagacacccttgacaactgcactcctactgtaggctcctgtgcatactgtcgtcttctgtgggggatggagaggttagtgtgatgaggtggtgtctgcccaggaggtttctttcaaacatcatggcctcccatccaatcaacatcatcaaattacatgtgtaatcaaggctctgtgccatgggggaaatgaatcatttagctaggccaggatctagtgaaagccacagagtttaaaaccatgaaagaagttgaaggcagcattcctcagctctgtgacttgtgaccctatttgaagtttcaggatttgggtgtcacaaaggattgtccctaatccttggccctggggtcttccgagtgagctggtttaatactctgagaatgagcagggagatccagagaatgaatccctgaccgcatcacctaaactgtcttccaaacatgagacaaagctgactgttcacactgattgcccagcacataccgtcttgccagtttcttcttttctcccagtctcctgttcatccattctgttctcccttggggtgggaatctatgatggaggttactggggaaacagctcagcagatttttggagaccaaaccaaaggtctcactaggaaatttatctgttttaaaacattgcttccttcctggctctgctaaattgaatgctcattgtttgttgttgttgttttttaattctaatgttcaaaatcctgcgtgctgtatgaatctagaaagccttaatttactaccaagaaataaagcaatatgttcgtaaaaaaaa

SEQ ID NO: 263575 - DNA, 1043 bp, Homo Sapiens; identical to SEQ ID NO: 2222
  misc_feature (338)..(338): n is a, c, g, or t
  misc_feature (352)..(363): n is a, c, g, or t
  misc_feature (525)..(525): n is a, c, g, or t
  misc_feature (527)..(528): n is a, c, g, or t
  misc_feature (530)..(534): n is a, c, g, or t
  misc_feature (536)..(536): n is a, c, g, or t
  misc_feature (538)..(541): n is a, c, g, or t
  misc_feature (545)..(545): n is a, c, g, or t
  misc_feature (547)..(554): n is a, c, g, or t
  misc_feature (556)..(556): n is a, c, g, or t
  misc_feature (558)..(735): n is a, c, g, or t
  misc_feature (794)..(812): n is a, c, g, or t
  misc_feature (959)..(959): n is a, c, g, or t
  misc_feature (1000)..(1000): n is a, c, g, or t

SEQ ID NO: 263576 - DNA, 750 bp, Homo Sapiens
  misc_feature (32)..(32): n is a, c, g, or t
  misc_feature (83)..(163): n is a, c, g, or t
  misc_feature (175)..(192): n is a, c, g, or t
  misc_feature (348)..(358): n is a, c, g, or t
ggaaattcctatgaaagaaacccctaatgaanggtaagagatttcccaaaggaaacagagggcaggtgcagtagctcatgctnnnnnnnnnnnnnnnnnnnnnnnnnnnnnnnnnnnnnnnnnnnnnnnnnnnnnnnnnnnnnnnnnnnnnnnnnnnnnnnnnactccatctctnnnnnnnnnnnnnnnnnnttagctgagtgtggtggcgcacacctgtagtcccagctactctggagtctgagttgggaggactgtttgagcccaggaggttgaggctgcggtgagccatgatgttgcacaactgcactccagcctgggtgacagcgtgaggccctgtctccaagnnnnnnnnnnnggaacagagtctttgccatgcttaatccatgtttatctaattttaaaacaatacaagactggtcatctttttatctaccaaccaagggtcagtatacttatttttatcttagtttatttctaggatgatcttaattccttttcccctgttttatgaagcatttagttcctttctgttcccagtatgaaatttatttttgaagaattctacttttgttttctttaaagccagggactttttcccctattaatctaatcccaaaaatcaaaggtgacgaaaagaaaagaaaatctcccagccgtgggagcatatttgtggaaaggacattcaaggctacatgtaggaaagggtaaaatataagaaagattccatgcggaccctgatgaagagaa

SEQ ID NO: 263577 - DNA, 432 bp, Homo Sapiens
atccccagatgggtattgacccccaaggggaactgggaagccttcaaattgcaacatggggtcccattctggggcttccccccagggcaaagcccctatgaagggaagcatccttggagggccgactgtgaccatactgatccccagctgcccagtgagaagcagttgacccaaatcccaacgcaccccagagtcaaagccaaggtgacaacattatagaaaccagaaccaacattatcaatgtgaatgacgttaggggggtcatagaagagtctgattgagttttctctttctttttagcagctttattggcacatactgcacataccatacagttcccccatttaaggtacataatttaatggcttttagctaccggcacagagttgtgcaaccattaccaaaacaaacgcatctgcctgacactcctgt

SEQ ID NO: 263578 - DNA, 591 bp, Homo Sapiens
  misc_feature (19)..(19): n is a, c, g, or t
  misc_feature (71)..(71): n is a, c, g, or t
  misc_feature (86)..(86): n is a, c, g, or t
  misc_feature (93)..(93): n is a, c, g, or t
  misc_feature (382)..(458): n is a, c, g, or t
gggtgcccggcttacctanaaccgaaattcagcacccaatttttgtgggagctgtaataccccacaattanaacaaaaagtatatnaagaganaaatatttgaaggtgtctttaacctaatgcgaggaatgcatgttgtttttgtttgtttattgtagtgtgatgccttttcccttacacctactaactattcaaattaataatacttacttagttttagaatgtttattttatgtagtcattaatttttagtaacttcaaagaaacttgtttgctgtgtctattattttgaacataattccatttcctgtgtacagagaatcacatgtatattcacaatgaagcaattgtgtgcaccagaaataaacccctttcaaactannnnnnnnnnnnnnnnnnnnnnnnnnnnnnnnnnnnnnnnnnnnnnnnnnnnnnnnnnnnnnnnnnnnnnnnnnnnnttggcgggccccctccgcccctcacaaaaactttttaaaacatttttttggggccccgggcccaatagggaaaggaacctggccctaattgtttcccaggaaaacctggccatgaacaaggtttggattcccc

SEQ ID NO: 263579 - DNA, 688 bp, Homo Sapiens
  misc_feature (228)..(228): n is a, c, g, or t
atctctttgagcaatcgtcttaatttccttgtcgtcaccaattatcataaccaattatcatcgtaaaggatggtaattcctttaattatacccaccttaaaaacatgattctgttccacaaacgaaaggagcacatcagagatgccttcagttctgtgttgcttgaactttgaattccatgaattatagttgcactgaggggagaatcctgtttccatcctcctgggntccttctccctttcctgtccccatgtttctctgaggcctggcaatgctctctggatacttggtgagtagcccaggaggactcaggagtgagaggcccctgcctcctgcgctgggagaaaggctgtgggtgggccgtgaacccggccttgagtggcaggacagtgagtgtctgctggtgtgttcctacagcagacggactggactgagccctggctcatggggctggccaccttccacgcgctctgcgtgctcctcacctgcttgtcctcccgaagctacagactacagatcgggcactttctgtgtctagtcatcttagtctactgtgctgaatacatcaatgaggcggctgcgatgaactggagattattttcgaaataccagtatttcgactccagggggatgttcatttctatagtattttcagccccactgctggtgaatgccatgatcattgtgg

SEQ ID NO: 263580 - DNA, 1149 bp, Homo Sapiens
  misc_feature (1107)..(1107): n is a, c, g, or t
gggggcaagacagcctgccacacatccaagggtacgaccagtgggaccctggcctgagtctgttctccgaggggcctccagcagcttctgttcctccctgcagctgtgtctttcttgtcctgggtttaggatgcaggtgggccaggcaggtgttgttaggggaggcacccacttcaaaaggagggccacagtggggacacagagtccagcacctgagccctccaccctccccattctggttggttccatcagccacacttagaatctcccaggatcccttggactccgtcccccaacttgtcacagcagcctgagcctacccaccccaggagacaagagctggcaggaacatctgcctatatggggggtggcgttggccccaaagaggcttcaccagcaaaggaactgtgtgtattttaatgccaggggacggaggatgtgtgagctgttcagcaaggtctgcccaaggcctaaaactcaatttccttattcttttgcttctgctcgtccttaacaactaacagctcaacccacacctctagacaacagtagtcgtgctttctgctaacggtgacattttcagctcttaaaaagaagcaaggagattttcaaatgctagagtatctctatcagaaggcataggacattgtgtccaaagtctcaagaacaaacaacactttccttctgacctggtccaaaagtcagcaaacagcaagcaggcagaggccctcataaggacttttctgtcctcctttgaccaaactgtttaaccgagcctaggggtgacggggagcgacccaagctggcatctttctctacggagacagattttagaaaatacttttcttgcccatgaatttcttttctggttgatttttatcattttccctttacttacaagaaaataagattgcaaccactcctgctaatgatttagtagttccttttcatttcagtttttgtaaattaggagataattctaagagttactaaaggatgatttatttaagagaactacgtcaaatagcgaatgagttatgggtaacattagacgaaaataacctttcccgtgggaaaggtttctcgaatggcatggatgcaaatatnaaatatttaaaaaaatctaaataaagcttattttaaaatatg

SEQ ID NO: 263581 - DNA, 1509 bp, Homo Sapiens
  misc_feature (261)..(261): n is a, c, g, or t
taggatgcagcactttctttattgcccatccagggaacagccaagccagctccatctgcattctggctgcagcgtgtacattaggggactcaggggccacagtgtgggaccgtgcacactggcaaggcactggcggatgctggcaggccagtggacatggatagatgagaatgacaactcacagatgtcctagcttctgctggcccagctgccagccactggccatcacccttttgcccagcatgtgtgcattgtcacccnaaacatcttgaaacttgccattagtgaggcattcacaaagaagtaagctaagtgagtaggaaacagtgtttcctggaatataccgcactctgcctgaaataggaaaactatgtttgccgggaagcagcaggcagcaggaaagaagttataccaaaaacgacttgtacaccacagacattataaccctttcctcaaagaaacagtcatgttctgttgggtattatggacaggtctctggaaatttatctaataaagaccgacgaacttccccagcagtgcctctgagtaccgtgtgaattctggtgtcttgtgggaagtcagggtgccttctttgcattccaaagctttgagggagctgggaagctttggttcccattttaggagggctgtgtgatggtgacaaaggtgttctggtcatttctgctctgttctccgttctgtgaagtgaggtggatgtaatgtgctgtgggatggggtgctccatatgtgtgtgtagcctttactttccaacttagttttttgcatctctcttgtactgatgagccatacctctcagccttcatttggtcccaggcctgaccctttgctttcatcgtcagcttttctgtcctgctcgggcaggattaactctgttcttgccgcggatgtcaccatcactctggagtccagcccagtgcccacaggcccgatcagttcaccctcttccttctcttcaggggagaaactttctcgggcatcaaaaaacgtgattgtttcttcttgaagtttttgttcttccagctctgccccatcttcggtgcttttgcttttcttggtaggagatgaggagaaccctaatttgggaaatcggaaccagcctgccttctcctgtttttttaggcagttctgcctctggtcgtgcctcaggctgtgtttgaatgggagcagatctctggacgtcatttttggaatcaacacctgtctcatcaacagaagaggaaaacccaatgtttggaagccaaaaccagagcagaccagattttttactttctggtttgtcttttggagccctgccttcatctgccagtggtgtggttgcctcttggctatcatcagggggaaactcaagaatttctgctggctcctcatctgaacagctgtctgcaagctggtggccagaaggaacttcaaatgtgagtgtttgctgtcccagtaccgacgcgtggtcgacgatatcccgaagattccggaccgtaccagcctgcttta

SEQ ID NO: 263582 - DNA, 980 bp, Homo Sapiens
gggggtcaaggccgttccttcagtgttttcagacgccctgggaacgcggctgcagggtccggtcttcggtttgcacagctagaggccgcgcagcagcaaaggatgagcggaaccttggaaaaggtgctgtgcctgaggaacaataccatttttaagcaagccttttctctcttaaggtttagaacttcaggagagaagcccatctattctgtaggtggaattctactaagtatcagtcggccctacaagacaaagcccacccacggcattggaaagtacaagcacttaattaaagcagaagagcccaagaagaagaagggaaaagtggaagtgagagccattaatttggggacagattatgaatatggggttttaaatattcatctgactgcatatgatatgaccctggcagagagttatgcccagtatgttcacaacctctgcaactctctctccattaaagtcgaggaaagttatgcaatgccaaccaaaaccatagaagtgttgcagttgcaggaccaaggcagcaaaatgctcctgggactcagtgcttaccacccatgagcgagtggttcagatcagcggtttgagtgctacgtttgcagaaattttcttggaaataatccaaagcagtcttcctgaaggagtcagactgtcagtgaaggagcacactgaagaagacttcaaggggacgattcaaagctcgaccagaactggaagaactgttgggccaagttgaagtagctactgtagaccctttcatgccagcagtggtcatattgagtgccaaagagaagagcttactgggtagttagagttcatcaggagacccaacccttagatttcataagtacccattcccatagccagtaatgtcctcactcctctgtggcttggctgtacttgccatttcttaccacttacctatgaggtaatgcttgttatcttccatctaataaaaatctgctgcagatgtgtaa

SEQ ID NO: 263583 - DNA, 1252 bp, Homo Sapiens
cttcaggtagacaattattccaggaaagtacctcttcagaatcactcattacagagaattcctgtaactccatttgctgataaaagtcccattaaaaattaccatgtggttctcaaccaatagggatacctttggcattgaagaggctgagggttgattttagtactgcttgtaagaccatagtgttccagaggctctgtagctggcttctttgggaatctgaagttggtcctgtctttgagacatggccaaaagcacatttttcctcacttgatgcagaagaaaatgttatctcctgcttgctcagatcatagcctcgaggcagatcacacagctcaggatgcacatggactggaacagcaccagggcaagcaccccaaatcacaaaataatcatgttaggatgactaagttgggaggctgaacttaaaaccctatagctttgttcagaatatttttttcttggctttttccattaagttttactgaccaaaaaggtggaaaaaagaacctaaattttctgcacaaaagcagttctctgaaacctgaactttaccaatctgtgtaaaagtactctacagaaaatacacaagcagaaaacagtaatgtaagcttcatctgaagtaacggtttagtcacatgacaaatttggttgtcgatttagtatgctgtagcccttatctatctaaattcagtatgactacatagacatttattctctggtactgaatttccatttgaatagaaacggctgctttgtggaagaaagaaacttcaatttaaaaacaatttcagcatcgttgaagtgccaatcagttttcaaattatgtgtgtgtatacatatgtatgtatgtgtgcatgcatgtatgtttgtattatgtgtattttttcctcctctctccctctcttgctcgctctagagagagataccaaatactggcttggtgctatactgttttttcctagttaatatttttattatttctgtctacgtaagaaacttcaaatattctgaatgcaaccacacaatcgagtaagttgacagacatgacaaaaactacgaaaagagggaggtaactagtattaatacttggcaacctttcgttatttttagtttagagcggcctccctctgacattttggagtcaaagatgaaaactcaactttgaagcataatggacataattacacatttaccacagtcatctacaattttatataacatcacaaaaagacatctaaacatttttccc

SEQ ID NO: 263584 - DNA, 889 bp, Homo Sapiens
  misc_feature (222)..(222): n is a, c, g, or t
caaaagagttaggcatttttcccccgttaagggtttttgggactgccccttcaggggcttgaggtttcggccatcggttttcagtcagtcctgggcgatgtcccctcagacgcactcacagacttgcatacgtaatttagtaacatgcatcaactatcctagaacatctacagggtgcaaaggaaacaccactcagagaatcatggagccagtggagttaanaagtggaagggaacagaacaagacaatgcctaaaacatgtggttcactaggaagggggaatgaaaacaccatgctccgaggtggattcagcatgaacacaactgtggggcaagggaattttccaagcaaacacaccacactagtaccacttcttcctaaacagaaaaggggaaagagcatccttcgacttccccctccctccatcagcaccaactaaaactgtgggtttcaaaaacactgacaggaaaagggatggacatgattcccagaatccttcaggctagctcctccgcgcatccacgttcaaccgaggctggtgatgttggagcggccaccagggggcgccacgatgcggtggccggtgcgcctgggattgttgtcatctatctgggcacctgaaagagagcgccaatcgctgctggatgggatctgttagcatcagttccacgctgctcctggaggccatgtactctgccatgcactccactggacccaccttcattcagggctcagtccaggaccagccatgggaagcctccctggcctccacagagtccactgctccctcttctgtgcccctcagtccctgggctccccccaccttcagccctgaccaccttgtggtgttcttgtcaaaatccccagtaaaatccgacattcctgaaaa

SEQ ID NO: 263585 - DNA, 871 bp, Homo Sapiens
  misc_feature (694)..(694): n is a, c, g, or t
gggatcagagcagtagctactgggaagttaaaaggaaggggcttagaaaatgaatgggaccaaaggcatcacttctgatggagatgaagccatcttgaaagtgagtggtgtcctttggaggcatggtggatgaaaggcgcaaaggaagcaagaggttaaagataatggcccattagatacaacagcaagcccaagattccgaagaagacagacaactccccctagtaccacctagacattactttttaaagacattttacattattgtccagcagaaaaaggctgtcttggaccatgaaacagtaaactgtaactaaacacttcaacatgaatttgaaaataaataattgtggatataaaagaacaccagagatcagaaattcaaaaactcagaataaaaatgaaaaagctacaagcatatatgagaagagaactgactgaacttgggaaataatttgaacaaaaagataaatcttcacagatatgaatactaaattatatcttaatgaaaatagatatggtcacaagtacattaaggcacgtagaaggtaggagtaagaaaagctaagagaagcaaaacaaacaaagcaatattaaaggaagagccaaaaagacccagaaataaaatgacagataaagaagattgtcaaagaaaagatgatacaggtaagattggaaactcatgaagacaaanagataagacaggggcataaagttaatatttaaaattcaaatattaaaactcaaataaacccccaaagaactttttggaaaacaaaagaaaacccttaaactttatcttgaaaggggtctatcttgttacttagaatattgaactggaagaattagctctgagacatagcctaccatg

SEQ ID NO: 263586 - DNA, 1011 bp, Homo Sapiens
  misc_feature (25)..(25): n is a, c, g, or t
  misc_feature (44)..(44): n is a, c, g, or t
  misc_feature (83)..(98): n is a, c, g, or t
  misc_feature (108)..(108): n is a, c, g, or t
  misc_feature (123)..(123): n is a, c, g, or t
  misc_feature (175)..(175): n is a, c, g, or t
  misc_feature (216)..(216): n is a, c, g, or t
  misc_feature (243)..(243): n is a, c, g, or t
  misc_feature (246)..(246): n is a, c, g, or t
  misc_feature (248)..(248): n is a, c, g, or t
  misc_feature (259)..(290): n is a, c, g, or t
  misc_feature (430)..(453): n is a, c, g, or t
catgtcccttcttcacaccccttgnctttaaaacccctacgtgnccaactgggcttgcatggtgaaacccccgtctcctactnnnnnnnnnnnnnnnncctagctggnccgtggtggtgtgtnccctgtaatccccagcctactcgggaggcaaaggcaggggaattgccttgancccagggaagtggaggttaaagtgagcccaagattgcggcnactgcattcccagccctgggtaacagnagntngctccgtctcnnnnnnnnnnnnnnnnnnnnnnnnnnnnnnnnctacgtggccatgctgagcagagtaccatgagaggaaatgatcaactctggaaagctctcctgaagacaatgatgaaacagctattatcacatttccttatcttacaactggaacatgaaatggctttaaaacaattgtnnnnnnnnnnnnnnnnnnnnnnnnggtagaatctgtggaatgttaacaatcacaacagaacatttaccagagttacagtgttttgttacaataatactttgcaggaatgttcacgttttctgccataggactggagcaaagggtctcaaaagaaaacatttttttaaaaaagttttgttcatcaggtacatttcaagtcaaagttaagcaggtctgctacataatgttcagcaagaagatgtgttcaaaggcaaacactgatcaccttcttgttcagaaagctcaatcttaaaggagtcctatgtaagaaaaccacttgtaaaatatatccttgtatacggacttcaaaaactgatcatacaaaaaatttttgaaaaataaattagataattaaaaacgtcttttccagcaaagctggacattaggctgtcctcactgagccattattattgctgcttttactgtaacttggatcatttttttccagccacatctcagccagctgctgggtggacccataggtcgatgctttggaccccaagcacattttgtactgtttggggtcaagattgggatcacacc

SEQ ID NO: 263587 - DNA, 979 bp, Homo Sapiens; identical to SEQ ID NO: 2777
  misc_feature (964)..(964): n is a, c, g, or t

SEQ ID NO: 263588 - DNA, 798 bp, Homo Sapiens; identical to SEQ ID NO: 2783

SEQ ID NO: 263589 - DNA, 1263 bp, Homo Sapiens
  misc_feature (646)..(721): n is a, c, g, or t
  misc_feature (723)..(924): n is a, c, g, or t
  misc_feature (1042)..(1056): n is a, c, g, or t
gggagcagaccaggaagaaggcagaagccgtggtgaacacagtggacatctcagaacgagagaaagtggcacagctgcgaagtctctacaagaaggctgggcttggcaaggagaaacgccatgtcacctacgttgtagccaaaaaaggtgtgggccgcaaagtgcgccggccagctggagtcagaggtcatttcaaggtggtggactcaaggatgaagaaggaccaaagagcacagcaacgtaaggaacaaaagaaaaaacacaaacggaagtaagcagagctgccaggctcccaggagagcatggggactaggaggaagggtgtggcatggctcagtctggcccccttgattaccggcctagcccctgctcacatcacagctgtctgaagaacagtgaggtggagtgcctagaactcccgtggtggtcctgagcagagaggaggatgtcctcctgcctgcctgaaggtctcccatgaaaacactgctgaactgtgttgacactcatgaccctttttttaaaccgttaaagggaagttcggtgttggagcgatactcaatgtagtcagtctacaccctggacgggggggcccacttaaggccctccccacccccatcctattcctgaataaaaccaggataatggnnnnnnnnnnnnnnnnnnnnnnnnnnnnnnnnnnnnnnnnnnnnnnnnnnnnnnnnnnnnnnnnnnnnnnnnnnnnannnnnnnnnnnnnnnnnnnnnnnnnnnnnnnnnnnnnnnnnnnnnnnnnnnnnnnnnnnnnnnnnnnnnnnnnnnnnnnnnnnnnnnnnnnnnnnnnnnnnnnnnnnnnnnnnnnnnnnnnnnnnnnnnnnnnnnnnnnnnnnnnnnnnnnnnnnnnnnnnnnnnnnnnnnnnnnnnnnnnnnnnnnnnnnnnnnnnnnnnntcttattttttttatttccggagacgcccacaagcttcgctttctccgtcaccccgttttttcccctcgtccccctctgaaccgccccaccccacagttgtcccccgctgctggccgnnnnnnnnnnnnnnnggcgcgtcctattcttctctttaagccgcctccatccccccgatttccctcaattttaccccccctatatcctatatacgccttttcccccgccttttcgttattccgccctctccatccaccctcttttataccacgtccggctattttccgcccatgattttccctcatcccctccccggatatcccccttcttttctttttccc

SEQ ID NO: 263590 - DNA, 806 bp, Homo Sapiens
gggcttctctgccaaccgctgtttcagcccctagctggattccagccattgctgcagctgctccacagcccttttcaggacccaaacaaccgcagccgctgttcccaggatggtgatccgtgtatatattgcatcttcctctggctctacagcgattaagaagaaacaacaagatgtgcttggtttcctagaagccaacaaaataggatttgaagaaaaagatattgcagccaatgaagagaatcggaagtggatgagagaaaatgtacctgaaaatagtcgaccagccacaggttaccccctgccacctcagattttcaatgaaagccagtatcgcggggactatgatgccttctttgaagccagagaaaataatgcagtgtatgccttcttaggcttgacagccccacctggttcaaaggaagcagaagtgcaagcaaagcagcaagcatgaaccttaagcactgtgctttaagcatcctgaaaaatgagtctccattgcttttataaaatagcagaattagctttgcttcaaaagaaataggcttaatgttgaaataatagattagttgggttttcacatgcaaacattcaaaatgaatacaaaattaaaatttgaacattatggtgattatggcggaggagaatgggatattaacataaaattatattaataagtagatatcgtagaaatagtggtgttaccctgccagccatcctgtatacaccaatgatttttacaagaaaaaacccgtcccctccttctggcattactatggcaacttaaagggacctgcagctccccc

SEQ ID NO: 263591 - DNA, 382 bp, Homo Sapiens
  misc_feature (359)..(359): n is a, c, g, or t
  misc_feature (365)..(365): n is a, c, g, or t
ttcggcacaggcatcttcctctggctctacagcgattaagaagaaacaacaagatgtgcttggtttcctagaagccaacaaaataggatttgaagaaaaagatattgcagccaatgaagagaatcggaagtggatgagagaaaatgtacctgaaaatagtcgaccagccacaggttaccccctgccacctcagattttcaatgaaagccagtatcgcggggactatgatgccttctttgaagccagagaaaataatgcagtgtatgccttcttaggctttgacagccccacctgggtttcaaagggaaggcaggaagtgcaaggccaaaggcaggcaagccatggaacctttaaggcantgtggnttttaaggcttccctgg

SEQ ID NO: 263592 - DNA, 779 bp, Homo Sapiens
  misc_feature (44)..(294): n is a, c, g, or t
  misc_feature (296)..(329): n is a, c, g, or t
  misc_feature (685)..(725): n is a, c, g, or t
ctggtaccggtccggaattcccgggatatcgtcgacccacgcgnnnnnnnnnnnnnnnnnnnnnnnnnnnnnnnnnnnnnnnnnnnnnnnnnnnnnnnnnnnnnnnnnnnnnnnnnnnnnnnnnnnnnnnnnnnnnnnnnnnnnnnnnnnnnnnnnnnnnnnnnnnnnnnnnnnnnnnnnnnnnnnnnnnnnnnnnnnnnnnnnnnnnnnnnnnnnnnnnnnnnnnnnnnnnnnnnnnnnnnnnnnnnnnnnnnnnnnnnnnnnnnnnnnnnnnnnnnnnnnnnnnnnnnnnnntnnnnnnnnnnnnnnnnnnnnnnnnnnnnnnnnnntgggagttctgagagctaggaaactggggaggttgagccaggagcaggggaacttgggctttgaggcgagacctaattcttagggtgctctatgaggacatgggtggtgggcaaagtgacagccgcctgagcccctctgcctggtcccctttgcccccaggatgaatacgacgacattgtggttcacagcagccgcagccaaacccggctgcctcccaccccagcctcaaaacctcttcctgacgacccccgccccgtgtgatttgtttcattgttaatataatttccagtttaataaacaaaaccctagttctgacaaccagaaaaatacctcactctcaaaaccacgatctatnnnnnnnnnnnnnnnnnnnnnnnnnnnnnnnnnnnnnnnnnccaaagtataacggcgtaccccagatttttcgcacaaagggggcccattatggg

SEQ ID NO: 263593 - DNA, 1121 bp, Homo Sapiens; identical to SEQ ID NO: 2836
  misc_feature (92)..(92): n is a, c, g, or t
  misc_feature (109)..(109): n is a, c, g, or t
  misc_feature (148)..(148): n is a, c, g, or t
  misc_feature (340)..(348): n is a, c, g, or t
  misc_feature (614)..(614): n is a, c, g, or t
  misc_feature (626)..(626): n is a, c, g, or t
  misc_feature (650)..(651): n is a, c, g, or t
  misc_feature (658)..(688): n is a, c, g, or t
  misc_feature (691)..(721): n is a, c, g, or t
  misc_feature (724)..(743): n is a, c, g, or t
  misc_feature (745)..(747): n is a, c, g, or t

SEQ ID NO: 263594 - DNA, 720 bp, Homo Sapiens
  misc_feature (286)..(421): n is a, c, g, or t
ggggaccatcacatgggtagggattttccatccagagccaataaaaggactggtgggggccgggggtggctattgtgggaagtcataacccacagatagatcaacctaagaatcctggcccttctccactctccaccatgcaggacaaacatcttctcaagcagtcaacgtagaatgcttgggaaatagtcataattacccacatatagtaattaatagatggtaattaattgatccttgatgtgatgttcttttgcatatttccttcattctaaagttgttcccnnnnnnnnnnnnnnnnnnnnnnnnnnnnnnnnnnnnnnnnnnnnnnnnnnnnnnnnnnnnnnnnnnnnnnnnnnnnnnnnnnnnnnnnnnnnnnnnnnnnnnnnnnnnnnnnnnnnnnnnnnnnnnnnnnnnnnnnatgggtgacgccctgccctgtaagtccccagccttactcgggggaggtcttgaagggcaggggagggattcgccttttggaaacccccagggaaaagtggggaagaacattggcccaggtgggaagcccccggaaataaatactcggcaaaccccaacccaaggggcgcgctttcccacaaggccctctggtggttcccgaaaacaggagaagggggaaaggaaatttccccattcctttccggggggaaaaaaataatttaaaaccaatttctaaagggttttgggttccctcctcgg

SEQ ID NO: 263595 - DNA, 802 bp, Homo Sapiens
gggggcagattccgcctccttggggatcccagtaggaacaactgctccctgagcatcgtagacgccaggaggagggataatggttcatacttctttcggatggagagaggaagtaccaaatacagttacaaatctccccagctctctgtgcatgtgacagacttgacccacaggcccaaaatcctcatccctggcactctagaacccggccactccaaaaacctgacctgctctgtgtcctgggcctgtgagcagggaacacccccgatcttctcctggttgtcagctgcccccacctccctgggccccaggactactcactcctcggtgctcataatcaccccacggccccaggaccacggcaccaacctgacctgtcaggtgaagttcgctggagctggtgtgactacggagagaaccatccagctcaacgtcacctatgttccacagaacccaacaactggtatctttccaggagatggctcagggaaacaagagaccagagcaggagtggttcatggggccattggaggagctggtgttacagccctgctcgctctttgtctctgcctcatcttcttcatagtgaagacccacaggaggaaagcagccaggacagcagtggggcaggaatgacacccaccctacccacaggtcagcctccccgaaacaccaggaagaagtccaagttacatgggccccactgaaaccctcagctgttcaaggtgccgccccctactgtgggaaatggatgagggagctgcattatggcttccctcaactttcatgggatgaatccttc

SEQ ID NO: 263596 - DNA, 513 bp, Homo Sapiens
  misc_feature (291)..(386): n is a, c, g, or t
ggggccgccgccgccgccagcatctgggaccggccgattctgcacctccgtccggcgctgccctttgattcggatttccatcttgcattctccggctgatcgcgggacctggctcgtgcagaggaggggggccgatcgctatggagtatttcatggtgcccactcagaaggtgccctctttgcaacatttctggaaaacagagaaagaagtgataggagggctctgtagccttgccaacattccactaaccccaggtctcatcttccaccccaaaaatgtctgtctctctnnnnnnnnnnnnnnnnnnnnnnnnnnnnnnnnnnnnnnnnnnnnnnnnnnnnnnnnnnnnnnnnnnnnnnnnnnnnnnnnnnnnnnnnnnnnnnnnacaattttgaggtcttcgtgttcaaggagaagctattatattttgttaagaaagtggggagaaaaaaaccaagaggccaccgtgcctttgtaaagaaacaaaataaagtttgtactttgtttttttt

SEQ ID NO: 263597 - DNA, 1240 bp, Homo Sapiens
ccaggttattggagcccttcacatttttaaaggggaaatggctccttctttaaaaggtacttttaaaaaattatgcaaaaatcacaaaatggggcttggtaaattataatgcatattttagaatgagaaacatatcttttcttccttaaagttgccatatagagaatgacatctttataccccagagccactttgtttaaaatccaatgtgaaaagactgttatggaatgaaaagtttgcacaactccttggagcagttaaagtccgctacatgcaacataggctacaaagcactcaagacttggtagcttttctgaaatttgagtccccctcccatatttaatggaaagtaacatttacagggtgcatttacatacactataatacaggaatgatgtccctttgccagaagataaaattgtacatttccttgctatttcttggttccaacttgataatttcttaagattgtaaattatatagtactcagctaaaatatttcttcataaatagttacaaaacctgccaaaacacaaaggggaaagtatttttcatccaaaaaaaggacattggaatgtcacacaacacaagaaacaatgcttagagacatgttattgtttccagaagaaaatggtcagtaaactacttagctgaagacaaaagactacccttccccaggatcacagtgcacaaaaagcaaaatgtcaaacaacagtacctcaaagcaaaataaaggtctgaggatgaagccagctcacttgtaatcctgttaaagaatgagagtcaccgtttaggtccaatgtactgggaacacttgctagctcagaatgcaatattggtagaatttgctaagaattcaaccaaggatgccgaaggcattcgccagctgaggctcgtttttctggaaccattcctaacatcgggatcaggaaatctgtaaactgtgcagcatcttcatgggccagccatacttttccacaagtacatcaaagaggctccagggcttcagcttggtgatgtgtcgcagttctcctacaggggaaaaaacaggccaatgtcaagaaagctccaaatctgcattccccattgttggtccagtcaggttcttttcagtgaagcggacaaccacctgctcaacacttgtacagcaacaacaaagaacaccagcttttccccactaagcaataatcattacatgtacatatgaccaaggcatatttcaagtaagcctggtggatct

SEQ ID NO: 263598 - DNA, 1249 bp, Homo Sapiens
ggtaataagtttgtagttacatgtgaaactctaaatgcatggcaactgttaatgtcataacagtttagttattttgttctgttctgtcatgtgccacaaaatatgtacttttttcacttttttccctttgtatatcagttacgggttacaactggttcattctgaaaacaacaacaacaaaagtccattcatattttttaacaattgtataagtgcccaagtaattcactacagcctaaagccttgcctttgtaatttgacttctgacatgttggcaatcaaagcatgcacttgtaacaatgaaaaagaaaaagcattttatattactactcaataaaatgtgcatgaacttacagaattctcatccttccactgagtccgctgaagggatttatgtgcacaaccaccatgtgtcttctaggtgctggcccaccaccacacatcacaggctgatttccacaggcttcttcctaggggcctcgtgatctgaggggtggtgcctacttccactgtaagaaagaatcttggtggatttgtgtctcaaatcagataagagaagcctgtttaaagagcagatgccatcttctggcttcctcaaggagccagttaaaaaaccagagcattcctttttattgaaaaataaaattaatttggttatcaggttgtttcagttgtattggatgccctatctatctgctaaagcaaaaagtactaggctactaagtgcattttcatcacagaaaaaagttgcatttgtattaacaagaaatttgtatacccacgcttcagctactatctaatcatcacccgaagatttaagatacaccaaatttcagttggtttgtaacattgttcatctttagtgcactttgttttatataataaagtatgcctgttatattaaataataagaatatggcaattagcgatatagcatacccaaacaaagatgttctcgatacagtctggcaaagactatcccaaggttattttaatgaattcagacattttttcctgtggatatttctccatcctaaaaaaagtggcaaccaaggaaaatatttagatgcaacttactagagtgatgatgtgaaagaaatggtgattctggtatcatggtgtttattttctttcttataactgcagagaaaatatcctgactaaaaaaaattcatttttttggattcctttcttttacaaattgtgctgaggcaactatggcatagaaataaacatttgacattaaaaa

SEQ ID NO: 263599 - DNA, 672 bp, Homo Sapiens
  misc_feature (630)..(630): n is a, c, g, or t
  misc_feature (642)..(642): n is a, c, g, or t
  misc_feature (650)..(650): n is a, c, g, or t
tatcagttacgggttacaactggttcattctgaaaacaacaacaacaaaagtccattcatattttttaacaattgtataagtgcccaagtaattcactacagcctaaagccttgcctttgtaatttgacttctgacatgttggcaatcaaagcatgcacttgtaacaatgaaaaagaaaaagcattttatattactactcaataaaatgtgcatgaacttacagaattctcatccttccactgagtccgctgaagggatttatgtgcacaaccaccatgtgtcttctaggtgctggcccaccaccacacatcacaggctgatttccacaggcttcttcctaggggcctcgtgatctgaggggtggtgcctacttccactgtaagaaagaatcttggtgggatttgtgtctcaaatcagataagagaagcctgtttaaagagcagatgccatcttctgggcttcctcaaggagccagttaaaaaaccagagcattcctttttatttgaaaaataaaattaatttgtttatcaggttgttttcagttgtatttgggatggccctatctatctggcttaaaggcaaaaaggtactaggggctacttaaggtggcatttttccatccacagggnaaaggagtttgncatttgtnattttaaccagggaatttggtt

SEQ ID NO: 263600 - DNA, 1216 bp, Homo Sapiens
  misc_feature (169)..(225): n is a, c, g, or t
  misc_feature (240)..(335): n is a, c, g, or t
  misc_feature (930)..(930): n is a, c, g, or t
  misc_feature (1044)..(1044): n is a, c, g, or t
  misc_feature (1086)..(1086): n is a, c, g, or t
  misc_feature (1097)..(1097): n is a, c, g, or t
  misc_feature (1159)..(1159): n is a, c, g, or t
  misc_feature (1162)..(1162): n is a, c, g, or t
ggtacctcagacctggtgctctaggctgtgctgagcccactctcccgagggcgcatccaagcgggggccacttgagaagtgaataaatggggcggtttcggaagcgtcagtgtttccatgttatggatctctctgcgtttgaataaagactatctctgttgctcacaannnnnnnnnnnnnnnnnnnnnnnnnnnnnnnnnnnnnnnnnnnnnnnnnnnnnnnnntatagaacagacacnnnnnnnnnnnnnnnnnnnnnnnnnnnnnnnnnnnnnnnnnnnnnnnnnnnnnnnnnnnnnnnnnnnnnnnnnnnnnnnnnnnnnnnnnnnnnnnnttgactgtgggtggaagggcccctacccccacaacaaaattcttataaaaaacatttttttgtggggcgcgagagggccaataagagaaaaaagtagcaaacggggtcttcaattcttcaaacaaaaagagagcacagtgggcaccaaacagagggtgttgtgatatcctccacacaaataaaaataaaagcacctcgcggggtgaaaaaccaaagtcggtgttacgtaaaatatacatcataaacgaagtctgtcgaggggctgtatatacggagaacatcaccacacaagcagcaaacaacacaatatggtagtcatcataattcataaagataaattgaccacacgcccggccagcagaacagaaaccatgaagacagacataagtcgggaggataacatatatcaaaaacacacacaatatactcgaccaaggacacgtaaggaaaacgtcccaatgacacaaactgtctcggcgctagcgaagaatacatagttaatataccatcgcagcagacggaagatagagactatgcgcacgcgactaacatagctacgaggcctctacgatatatataaatataagtatttctnacaccataagagcacacaacgaaactaatcccggcacaaataaaatacacaatcattgtagtcccaacactttgtagggctcaccaccatcataatatataactacaacaaatngatgcgcagcagcaatagcgactcaccacgcacacgatgaancgtacgccgtngtgagaatacacgcaacacaatatataataatctcctcttcgccgtcaagaacacatctacnttntctcgagaatcgacacatagaccacgatcgccgtcgtctacatcatcgccccac

SEQ ID NO: 263601 - DNA, 706 bp, Homo Sapiens; identical to SEQ ID NO: 2918

SEQ ID NO: 263602 - DNA, 931 bp, Homo Sapiens
  misc_feature (218)..(218): n is a, c, g, or t
  misc_feature (242)..(252): n is a, c, g, or t
  misc_feature (358)..(369): n is a, c, g, or t
  misc_feature (779)..(792): n is a, c, g, or t
gggaagcccaaaagccccgggggaggacccaacccagatatttcccccaggcccaaaaaatgcccggaaaaaattcaaaggtttcctgggttggacccaaagggattttttaaagggaaaccttgtggctttggggtggagggagacccccaattgcctgaaacggagacccccaagagtggaaagggaaaaaccaaccccagaaaatgcaaaaatcncgaagtcccctgccccacgggggnnnnnnnnnnngctgtcaaaagcggaggcaaaaggggctttcacagctttatgggggtggggttgatggcagtagcttaaataataacgggaggaggagggtttttatacttcagcnnnnnnnnnnnnctgcccccctcttcctctacgcggaagaggagagactggtagcttgagggttaaggagaaaacagtatttcccccccacttctttaataggcaaaccatctagaaatggactgtcataaaaaaatgccagatcccccctgtgacctgacagcccccaattcctagagaggtgagagctgtcgtgtggcaggttaggagaggtgccaaccttgggcgatgcggcttcttgggaaataacagctccagcgagaaagaattggggtgagggagaggatgggggccagaatggggggacccttaagtggtaccaaaattagctgccgtctgctccctgctggtgggtccttggggtggaaagcatggcagggagggggttggggctgaatggagaagaaagtgagatgctgatnnnnnnnnnnnnnncacccttctcagagggtccacggccctggttctgaagagtagaaaatcaacaggatcaagcagagggctttcctgggtcacccctgctgaaccccagctcagttccggtgagggatcaatgctgcctggagtaggggaa

SEQ ID NO: 263603 - DNA, 789 bp, Homo Sapiens
  misc_feature (238)..(247): n is a, c, g, or t
  misc_feature (324)..(333): n is a, c, g, or t
cctgtagtttcattacctttttgaataatgtcatacaaaaaatgtatttgtttttttgtgctgtgagaattgatgtttgtagattaataatcattttgtttagaattacaaaatagtttttaaatattgtctgagaaaagccaaagttaatgcaacctagtggaaactgtaagaccatttgagtattgtttgttttattgatgcatttggattttgttgtttgatggaatttgagccnnnnnnnnnntacgcaggctttcctatttctacaactgattgtacttatgcattttgtaccagtggaactttttatactggagattnnnnnnnnnntggaaatttttgtggcttgctctggtgggcccctgacaatgactgatttcaagtttgatttcgggttgattgattgattgatagaaagaaagttgcttttcttttgagaattaaaaactttggcttgatttcttttttccctttgcttatatctagcattagaattttgtcttaaaataacagcggtaagtttcactttttattctgtattgtgcagttacacaataaggtaattagatttagaagtactcagtcactttaagtggataaatgtattagttaaaactttagggttttgcttttttgctgttttagatcaaagttttttctgattccttctgtcctcattgggaacataaaccgtgtagtttgaaacagtcaaaacttatttttgtaatgtatgttattgtgtgatgcagttttttgcttctgtctccaatattaaaccattttccg

SEQ ID NO: 263604 - DNA, 433 bp, Homo Sapiens
  misc_feature (49)..(49): n is a, c, g, or t
  misc_feature (83)..(83): n is a, c, g, or t
  misc_feature (90)..(90): n is a, c, g, or t
  misc_feature (246)..(246): n is a, c, g, or t
  misc_feature (393)..(393): n is a, c, g, or t
  misc_feature (419)..(419): n is a, c, g, or t
aagcctgtaaaatttaaaggggaagttggggtgggacgtaagagcaaanaggacagcaggagaagagaaattacgggtcaccnaagtttntcctgggctagtggctctggatatagatttaaagagaggtcagagtaaatggactcccaggtttcttatcaaagaaaactataccctcaatgaggagctgagatgtgccatgcaagagagttcttcctgcagaggcacaggagaaagggcagctgnactctctcatgtggagagagtggcgaggaaggtcttctagtaccatgaagtaagacaggcagagggagaatcctgaggtttgggccaaatgtgagactggtacacacacagttaaagactaaaaagccatcaggaaccctcaaagcnaaattctatctgcacactggctctanaaagttcgcagcaa

SEQ ID NO: 263605 - DNA, 712 bp, Homo Sapiens
  misc_feature (457)..(520): n is a, c, g, or t
  misc_feature (522)..(554): n is a, c, g, or t
  misc_feature (556)..(560): n is a, c, g, or t
  misc_feature (573)..(585): n is a, c, g, or t
ggggactgtctcccccatgtccaggtcacagtttcaagggcagagtccagagagcagacagagttctgtgagagcaggagagcagtctggaaaccctggctgtgcataccgtgtcagccgtgggcctggagatgggagcaggtgagacgcagagccccagtactgagaggaggaagccctcttacagggccccttgcccaccccaaagtccgtgtctgaaacacggagcgggtgctgcttcaacccgcatttaatgctgtgtaagttgcgataaccacgtacgagtctgtctggttgatttctaatgtgactcctctggtatttcctcctggtaataaatacaagtgtgacctttcagattgcatatctcaaaagtaacattgctaatgttttataataaaatatattatgtgtgttttggttggtgaaaataatacagactacattttaaaagatnnnnnnnnnnnnnnnnnnnnnnnnnnnnnnnnnnnnnnnnnnnnnnnnnnnnnnnnnnnnnnnnannnnnnnnnnnnnnnnnnnnnnnnnnnnnnnnnannnnnaaaattttttagnnnnnnnnnnnnntcgaaaaatttttttaaaacatttctcttggggggccggggccccatgagggaagggaaactcggcctttattgtttctcccgaagaaaacaccgggcctgaaaagggggggtgggtttctcccccc

SEQ ID NO: 263606 - DNA, 693 bp, Homo Sapiens; identical to SEQ ID NO: 3393
  misc_feature (537)..(537): n is a, c, g, or t
  misc_feature (566)..(566): n is a, c, g, or t

SEQ ID NO: 263607 - DNA, 1373 bp, Homo Sapiens
  misc_feature (659)..(659): n is a, c, g, or t
gggagtgcgcctttcagcctcacctgcagctgcgcctccttgcacctgcgcctgtgctttttctcccagcactgcggacgcgactcgagggtgacgctcgctccgctcgtcccgctcgtcatggcctacccgggatacggaggagggtttggaaattttagcattcaggtgccaggaatgcagatgggacagccagtgccagaaacaggcccagctatactcctcgatggatactctgggccagcatattcagacacttattcctcagctggtgactccgtgtatacttacttcagtgctgttgctggacaggatggtgaagtggatgctgaagaacttcagagatgttcgacacagtctggaattaatggaacttactctcccttcagtttggaaacctgcagaattatgattgccatgttggatagagatcacacaggaaaaatgggatttaatgcattcaaagagctatgggcagctcttaatgcctggaaggaaaacttcatgactgttgatcgagatggaagtggcacagtagaacatcatgagttgcgtcaagccattggtcttatgggttataggttgagtcctcaaacattaactactattgttaaacgttatagcaagaatggcagaattttctttgatgattatgttgncttgctgtgtgaagcttcgagcattgacagatttctttaggaaaagagaacacttgcaacaagggtctgcgaatttcatatatgacgattttttgcagggcactatggcaatttgaatgcttagaattttaaacctgaagagacactgtgaattcttttgtttggaagaagtgaactggactactttaaaacttttaagggttttctatgttcttcctacctgttaaacctcttccctttctgtgtgtttttattttagcagatagttcaaagcaataaaagatttcttttttaatttgaggtattactgcttttggaaaagttattttataaatatgtgcatattgtcataaaatattgtatgattaattgatttaaataatgcttagccttaattttagataatgtaaatttagaggaatgtactttacaagatagattgtataagaagccaaataatgaaagcctagaaaaaactaatttatacttatctgaaggttacaaattagacttttaaattttctttgtagttggtggtgtttgagggttggctagaaatgaaagcctggattttgtgccatgtttgtaatatagtttgttcccttgatcaaataatccgaagaaaggaaacttaaagatcttttgctgggaagaaagaaaattatctcccctagttcaatctgtagttgaaattagacctaccgaagggcatgg

SEQ ID NO: 263608 - DNA, 873 bp, Homo Sapiens
tcaaacatctgattgacgcttgcaaactgtctgaatttgccatgcaaggttttcaaacaatttgcatgtttttcagatgctttcaaatctttttttaaaaaaatagtgtaaaatattttaataagccaaagccatgtggaatttttgtttagatgccttaactgtgccacaccccacaaccccctatattattttggttgtctatttctcacagcatattttcagttttttgtccatttgacatcagtctgtggtttattttgtcatcagattacttgtgggtatacctaccccaaaattgttttctcattcacagcattagcatattcagcaaatccatctgtggtgggaattaaaaatattattggtattaaagaaatccattcaccccaaaacttgttttacaggattacaattttaattcaaaatttccagatttgggctatttctgtatgatccaataacttattttgtcacagggcttaatttgccatttttggggatttgtcgactcattttgtctgaattttcacaactggtattatgtcactagctacctgatacggctatttcccttataactcaatagtaccttaacacaaagtataactctgtagagttggtgaatattttagggaaatattagcaaaatgcatgtagtaaagacatcttatgaaaactgtattcatggaatttgatttagcatgctcagttgccagttcccattatcgatactctttctttgcagaataccttaggaaccgttatttccctcagtgtaggattgctcttaaaatgtattcagttatttagtgggcccccacagggagtgggagtcttggaaatctaattcttaaatggcccgttcagtga

SEQ ID NO: 263609 - DNA, 584 bp, Homo Sapiens
  misc_feature (389)..(389): n is a, c, g, or t
gctaagccgtcctaccagcaatctctctttctcctaagaatgtcatgccttctcaagacctgatgaaaggaataagatatttgtgcctttttataatagcatctattacgaaagtaaaattcagttgcttacagttttggccgctttgtagcactattataaacagcccaaatttatggccttggacttactgcatgacacatggcctggttacctgtcatggaatgctgcagtggtggtttgccaagcttctgtggatgtttgaagactttatttttgcagtcttaaccttgggctggacctaagtgtatgtaaaccatatgatgtctgtattgtttatagatgctgacaaaagaaaactagaccttttgttttttgttgtaagattnttgttttcatgcctatgctcatagtagatagtttgcaaatgaaagttgatttgccatacttttaaataatattgttttagcttgaatattctataatacacttttatagagtataacatgctaaatcactgttttgttgtaagaaaggtgtaaacattttgttaataaaatgctatgtttacgaatgtccccccc

SEQ ID NO: 263610 - DNA, 1048 bp, Homo Sapiens
  misc_feature (16)..(16): n is a, c, g, or t
gcttcaagaggcaacntctctctacatcgacctcggcgctctggctggctacttcaatcttgttcggggaccaccaacgcttgaatatggctgaaggatgccatgtttgctctaaattaagacagcattgatctcctggaggctggttctgctgcctctacacaggggccctgtacagtgaatggtgccattttcgaaggagcagtgtgacctcctgtgacccatgaatgtgcctccaagcggccctgtgtgtttgacatgtgaagctatttgatatgcaccaggtctcaaggttctcatttctcaggtgacgtgattctaaggcaggaatttgagagttcacagaaggatcgtgtctgctgactgttttcattcactgtgcactttgctcaaaattttaaaaataccaatcacaaggataatagagtagcctaaaattactattcttggttcttatttaagtatggaatattcattttactcagaatagctgttttgtgtatattggtgtatattatataactctttgagcctttattggtaaattctggtatacattgaattcattataatttgggtgactagaacaacttgaagattgtagcaataagctggactagtgtcctaaaaatggctaactgatgaattagaagccatctgacagcaggccactagtgacagtttcttttgtgttcctatggaaacattttatactgtacatgctatgctgaagacattcaaaacgtgatgttttgaatgtggataaaactgtgtaaaccacataatttttgtacatcccaaaggatgagaatgtgacctttaagaaaaaatgaaaacttttgcaaattattgatgattttgtaattcttatgactaaattttcttttaagcatttgtatattaaaatagcatactgtgtatgttttatatcaaatgccttcatgaatctttcatacatatatatatttgtaacattgtaaagtatgtgagtagtcttatgtaaagtatgtttttacattatgcaaataaaacccaatacttttgtcta

SEQ ID NO: 263611 - DNA, 796 bp, Homo Sapiens
  misc_feature (744)..(744): n is a, c, g, or t
  misc_feature (771)..(771): n is a, c, g, or t
ggggcacttggcttcaaagctggctcttggaaattgagcggagagcgacgcggttgttgtagctgccgctgcggccgccgcggaataataagccgggatctaccatacccattgactaactatggaagattataccaaaatagagaaaattggagaaggtacctatggagttgtgtataagggtagacacaaaactacaggtcaagtggtagccatgaaaaaaatcagactagaaagtgaagaggaaggggttcctagtactgcaattcgggaaatttctctattaaaggaacttcgtcatccaaatatagtcagtcttcaggatgtgcttatgcaggattccaggttatatctcatctttgagtttctttccatggatctgaagaaatacttggattctatccctcctggtcagtacatggattcttcacttgttaagagttatttataccaaatcctacaggggattgtgttttgtcactctagaagagttcttcacagagacttaaaacctcaaaatctcttgattgatgacaaaggaacaattaaactggctgattttggccttgccagagcttttggaatacctatcagagtatatacacatgaggtagtaacactctggtacagatctccagaagtattgctggggtcagctcgttactcaactccagttgacatttggagtataggcaccatatttgctgaactagcaactaagaaaccacttttccatgggggatncagaaaattgatcaaactctttcaggnatttttcagaagcctttggggcact

SEQ ID NO: 263612 - DNA, 704 bp, Homo Sapiens; identical to SEQ ID NO: 178430
  misc_feature (631)..(631): n is a, c, g, or t

SEQ ID NO: 263613 - DNA, 915 bp, Homo Sapiens
  misc_feature (31)..(31): n is a, c, g, or t
  misc_feature (848)..(857): n is a, c, g, or t
ttcttgtcattctaattggaaatgtgcatcnacttcccatttttcttactgatctcagtgcaaactacactagtctgtttctttgccctggtctcaagtctctaagaccgctggtgtgtattatgtgggctaagttcatgtgttatcctaaggcacaagagttgaggaatgggtgagcttggtgtcagagcactgtgtggttggagggtggactcttgtgatgctgtggggatgaaattggccctcttttagcataagttggggagtgtgcactggctggaggcttccatgaggcttccagccatgaggtgtgagctgaaaccaatttttcctctttccttatagcatgttgagaaaatctgttgggttttcagcagtcagggaaggccggagttctgctttaatctgggtaactgaggctaatatgagcaagactttggttaattaactgggttctcagatgccacagactccgtgagaagtcaccattattttcaatggttgtgatagaatttcccccagtagccattattttaagattatattgcagagttgctttattttgagctttttgtgtatacacaatcccaaactggaagaaattttaaaaaaaggaatcctgctgtgaaaggtatatattactctagatttttcttactgtaaatattgtaagattgtaatactgtccgatattttattaacccaccaaatgttaaatctatggtgaaaatcaaaccttatttttaaattgtgccttcctttatttaactggggggtggggccccctgtttggctggaacagtaattaaaagtttaaaatttcttggaatggtaaaaaaattaaaccnnnnnnnnnnaaaagagaaatggtaaaaaacacttttacaatgggttttcccctctttaagtgggggg

SEQ ID NO: 263614 - DNA, 450 bp, Homo Sapiens
ggtctctcagcgtatttgggtcttctttgcccaaaagaacacaaaagcctttttccattgtatggaagatagtttttaagacatttgaaactttctactatagtttacagaacaaattattttatttttattgtaaatcttagtgtggaagagctgatttctaaaatatgattaaagtaaatatatacctatgaatatcaagagtcgtctccctgagcctgtagttggaagtgacgactgtaatggaatgatgtcttgtatagaaatgcccttctctgaaataaagagaactcctgggctttctaaagaggctgcgggaagccatcctccactcccactgtgtgtgagagcagtgcttctgatcctgctgtcaccccgacctctggcaggagccggcgccagtaggaaagacctccttcctaaataaaagaagtgtctcccatggaaaaa

SEQ ID NO: 263615 - DNA, 1200 bp, Homo Sapiens
  misc_feature (988)..(988): n is a, c, g, or t
  misc_feature (1111)..(1111): n is a, c, g, or t
  misc_feature (1121)..(1121): n is a, c, g, or t
gggcctcgttttccagacataactgaagactgctatcttcatcccaacatactgtgtatgaaatacttgatggaagtcaacctccctgatgaaatgcatagcttaacttgccacgtggtaaaaatgactggaatgggagaagtggattttctgacatttgatcctatagccaaaatggcaaaagctgttaagtacgatgtacaagctgtagctatcattgtggtggtattgaaactgctctttctattggatgacagtttcgagtggtctttgtctaatcttgctgaaaagcataatgaaaagaacaaaaaagataagccatggtttgatttcagaaagtggtaccaaattatgaagaaagcttttgatgagaaaaaacaaaaatgggaagaagcaagggccaagtacctgtggaaaagtgaaaagccactctactactcatttgtcgacaaaccagtagcatataaaaaaagagaaatggtggtgaatctacagaaacaatttagcacactggtcgagtcaacagcaactgctggaaaaaaaagcccttcaagttttcagttcaactggactgaagaggacactgatagaacgtgtttccatggacacagccttcagggagtcctgaaagagaaaggccaatcactgctgactaagaattcattatattggcttagtacacagaaattctgcagatgctattgtacacatgtgacaacctatgaagaatcaaattattctctgagttatcagtttatactaaatctcttctccttcctgctcagaataaagacttcccttctccatgaagaagtgagcttagttgagaagaaactttttgagaaaaaatacagtgtaaaaagaaagaaatcaagatccaagaaagtgagacgacattgagaaaatgaaatagaaactttctggaaaaatattttaatagtgataataacatcagattttaatataacattccagagaattgtggaanatactgcatatatatgtatagactctgacacatatttacatatatatcaagtgtgcttagaaaaatgtatattgtaaagcaggtgagcttcatttgatcttatttttcagagtatgaacattnctagagaaangttaaaacatagcaaaattgtataattgtatccagaaatgtatactcatccgtattttaaagctaaaattattttttta

SEQ ID NO: 263616 - DNA, 872 bp, Homo Sapiens
  misc_feature (704)..(704): n is a, c, g, or t
  misc_feature (775)..(775): n is a, c, g, or t
ggactgagtttggacattccagtttcgaccaggctgaaatttcccacagtgaatccgaacatctcccagctagggattctccttcacttagtgaaaatcccacaacggatgaagatgacagtgagtatgaggactgtccagaggaggaggaagacgactggcagacgtgctcagaagaagacggtcccaaggaagaggactgcagccaggactggaaggaaagctctactgcagattctgaggctcggagcaggaaaaccccacagaagaggcagatacacaattttagccatctggtatccaagcaggagttactggagctctttaaggagctacacactgggagaaaggtgaaagatgggcaacttacggtcggactggtgggctaccctaatgttggtaagagttcaacaatcaacaccatcatgggcaacaagaaagtatctgtgtctgccacacctggtcacacaaagcactttcagactctctatgtggagcctggcctctgcctgtgtgactgtcctggcttggtgatgccatcttttgtgtctaccaaggcagaaatgacttgcagcggaatcctcccaattgatcagatgagagatcatgttcctcctgtatcactaatcataacgcctagagaggatgaagatccccaccgacctccaacatcggaagaactgttgacagcttatggatacatngcgaggatcatgacagcgcatggacagccaggacagcctcgatctgcgcgctacatcctgaagggactatngtcagtggtaagctgcctgtactggccatcctcctcctggaaggagaatcctgtaaacttttcggcatcaaaaccagcggacttcctaaaagaacaa

SEQ ID NO: 263617 - DNA, 2412 bp, Homo Sapiens
  misc_feature (152)..(152): n is a, c, g, or t
  misc_feature (1686)..(1789): n is a, c, g, or t
  misc_feature (1795)..(1797): n is a, c, g, or t
  misc_feature (1963)..(1972): n is a, c, g, or t
  misc_feature (2002)..(2010): n is a, c, g, or t
  misc_feature (2190)..(2190): n is a, c, g, or t
  misc_feature (2224)..(2236): n is a, c, g, or t
ctgccctttccctggccgggttcccagtttacacagtgggacagtgaaacacataatgagtctgtgtcggccctggtagacaagtttaagaagaattaccaggtatttgacatcaatgctgaagttgacgagagtgactgtggagacttccncgatgggtccctgggggatgactttgatgccaacgatgaaccttgaccacaccggcagttggggatcatgaagagttcaggagctggaaggagccctgccaggttcagagctgccaggaagaaatgatttcccttggggatggagacatcaggaccatgtgcccccttctgtctatgaaacctggagaatattcttatttcagtcctcggaccatgtcgatgttggctggcccggatcactggcgctttaggcctcgacgcaaacaagatgctccttcccaatcagaaaacaaaaagaagagtacaaaaaaagattttgaaattgactttgaagatgatattgactttgatgtatattttagaaaaacaaaggctgctactattctgaccaagtccactttggagaaccagaattggagagctaccacccttcctacagatttcaactacaatgttgacactctggtccagcttcacctcaaaccaggcaccaggttacttaagatggcccagggccatagggcagagactgagcattatgaagaaattgaagactatgattacaacaaccctaacgacacctccaacttttgccctggattacagacagcacaacagaatggtgacactccagaagcccaaggattagacatcacaacatatggggagtcaaacttggtagctgagcctcagaaggtaaataaaattgaaattcactatgccaagactgccaaaaagatggacatgaagaaactgaagcagagcatgtggagtctgctgacagcgctctccggaaaggaggcagatgcagaggcaaaccacaggggaagctggaaaagaagcggccctggcagaagtggctgacgagaagatgcttagcgggctcacgaaggacctgcagaggagcctgccccctgtcatggctcagaacctctccatacctctggcttttgcctgtctcctacatttagccaatgaaaagaaatctaaactggaaggaacagaggacctctctgatgttcttgtgaggcaaggagattgagttcactatggagaagtcagcagcaggaggcccatcccttactcagttgccgggacatccccagtctcgggggaagaagatgccatgggcttatacccaggctgtagccaactaccaacgtgcctgtttgtttgttgctctttccttctctccatcatagtctgggtgccagcgccctgaagctccgtgctcaactgattaaactttactgccctatggtgaccatctaggagaggggagggcagagggggtgagggtactattctggattgagaaaacctatatccattctttatatcaatgtatagttttagtctcctaaattgatctgttattttccaaactattctcttgtagaaaattttccagtgggcacttaatggtgcccttgaagaacttcctaatccatgtacataaaatacatcatatgtacacttataaatgtatatagaatgctcaaaaataaaattcttaataatagaactggcaaannnnnnnnnnnnnnnnnnnnnnnnnnnnnnnnnnnnnnnnnnnnnnnnnnnnnnnnnnnnnnnnnnnnnnnnnnnnnnnnnnnnnnnnnnnnnnnnnnnnnnnnacgggnnngggggacggggccccacaaaaaaactttctgaaccccttcgttgggcgcccgcgcgccccccaaagggaaggagcgcacccgccacataaagtgtctccccctacgagaaacctcccggccaattcacaatgagggggttgaagattccccacccataaaaaaaannnnnnnnnnacgggggcaaacacaaaatggtgttttttnnnnnnnnntcctcctcggaggggcggttgttgtggagggcccaattacttgggggaatgtacttcaaacaggggatccctccccagggggaagtcccgtaaaactcataacataatttccccccgtgccgcccttttgacccccttaataaaaaggagaaaaatggtgtgggcaacaattcactatanaacatactcttgtggcagcaaccagtgcagaggnnnnnnnnnnnnnagatgggggttttagtttgcacaccctctatattaccacccacaggggaggtgttgcccgcaacgccctgtggtcgcgcctgttggggcaaagacacaatatttcgcccaccgcgtgggcgagagacctgggggcacgaaaagaaagtctgcctgctataatgttcaccgccccct

SEQ ID NO: 263618 - DNA, 660 bp, Homo Sapiens
  misc_feature (409)..(430): n is a, c, g, or t
  misc_feature (461)..(474): n is a, c, g, or t
  misc_feature (499)..(582): n is a, c, g, or t
gggggagtcggcgccatgaccccatcgaggcttccctggttgcttagctgggtctcggccacggcgtggagagcggcaagatcaccccttctgtgtcattctctgaggaaaacaagttcttctcaaggaggaaagtctgaacttgtcaaacagtcccttaagaagccgaagttaccagaaggtcgttttgatgcaccagaggattcccatttagagaaagaaccactggaaaaatttccagatgatgttaatccagtgaccaaagaaaaaggtggacccaggggcccagaacctacccgatatggagattgggaacgaaaaggacgctgtattgatttttaagtcgcatattctttaacttcaatattgttttctgaatatgtacatctgaattaacttatttctgatnnnnnnnnnnnnnnnnnnnnnntatgtcgtgtagtttgtataatgtgtttaannnnnnnnnnnnnngatggctttggaagaaaatatgctnnnnnnnnnnnnnnnnnnnnnnnnnnnnnnnnnnnnnnnnnnnnnnnnnnnnnnnnnnnnnnnnnnnnnnnnnnnnnnnnnnnncagcctagaaatgattcttagagctgtaggcctttacttcatcatttttcagtttaaattaatcagttgcttataaaa

SEQ ID NO: 263619 - DNA, 376 bp, Homo Sapiens
ggggccctgggagagccagaccccaaggcccagaaaggctcaggtttccttccttcgcagcttttagaccaaaatatgaaagacttacaggcctcgctacaagaacctgctaaggctgcctcagacctgactgcctggttcagcctcttcgctgacctcgacccactctcaaatcctgatgctgttgggaaaaccgataaagaacacgaattgctcaatgcatgaatctgtaaccttcgggagggcactcacatgccacccccagcagctcccccgggggctagcagaagtataaagtgatcagtatgctgttttaataattatgtgccattttaataaaatgaaagggtcaacggccctgtttatattggtgaaa

SEQ ID NO: 263620 - DNA, 1232 bp, Homo Sapiens
  misc_feature (465)..(569): n is a, c, g, or t
  misc_feature (571)..(572): n is a, c, g, or t
  misc_feature (574)..(574): n is a, c, g, or t
  misc_feature (580)..(580): n is a, c, g, or t
  misc_feature (582)..(582): n is a, c, g, or t
  misc_feature (586)..(586): n is a, c, g, or t
  misc_feature (590)..(591): n is a, c, g, or t
  misc_feature (594)..(601): n is a, c, g, or t
  misc_feature (605)..(613): n is a, c, g, or t
  misc_feature (616)..(616): n is a, c, g, or t
  misc_feature (623)..(630): n is a, c, g, or t
  misc_feature (632)..(642): n is a, c, g, or t
  misc_feature (646)..(646): n is a, c, g, or t
  misc_feature (650)..(658): n is a, c, g, or t
  misc_feature (666)..(685): n is a, c, g, or t
  misc_feature (819)..(831): n is a, c, g, or t
  misc_feature (883)..(997): n is a, c, g, or t
  misc_feature (1056)..(1065): n is a, c, g, or t
  misc_feature (1090)..(1182): n is a, c, g, or t
gtgttctcacagtgtggggcagccgtccttctaatgaagacaatgatattgacactgtccctctttggcagttgcattagtaactttgaaaggtatatgactgagcgtagcatacaggttaacctgcagaaacagtacttaggtaattgtagggcgaggattataaatgaaatttgcaaaatcacttagcagcaactgaagacaattatcaaccacgtggagaaaatcaaaccgagcagggctgtgtgaaacatggttgtaatatgcgactgcgaacactgaactctacgccactccacaaatgatgttttcaggtgtcatggactgttgccaccatgtattcatccagagttcttaaagtttaaagttgcacatgattgtataagcatgctttctttgagttttaaattatgtataaacataagttgcatttagaaatcaagcataaatcacttcaactgctannnnnnnnnnnnnnnnnnnnnnnnnnnnnnnnnnnnnnnnnnnnnnnnnnnnnnnnnnnnnnnnnnnnnnnnnnnnnnnnnnnnnnnnnnnnnnnnnnnnnnnnnannanaaaaananaaanaaannaannnnnnnnaaannnnnnnnnaanaaaaaannnnnnnnannnnnnnnnnnaaanaaannnnnnnnnaaaatttnnnnnnnnnnnnnnnnnnnnaaaaaaattttttcaaacctcttcttggggcgggggggccccccaagaagaaagaaaaaaaagggggcattttgttttctcccaaagaaaaaacccgcgccacaaaaaagagtgggggttttcccctctccccnnnnnnnnnnnnnccccgccgggggagacacccaaaggggtttttataaaaaaaaccccagggannnnnnnnnnnnnnnnnnnnnnnnnnnnnnnnnnnnnnnnnnnnnnnnnnnnnnnnnnnnnnnnnnnnnnnnnnnnnnnnnnnnnnnnnnnnnnnnnnnnnnnnnnnnnnnnnnngaggagagtggtgggggaataataattaataaacactcctccccgcgcgcggggggagnnnnnnnnnnacagggcgtgtgagtaacccttagnnnnnnnnnnnnnnnnnnnnnnnnnnnnnnnnnnnnnnnnnnnnnnnnnnnnnnnnnnnnnnnnnnnnnnnnnnnnnnnnnnnnnnnnnnnnngcccccccttttaataaaaggggggggaacacccccccggggtggttggg

SEQ ID NO: 263621 - DNA, 907 bp, Homo Sapiens
cacagttctctgatccggtgtatgaagcctttatacaaagtggagcagatgaggcttggtgccaggctcgaggtctgaattgggcagcattgtgccaagcccataaacttcggggagaactcctagaactcatgcaacgaattgaacttcccttgtccctaccagcctttggctctgagcagaatcgcagagaccttcagaaagcactggtgtcaggatactttctcaaggtggccagagacacagacgggactggaaattacctactcctaacccataagcatgtggcccagctctcctcatactgctgctaccgaagcctcagagctcctgccagacccccaccatgggtgctctaccacaatttcaccatatccaaagacaactgcctttccattgtttctgagattcaaccacagatgctggtggaattggcccctccatacttcctgagtaacttgcctcccagtgagagcagagaccttctgaaccagctaagggaaggaatggcagattctacagcagggagcaaatcatcctcagcccaggagttcagagatccctgtgtcctgcagtgacctgcctgcctatggaatggagctgggttcatctcatcacattagattatccctcagggtgacaccaaagcacccagacagatttagaagcccaaagtttagggtcaaatgtaaaccctggaacctgagtcccaagaaatggtagactgggaatggaaagaatggggtaaaccacagtctacataggggaaagactcctttccttagcccttctcttattgattggagaggggactggacatgcctcctcattcctccttaactttggcccaacccaatccttgtgactcccccttgggggacctataaaaagaattttttcctaggag

SEQ ID NO: 263622 - DNA, 180 bp, Homo Sapiens
ggaagtatcaggaatataaatatttggtaattctgtgtaacaagagagacatggaaaaggaaaaaaatccactatatcatgggctctgcagaacatatcaaaataggatttcttaaatttttcaacccccagaccatactgactcaacatggagtctcactggccaagaaaattgccttt

SEQ ID NO: 263623 - DNA, 840 bp, Homo Sapiens
  misc_feature (668)..(668): n is a, c, g, or t
  misc_feature (672)..(672): n is a, c, g, or t
  misc_feature (772)..(772): n is a, c, g, or t
gggcccgccctgcagaggctacaccctggcaggacttaatctcctaaatctctgccgcttaccctagtcttttgcaccaatttaatcattccttcacgcagggtctactgagcgccatcccttgtgctggactctggctacttaaataggaatcaagccaggtccctaccattgctcagcccgcagccgagtgggaaagaagctcgcaaaagcagcaaacaggcagtaatcgagggaagatggaagagttgagtcaggccctggctagtagcttttctgtgtctcaagatctgaacagcacagctgccccacacccccgcctatcccagtacaagtccaagtacagttccttggagcagagtgagcgccgccggaggttactggaactgcagaaatccaagcggctggattatgtgaaccatgccagaagactggctgaagatgactggacagggatggagagtgaggaagaaaataagaaagatgatgaagaaatggacattgacactgtcaagaagttaccaaaacactatgctaatcaattgatgctttctgagtggttaattgacgttccttcaaatttggggcaggaatggattgtggtcgtgtgccctgttggaaaaagagcccttatcgtggcctccaggggttctaccagtgcctacacncagnagtggctactgtgtcaaccagttttcttcacttctgccaggaggcaacaggccgaaactcaacagcaaaagactacaccatttctagattgcattttacnatggaggtaaaccagaactactacgtttctggatgtgatgtgctgggcggggaacaccctttttaagg

SEQ ID NO: 263624 - DNA, 847 bp, Homo Sapiens
  misc_feature (104)..(105): n is a, c, g, or t
  misc_feature (176)..(176): n is a, c, g, or t
gttctcctttaataggtcggtattccttaaatccctattctgttacaaattagcctgccatattcagggaatggaaccaacccagtaaaactgttactgaagannctaatttaaatgatccatttaagagaaatgcagtcaaaataaggcaataaccatcagccctatctgtactnttcttctgtgcctactcagtaaaattgagaaaataatttttgcccacttctataaaaatatcaccccatttgctacctagcatatgagagagacaagactagccctgtcacgtttgtctctaaaaagaaaaatgataggcctggtggagagcaagctatatggaaacatcagcctttccttttctaagatacgtcactccaattcttccttaaatataaacttcctccttgatttatattaaccccttaggaggcactataataactttatgttcccatggaacatagggtttttcaagaatttcttaaaataaaaaaggtttgaaagctatggagtaaactcagcagctgtgatattccgttcaatctaccacagatgtcaaacggtcacattttacagaagtcaaaggaaaacaaaaccacagttctgcactcttccacagggcaaggaattgatcatattctattttcctttcaggaattcataaaatccctaggatagcacctttgtatgggctgaaccattaactgaactaaaattaatacaggaagcttaacattcaacattgtgcttgaacaaaacttaccactactcaatttttcttccaaactatgttagtaatatacattttgcaaagagtctagaaagtttttaaaagaaatctctttcc

SEQ ID NO: 263625 - DNA, 1067 bp, Homo Sapiens
gttgctgaagtccaagagaccttggcagaaatgatccgacaacaccaaaagagtcaactctgtaaatccacagcaaatggtcctgataagaatgaaccggaagtagaagcagagcagcccctctgcagttctcagagccagtgtaaagaagaaaaaaatgagccactttctctgcctgagttaaccaaaaggcttaccgaggcaaatcagagaatggcaaaatttcctgagagcattaaggcctggcccttcccagatgtgctggagtgctgcctcgtcctgcttctcatcaggtcccactttcctggctgtctggcccaggaaatgcagcagcaggcccaagagctccttcagaaatacggcaacacgaaaacttacagaagacactgccagaccttctgtatgtgaattttcacacaccttgaagaaactgccaaattgaaaatgtttgacatctttcacctctgcagttatgcctcaccagacattcactctggtccctagatgtttttgcagtaatccaaaagaatacaaacaaggattaagtttgaatcaaccctgcctacccatagacaacggtggatctgactttagactcaattgtggtctcctactggagggaagatcatgaaaagcccacagtagttattcagaactaacacctgcagagtgttggtcatctctacagccttaggcaggtttcacccaaagaggagaaacttctgtcgtcacccaaagtgttacatgcttaaaacacaagctacctttgtaaatacttcatctgatcagaagtgtgtcatgcttgtttgagatggagttgctgcattttaggactattgatacctttttttaattgtttttataatatttaatttgaaagaggagacccctctctctctactctttcatagactgaagtttgaatatgaaataggccttaaccatcatgttgactctcctgtcagaattttaggttggaaatttggttttattctttcatgtaattgcttatttgaacagatcacttactaaagctttagaagaagtgaacaaaaacaaacaacaag

SEQ ID NO: 263626 - DNA, 1322 bp, Homo Sapiens
  misc_feature (1050)..(1050): n is a, c, g, or t
  misc_feature (1257)..(1257): n is a, c, g, or t
ggaccctgggtgacgtgcacattgcttgggtatggaacggtagaaatttgggtgtttttaaaaccttgtttggggttgttcctgtccttgttgagaatcatagagatgtctgtgttcttggagtatttcacactgaggactaatctgctatcttcattccagtccctacccctcagtgcctgctctcatccaaataacctgggaggtgacaatcaggatatctcaggaggtccaaaggtggaacagacctctttgcctttcccagcgtctcatacccccggtagtgcagctgtgggtggaggctggggtgtctgcacgaagtcaggccagcgtcctcctccacagcctgtcactgccccctccccagcctgtgtccacagtgctgtgatcccgagggaagtcctccagtctaagtcacagtgccctgacaggtgagaagcaaactcccgctggaagcctccatctctttggaaaaacagttagtcttggagcctgtggcccaggcccttctgtccccaggcatcatcccaacagctcattttccccagtcccgcccttcgttcaagggtcaggaatggaccagaacacatgggttcctgggaagggcccctgaacaaagggctatggctgtggaaaaggtccttggcccgttgaactcacacagaccctgtaccctctcggcaagcatcttcagtcagattatcctcagtttcagatacttcataataccttgtgttgtgtggggtcatacatcatcgtgtttgtaagagaagatggtcattttattctctgtataaaacttagctctaaagcagaaactaaagcagcaaatgcaggaaggctgtctcgccatcctcaagactcagcagctctcattctccagtggtgagcacaccatttgtgctgctgctgttgtcgtgaaatataataacagtggaagtcacaaaaatgtcccctgcccagccccctcgccgcccttgacctcctgcaggccatgtgtgtattacttgtctagtgatgtcctctcaaagtgctgtacgcgagctcggngccacctccgcctccctttcagagcctgctccccgccctctctgctcgctgcattgtggtgttctcttctcaagggctttgaaatctccccttgcactgagattagtcgtcagatctctccccgttctccctcccaaacttatacgaactggatttctttaggacggaaaccgcaggccacctggcgccggggcgtcttactcccgnctgcttgttctggccccctcccctcggaacccaaccagggctcaggcttcaagggaccttgtttt

SEQ ID NO: 263627 - DNA, 926 bp, Homo Sapiens
gggggttctggaggcccctgaacagagggctatggctgtggagaaggttcttggcccgttggactcacacagaccctgtaccctctcggcaagcatcttcagtcagattatcctcagtttcagatacttcataataccttgtgttgtgtggggtcatacatcatcgtgtttgtaagagaagatggtcattttattctctgtataaaacttagctctaaagcagaaactaaagcagcaaatgcaggaaggctgtctcgccatcctcaagactcagcagctctcattctccagtggtgagcacaccatttgtgctgctgctgttgtcgtgaaatataataacagtggaagtcacaaaaatgtcccctgcccagccccctcgccgcccttgacctcctgcaggccatgtgtgtattacttgtctagtgatgtcctctcaaagtgctgtacgcgagctcggcgccacctccgcctccctttcagagcctgctccccgccctctccgctcgctgcattgtggtgttctcttctcaaggctttgaaatctccccttgcactgagattagtcgtcagatctctccccgtctccctcccaacttatacgacctgatttccttaggacgggaaccgcaggcacctgcgccgggcgtctttactcccgctgcttgttctgtcccctccctcggaccaaacagtgctcatgcttcaggaccttgtttgtcgaagatgttggtttccctttctctgttatttatataaaaataatttatcaaaaggatattttaaaaaagctagtctgtcttgaaacttgtttaccttaaaattatcagaatctcagtgtttgaaagtactgaagcacaaacatatatcatctctgtaccattctgtactaaagcacttgagtctaataaataaagaaatcagcaccc

SEQ ID NO: 263628 - DNA, 379 bp, Homo Sapiens
  misc_feature (109)..(109): n is a, c, g, or t
cccatgtgtgtaattaacctgtccaagtgatgtccctcctcaaaaagtgctgtaacgcgaagctcggcgccaacctccgccctcccctttcaagagcctgctccccgcncctctccgctcgcctgcaatgtggtgttcctcttcctcaaggctttgaaatctccccttgcactgagattagtcgtcagatctctccccgtctccctcccaacttatacgacctgatttccttaggacggaaccgcaggcacctgcgccgggcgtcttactcccgctgcttgttctgtcccctccctcggaccaaacagtgctcatgcttcaggaccttgtttgtcgaagatgttggtttccctttctctgttatttatataaaaataat

SEQ ID NO: 263629 - DNA, 725 bp, Homo Sapiens; identical to SEQ ID NO: 178445
  misc_feature (550)..(566): n is a, c, g, or t
  misc_feature (687)..(687): n is a, c, g, or t

SEQ ID NO: 263630 - DNA, 1466 bp, Homo Sapiens
gtactcccgaaattgactgttcaggtcactgaaagcaaggagaagcctgataaactgccacggccacgaggagtctaaggacacatccaatttccattcgcatccaaaatggaatccgagacagaaagaggaccttagccttcatatctgtttttttcttatgaagcttcttctggttggaaacttgtcaaatttcatcaggaatacagagatttcgcatgatttcttaatgggattcagctgcctacgctgcagtgctttcagctgtatttgagaatgcactgtgtttctgccttgttttacgtttgcagatggctggaactctccgtgtctccttttctttctgtcatggctggcaagagctcatgggccatgagctgcatctttataaacatgaacagattagcaggtattcccaaatgggacaaatgctaccttattgcagacagtttctagtatagtcccacattctttgagaaagtaggtggagaccccatcagcaccaggccactggcagcaaatggttgtagccaggagccagaatagagcaagtccagcctgagcctgtggtcggcagtggagaagagagggtcgcagacctgaggcaaagggcagcctgaacaatcaagaaccagagcagccctggcacccgacacccaggagagtgggctacaggaagaggatctgagaccagagcccacagagtctgcagaaactagaggcacaaggcacgaggaatcacaaagcaaacttaagtgccgacatcaaagaaggcattctcaccctgtttcctgcttctgggtttctccacattcctatagccttacagacagtaagcccagtgtggtgggaacagggaattgaagtggaaagcacaggccaggggatctgatgggtctcttagatcccctgggagggcatgacaacatagagaaagaagagtcctttaaaagcattcaacataacgtagtttgcccaggcagttcacgctgactgaaacctcctctgtcttctgaactcgggcatgcctatctcatctcttcttttgaagcagaatgctttaaatttttatttttatcctgtgaacttcaatatgcgacctccttctgtgacagagcttctctttgggtcccccatgagtggatatcaccttgtactcccctccacccctaagctcacgttcttcatcttctctttgaccctcagcatgttatcccttgacccattcttcagttttcatgtctatcatctgcaaaatcttttctgcctcatagtacttagggagatcagacatacgcaacgctggagacaggaaacctcccaatatcaaacttagccactttgggcccatctggtcttggcacgttgcctaacttgtggtttggaagaccggtcctcgtcccatttcgttttcactgggcccctgatgttggccagtctctttctccttcttgaccctccctgtt

SEQ ID NO: 263631 - DNA, 536 bp, Homo Sapiens
atccgactggtactcccgaaattgactgttcaggtcactggaaagcaaggaaagcctgataaactgccacggccacgaggagtctaaggacacatccaatttccattcgcatccaaaatggaatccgagacagaaagaggaccttagccttcatatctgtttttttcttatgaagcttcttctggttggaaacttgtcaaatttcatcagctttatgaaaacccaaccacagcaaacatacaggctggcacaaggtttgctctaaagaggaagagatctaggtggggctgaagatgtatcacttccctttggagagtgccctgccacaggcagggacaatctttcatcactcatagaggaaaacataagggaggaggcgccttccagtaaatatcctcagttgagttttcatattatatataatatattcaaggagacaaccacccaatttccctccctggattccaagccttgagatataactaatatttaagttttgcattgcagagtgccctgataataaagaacaaattcct

SEQ ID NO: 263632 - DNA, 802 bp, Homo Sapiens; identical to SEQ ID NO: 4066
  misc_feature (30)..(31): n is a, c, g, or t
  misc_feature (668)..(678): n is a, c, g, or t

SEQ ID NO: 263633 - DNA, 916 bp, Homo Sapiens
  misc_feature (861)..(861): n is a, c, g, or t
  misc_feature (899)..(899): n is a, c, g, or t
gggtgacagagctgcacagaaaagagtccgatcaagagcttcaagaaagcacaaagatgaaactgtggattttaaggctcctttgcttccagtgacctgtggtggggtgaagggaattttacataagaagaaattgcagcaaggaatcttggtgaagtgtatacagactgaggatggaaaatggttcacccccacggaatttgaaatcaaaggaggccatgcaagatcaaagaactggaggctgagtgtgcgctgtggcgggtggcccctacgatggctgatggagaatggatttctgcctgatcctccaagaatacgttacaggaaaaaaaagagaatactgaagtctcaaaacaatagctcagttgacccttgtatgagaaacctggatgagtgtgaggtgtgccgggacggaggggagctgttctgttgcgacacttgttcaagagtcttccatgaggactgtcacatcccgcctgtggaagctgagaggaccccgtggaattgcatcttctgcaggatgaaggagtctccgggaagccaacagtgttgtcaggaatctgaggtcctggagaggcagatgtgtcctgaggaacagttgaaatgtgagttcctcctcttgaaagtctattgctgttctgagagctcctttttttgccaagattccatactattattatattaaagaagcgtgtcaaggcctgaaaggagccccatgtggttggataaaatcaagaaaaagctgaatgagcacggttacccccaagtgggaggggtttgtacaagacatgcgcctcatcttccagaaccacagggcctcttacaagtacaaggattttgggccaaatggggatttaggantggaggctgagttttgagaagaatttccaagggaagtnttttgctatttcaggga

SEQ ID NO: 263634 - DNA, 1355 bp, Homo Sapiens
  misc_feature (34)..(36): n is a, c, g, or t
ctgcaaagatgtttaatgcacttagattacagannngaagagggggcaagaaggaaacgacatctaagtgagtcaccccaaaaattcttacaaaagtcccaggctggctgacagccccaggaaccgagtccgccactggacattaaaaactaatataaaattttacaaaaatctgcttgtcgcagcattcaggtacttgtacaaaaaggaggggtctccctacagggctcctgacttgtaacagggacccaggcacctcacctggcatggatgtcctagaagccagaaagggaagaccagacacaaaaatacagtaaaggaaattctctactggtcagccccataggggcaccgaccttcaggttttctccctgcttgcaactcaatccgaaaccccagtcccaagaccctgtgtctatttttaaaaatgctctagcccttttagactctccccttggcttctccagtccctgccttggagcactgcccttggaagagaaagatacgggcaggaagaggcaccagctccccacacaggcctgagacctcgcacaagcctcccaaacccccctcagaattgcagctgagtctgcagtcctcctgcagcccacactgagccagcagagccacaggagcctgccttatatagcaggcaaagaggaaagggaaaggcccttctcagaagctctagcaccagggacctggaggggtgggtacaactaggcaagtctccaagtagcttgcagaagaggcagatttagggagggaggccccttacctcctccacccactacaaggtcaggggctccctcagagctgcagggagggaaagaaagggtacattcaccaagcatcctgtgccagaagctgtgctggacagggtccaaggtcagcttggcttgatcttctttaagggtcctctctcaccagccagcagcccaagaaacctctgggaggcaccaatgcccataggaaaggaggcctggtgagaaatgtgtgataccctgtcctgccctcagagccagtgagatggagcctggcccctgcaggatcttgggtgagcgtgaggctcctgacatattgcaggtacgaaggggccacaggcttcatgtgctcatcatctcggagctcacccacttcctcctgccttaccctgctcccccagaacagggccaccatgctggctggtgtctaccttcagtccacaaagaccctccaggtctggggcaggttgctgaccaggtgcttcacaaactaatgacaaagcttagctcagaaaatgccccatccccacccaaccaacgatggaggcacccagcagatggaagtacggcgaactgcagcagggagccccc

SEQ ID NO: 263635 - DNA, 1001 bp, Homo Sapiens
  misc_feature (633)..(633): n is a, c, g, or t
gtaccggccggaattacgggatatcgtcgacccacgcgtcggtaactggctctctaggaagcctcacttggccgtaacctcaggaaggttctctttgaccccatctcatttcgaagccacttctcaagccacttgagaaaaatgatgtgacagttcctatcaaaaaggattcagaaacatataccatctgtgaagaaagtggccctttctcccgcttgcaaaatagacattctcaaattccaaaatgccagccaagaccccaatttacctgaaagcagccaataacaagaaaggaaagaaatttaaactgagggacattctgtctcctgatatgatcagtcccccgcttggagactttcgccacaccatccacatggcaaagagggccagcacgatgtcttggagatatttcctttcttcaagggaactacgagcttttacctggaaaccaggagaaagcacacctgggccagttccctgggcataatgagttcttccgggccaacagcacctcggactctgtgttcacagaaacgccctccccggtgctcaaaaatgccatctccctcccgaccattggaggatcccaagctctcatgttgcccttattgtcaccagtgacatttaattccnaacaggagtccttcgggccagcaaagctggccaggcttagctgcgagccgtccatggaggaaaaagtcagagaaaaggagcgtggagaatgggcaagcaccacgagaaactcgtggggtccagggtctgcattccagcaaccaagggagaaaggccatctcagctggccgacagtaccgatggccaccgggaatgttgcttccaccctcgagtctaggaagaaagagggccttgactaagacctctccgaggacggggccttggaggggggtgggtagaaaaacgcaccctcggaggacaaacggagggcgtagcggggcacacaaacgtcgaaaaactcatccgctcctcgcgtgttctgctcctag

SEQ ID NO: 263636 - DNA, 620 bp, Homo Sapiens
  misc_feature (295)..(488): n is a, c, g, or t
  misc_feature (498)..(510): n is a, c, g, or t
  misc_feature (533)..(545): n is a, c, g, or t
caatgtggggtcggaaacttgggggcaggtccctgggagtgggaagcctcttccttgtgtctttcgctcccacttttagctcatcgcaccaatattgcagacttggaaagaagcataagcttcccatttcacaaaggggaaactgaggtgcgggtgcgcgggcctgggacggccgtcccatggcttccatctgagccacctcgggaccccagcactcctggcgccctcttctcatcgcttggcctatgacaggtcaccgtgtgtaaatctttcccaataaagggttgcacaaagnnnnnnnnnnnnnnnnnnnnnnnnnnnnnnnnnnnnnnnnnnnnnnnnnnnnnnnnnnnnnnnnnnnnnnnnnnnnnnnnnnnnnnnnnnnnnnnnnnnnnnnnnnnnnnnnnnnnnnnnnnnnnnnnnnnnnnnnnnnnnnnnnnnnnnnnnnnnnnnnnnnnnnnnnnnnnnnnnnnnnnnnnnnnnnnnnnttgggggcgnnnnnnnnnnnnnaaaaaattttttaaaaccttttnnnnnnnnnnnnnccccaaaaaacaaaggaaaggggcctattttttccccaaaaaaaccccggggaagaaaagggggtggacttcccc

SEQ ID NO: 263637 - DNA, 1019 bp, Homo Sapiens
ttagggcccatttaaggcggggaaattctatttcctaaaacccccccttcccatggatatcaatagtccgggtcctaatatttccttgcccttaggcagggatttttctggggattctgaattggggtctgattaccaagctgaaagatatcttaaattaataaccagggcagggaagaattgagtggggaaagaaagcccttcggacagttagataagtatccaaagcagtgtgggcaaaaagagtaagccaacatccccttgggatttttcccatgtgggtatcactgagcaaaggctgctgtgggaagatatgtagattaatgggaaatgcagggttattatggaggaaataactcacaggatgatttcatagcctggctaaattactacttgattaactcctgataaaactcagagcgcacaaagcgaggcagagaatccttttccatcagggcatggattcttttctgggccatgtcaaagctgctcagggaaggttccaccaggttcttcattgtgatgtccttagtgaagtggtcaatattcacctctttaggagcctccgtttgaatgaattcttcataaatttgctttgccttctcagccatcttggcaggggacttgatcttcttgtaatcctcacaggcaatccagaactcaaggttttcctcactgaattcagacttcaggaaacttttgaaactggcaagtccatagttgttctgcaggagtttgtccagggaatcacgccactgcagggcctcgtccagcgaggttttctgggtcttggctggtttctctggcttctcattgtacggaatgacaaggtcaccaactgagtctggcttctggaggagaattcccaacttgatcttaatctccttggccctttccaggcatgagtggggcaaagctgcaagtcctttgcacattttggcaggtggcttagctcctccgctttaagtacaacttcttaacagcagagccagtctttgaaaacttcaaaactgtctccc

SEQ ID NO: 263638 - DNA, 852 bp, Homo Sapiens; identical to SEQ ID NO: 166428

SEQ ID NO: 263639 - DNA, 792 bp, Homo Sapiens
ggggggcgggtcctgagtcgcgaccctggtccggacctgacctgaattgcgaccccaacctggactgctcccctgaccgcaacccctacccccgcccaccagtatggcccggcacgtgttcctaacggggcccccaggagttggaaaaacaacattgatccataaagccagtgaggttttaaaatcctctggtgtgcctgttgatggattttataccgaagaagtcagacagggagggagaagaataggattcgatgtcgtcacgttgtccggcacccgggggcctttatcgagagttgggttagagcctccacctggaaaacgtgaatgccgagttgggcagtatgtggtcgacctgacttcttttgagcagttggcactacccgtcttgaggaatgccgactgcagcagtggcccagggcaaagagtgtgcgtcatcgatgagattgggaagatggagctcttcagtcagcttttcattcaagctgttcgtcagacgctgtctaccccagggactataatccttggcacaatcccagttcctaaaggaaagccactggctcttgtagaagaaatcagaaacagaaaggatgtgaaggtgtttaatgtcaccaaggaaaacagaaaccaccttctgccagatatcgtgacgtgcgtgcagagcagcaggaagtgaagacacgtgcattcctgccttccgtgaaggagtgcccagttcaagaggagcctgatggagccctgcctgtcgaggctgtatcctatgggggttatggaaccttgtgggcttttcta

SEQ ID NO: 263640 - DNA, 907 bp, Homo Sapiens
  misc_feature (18)..(18): n is a, c, g, or t
ggccaagattcggcacgngaaatctgtctgggctccaaacccactttgactttttgagctgtcacttggcagaaactgatgctgggactcggtgattcctgtcctgtttctgagtgctcctgaagagctgggcctcctgcctgggtaacaaaacatacctcaccctctcccagccttccaggcttttcttttagagagttacctagcacaagattgaagaagaggaaaggagctctgaagcctgttctctcacttcttcccacaggtcaccaaggaaaacagaaaccaccttctgccagatatcgtgacgtgcgtgcagagcagcaggaagtgaagacacgtgcattcctgccttccgtgaaggagtgcccagttcaagaggagcctgatggagccctgcctgtcgaggctgtatgcctatggggttatggaaccttgtgggcttttctagagaaaactcaacagctgtttcccataaaatgtttaaaagatcaaattagccttaatgctggattgtctgtacaagattaactatccattgtggcttatctatgcttaaagatttcttgtttatttcctcttgcagtcatgcacatgatttgggtaaactgtgagatgagaaatggttttcagagtattagatggaattcacccccgttgaagtttataaatgtgttcaggggaagcgggaggaaagagttcactgcctaatcagttttgcatgtcatgaaaattaaattcctctccaggtgcagcttcagcctcatgcaacttaaagtgataacagttatttgattttttaaaaaatattattccaaaagaaaaccattttaggtcatctcccccaactctgtttgcttactgcttaataaatataaaaataaatctgatggttacagacaggaaa

SEQ ID NO: 263641 - DNA, 881 bp, Homo Sapiens; identical to SEQ ID NO: 94273
  misc_feature (669)..(669): n is a, c, g, or t
  misc_feature (812)..(812): n is a, c, g, or t

SEQ ID NO: 263642 - DNA, 968 bp, Homo Sapiens; identical to SEQ ID NO: 178461

SEQ ID NO: 263643 - DNA, 740 bp, Homo Sapiens
  misc_feature (109)..(118): n is a, c, g, or t
  misc_feature (497)..(508): n is a, c, g, or t
ggttgataagaactagggaaaacatgtcttttaggtgtcttgctgatgactatccataggaggaatggctatcccaaaaaaagttccgcaaaaaagtagatgagtttcnnnnnnnnnnaagcactaaagaacaaaatgcatttttcattaatacaggcttctgatgaaccaggaatcctgttttcgtaaagttccaatgttgatgagagtaaattcttaagcatttgtcctagaggtgaaagcagctgaatgtttctgaaccatcaagaggcaaacaaacaggagtttgtttcttgaacctgcttatgcacacagctcttaactcctcatgaggcacacagctcttaactcctgatgaaccaaggatttactcataactttctccttgtcatggaggcttaatagacaacagaataaatgcatttcttgggcctcttataaacttgggaattcttagaaagctgcttctattaccaggctgtaatagctggtatagnnnnnnnnnnnncttctcttaagatgttctgttattagtctgagacagccatttttttgttttaaggaaaaatatcagtcagtgctccgggaggtaatttcctgtggggtctgcaccctcctgtctgggtggtggatgtgggtttgagaagtaggagagcagggtggtaccgtgtgggctcttaccctttatgtgattttggacaacagtgccttccattaaagttctttttatcaactgttac

SEQ ID NO: 263644 - DNA, 1053 bp, Homo Sapiens
gggagatggttctggagtgaccaagtcttcatggaggattacagtgcgacagcttgagagcatgattcgtctctctgaagctatggctcggatgcactgctgtgatgaggtccaacctaaacatgtgaaggaagctttccggttactgaataaatcaatcatccgtgtggaaacacctgatgtcaatctagatcaagaggaagagatccagatggaggtagatgagggtgctggtggcatcaatggtcatgctgacagccctgctcctgtgaacgggatcaatggctacaatgaagacataaatcaagagtctgctcccaaagcctccttaaggctgggcttctctgagtactgccgaatctctaaccttattgtgcttcacctcagaaaggtggaagaagaagaggacgagtcagcattaaagaggagcgagcttgttaactggtacttgaaggaaatcgaatcagagatagactctgaagaagaacttataaataaaaaaagaatcatagagaaagttattcatcgactcacacactatgatcatgttctaattgagctcacccaggctggattgaaaggctccacagagggaagtgagagctatgaagaagatccctacttggtagttaaccctaactacttgctcgaagattgagatagtgaaagtaactgaccagagctgaggaactgtggcacagcacctcgtggcctggagcctggctggagctctgctagggacagaagtgtttctggaagtgatgcttccaggatttgttttcagaaacaagaattgagttgatggtcctatgtgtcacattcatcacaggtttcataccaacacaggcttcagcacttcctttggtgtgtttcctgtcccagtgaagttggaaccaaataatgtgtagtctctataaccaatacctttgttttcatgtgtaagaaaaggcccattacttttaaggtatgtgctgtcctattgagcaaataactttttttcaattgccagctactgcttttattcatcaaaataaaataacttgttctgaaaaa

SEQ ID NO: 263645 - DNA, 449 bp, Homo Sapiens
atgcttttagtttctgttggcaagcattctcagaggtggtgaagcataagaagatgaagaaaagaccttcatactttgaaatcttaatagctttaagaaacatatttcttataatctcttttattaggtttctctccttatggataaaataaggcatgctttaatacaagtgatatgacttgttatttcaggcttatgctagaacattgcggaccttacgtcaccagatgtactttcggacggcttgacatttatctaatctgtacattatctcgttgtatatgtggcagagatttacccaaggactgacagtacgagttgctaggataatttgaatgtgtttttttgttgcagaagaggacgagtcagcattaaagaggagcgagcttgttaactggtacttgaaggaaatcgaatcagagatagactctgaagaagaacttataaat

SEQ ID NO: 263646 - DNA, 459 bp, Homo Sapiens
  misc_feature (330)..(330): n is a, c, g, or t
  misc_feature (353)..(353): n is a, c, g, or t
aaagtgaaaaaaatcagtattaaatgtaagtagtgtatttgtaaatgcttgacaaggggatgttaagggcacaaaaataagattcaggtggtcaatttttcacttaggtcatgctgacagccctgctcctgtgaacgggatcaatggctacaatgaagacataaatcaagagtctgctcccaaagcctccttaaggctgggcttctctgagtactgccgaatctctaaccttattgtgcttcacctcagaaagggtggaagaaggtgaggcttacctggtactgcttacatgctcggtcacttctgtaagctctgttcacataggccacnttgtgatttgccaaacttccgtngttgttctgtcggaagagaggataagttgttagataaactcactttagcaaagtaaatttgtggagtatcagcatacctgccagcctgaacatttcttcacaagct

SEQ ID NO: 263647 - DNA, 487 bp, Homo Sapiens
actcattgaactggagcatcaagacatctcatggaagtggatacggagtgatttggtgtccatgcttttcactctgaggacatttaatcggagaacctcctggggaattttgtgggagacacttgggaacaaaacagacaccctgggaatgcagttgcaagcacagatgctgccaccagtgtctctgaccaccctggtgtgactgctgactgccagcgtggtacctcccatgctgcaggcctccatctaaatgagacaacaaagcacaatgttcactgtttacaaccaagacaactgcgtgggtccaaacactcctcttcctccaggtcatttgttttgcatttttaatgtctttattttttgtaatgaaaaagcacacttaagcttgcccctgggaatcgggtgcagcttgaatagggcacccaaaagtccgtggactaaaatttcgtttgtcttttttgataggcaaattatgttaaggaggaca

SEQ ID NO: 263648 - DNA, 487 bp, Homo Sapiens
aatgtctttattttttgtaatgaaaaagcacactaagctgcccctggaatcgggtgcagctgaataggcacccaaaagtccgtgactaaatttcgtttgtctttttgatagcaaattatgttaagagacagtgatggctagggctcaacaattttgtattcccatgtttgtgtgagacagagtttgttttcccttgaacttggttagaattgtgctactgtgaacgctgatcctgcatatggaagtcccgcttcggtgacatttcctggccattcttgtttccattgtgtggatggtgggttgtgcccacttcctggagtgagacagctcctggtgtgtagaattcccggagcgtccgtggttcagagtaaacttgaagcagatctgtgcatgcttttcctctgcaacaattggctcgtttctcttttttgttctcttttgataggatcctgtttcctatgtgtgcaaaataaaaataaatttgggc

SEQ ID NO: 263649 - DNA, 864 bp, Homo Sapiens; identical to SEQ ID NO: 15533
  misc_feature (638)..(638): n is a, c, g, or t
  misc_feature (772)..(772): n is a, c, g, or t
  misc_feature (778)..(778): n is a, c, g, or t

SEQ ID NO: 263650 - DNA, 1083 bp, Homo Sapiens
  misc_feature (786)..(786): n is a, c, g, or t
taggaatatagaacacgcctgggtttttaatataaaggcaggctggtacggccggaattcccgggatatcgtcgaccacgcgtcgggaggccgcctgcgctccagccatgcgtctgctcgcctaccctcgcagcggagaggagggcgacgcggagcagcccagggaaggggagacgccgctggagatggatgccgacggcgccacgtagcctcccatccctgtccccggcacggatccgggtcagtcaccacgaacaggggcactcggcatgctgccccagcactggagaagcagcgctgtgggggcaatctgtcacactctcagagtctgggacttgacttgctaccaacaactgctgtgcaattctgctgagcaggaatatcatgagctgttcaataatgacggacgcattggttgagatgaagtttccagtaaggaagtgacagtgcaatgtggatatttatggctgtaaaataggaagagctttagttcccaggctgaacctgccactgctggagccatttcaacaaggcatcctcacaacaaagaagagatgtgatttggtaccatttcacaccagcaggtgtctggacgaaaacatcaatgtgaataagggccaagtgcagtcctgtcttgattaaattacttaataatattattaaataataataggtctgggcagtattgtttttaacctgactcatccagctgtccttcaaatagctccgtctccctctaaccagaactgatttttaaaaagaagtaatttttctccctgggctggngaaaaccctaatggaactgaaacacacttttactttaaaagttttccgaccggggctttgttaatcatactattaagcacctcgggggtcggtaagtaaaaaacacggagagaacaaacacaagaagggggggcccaaacgcggggggcagagtggcaccatttgtgaagggcacagaggattaagagagggggtaaggggagaagggatgtgagctgggggttggaacagaggggaaatagagctgatgtcgggaggtaatgacgaaaaggacggaggccgtgacacacaacgaaa

SEQ ID NO: 263651 - DNA, 768 bp, Homo Sapiens
  misc_feature (17)..(17): n is a, c, g, or t
  misc_feature (241)..(251): n is a, c, g, or t
  misc_feature (605)..(627): n is a, c, g, or t
aatttatacctttcatnctaactgtatgttcgtacccattaactcaactctcttcatctgtggttccgctcacccagacctttcaatccactagttcctgtcattctactctctgcctttaggaggtgaatttccacagctcccatgagtgaagacgtgcagtttctttctgttcctggtggtttcacctgacacggtcacctcccattccagccacgttgttacaaatgacaggctctcnnnnnnnnnnngggggagggtggcgcaaggagaggacacctctctcctggccctgtcgccatcttccctcatcaatagctaaaaatggcaaagaagaaagagccaggaccccgtgccatcaaatcctccggccttgtgctgccctgtctcggcactgcttgccttaggagatcaggagtgttcctagccactgggagatgggatgcctgccactggcagctctgccgtccatcctcaccatcccaccgtccccccaagacagctctccatcccatcctctgcctcccttctagcctcaaccttaactcaggggctcccccgttctcacaccctgggtttgcagggaacattcttctttcaccaannnnnnnnnnnnnnnnnnnnnnntcagggggctggcctaggggcagcctaacaaaaaacccagggccaggccctcttgaaaaagttgcctcccaccatcttcatttaaaaaaacccgtggaaaattcgcacttggcccccacttattcggaaaataagcctccc

SEQ ID NO: 263652 - DNA, 1089 bp, Homo Sapiens
  misc_feature (945)..(945): n is a, c, g, or t
tgtgattggtgtgaatctcatcaggtcgaaggtcgaagaccctgccgtgatcatgagagggactcctcagatccaaagagtgatgactatgatgatcagagaccatgaagtcctcttccccaagtccaaggatatacccctgtcaccccctgcccagaaaaatgaccccaagaaagctccagtggcccgaagctctgtaggctgggatgccactgaagacctccgaatttctaggacagacagcttcagtagcatgacaagcgactctgatacaaccagccccaccggacagcagccgagcgatgcgtttccggaggacagcagcaaagtacccagggaaaagccaggagactggaaaatgcaatctcgtaaaaggactcaaacactccctaaccggaaatgtttcttgacatcagcttttcagggtgccaacagcagcaaaatggagatctttaaaaatgaattctggtcgccttcctcagaggctaaggcaggggaagggcacaggagaacgatgtctcaagacttgcgccaactttctgactcccaacggacttccacctacgataacgtcccttccctgccagggtcccctggggaggaagccagtgcactctcttcccaagcctgtgactccaagggagatactcttgccagtccaaactctgaaactgggcctggaaaaaagaactctggagaagaggaaattgattctttgcagaggacggtccaagagctacgaaaggaaatagaaacacagaagcaaatgtatgagggaacagattaaaaaccttgagaaggaaaattatgacgtttgggctaaagtggtgaggctcaatgaagaactggagaaggaaaagaagaagtctgcagccctagagatcagcctccgcaacatggagcgctcccgggaggatgttgagaagaggaaacaagccttggaangaagaagtcaaggaaatttgtcaaatccatgaaaggacccaagaacgaggctttaagggtcccaggaagtactgcagggacagcccccagagaagcccaaactctggccccctttctcagtgctatcttgatggagggggaaac

SEQ ID NO: 263653 - DNA, 1654 bp, Homo Sapiens
  misc_feature (1386)..(1386): n is a, c, g, or t
attcggcacaggcacaggagacgatggactcactggccatggtggagggtgtcagcagctgccaggacctctaccgcaagcacattggtcccctcctggagcgggtgaccgcgccgcaccttgactggaccgcacactcgccggagctcctgcagttcagtgtcatcgtcgcacagtcaggccctgccctgggagaagccctgccacacgtcgtgcccacgctgagggcctgtctgcagccctcccaagacccgcagatgcgcctgaagctgttctccatcctgtccaccgtgctgctcagagccacggacaccatcaactcccaggggcagtttcccagctacctcgagacggtgacaaaggacatcctggcccccaatctgcagtggcatgcggggaggacagccgcggccatccgcacggctgccgtgtcctgcctctgggcgctcaccagcagcgaggtcctgtcggcagagcagatacgggacgtgcaggaaacactgatgccccaggtcctgaccaccctggaggaggattcgaagatgacgcgactgatctcatgccgtattatcaacacgttcttaaaaacctcgggcggcatgacggatccagagaaactcatcaagatttatcctgaactcttaaaacgcctagatgacgtgtccaacgatgtgaggatggcagccgcctccaccttggtcacctggctgcagtgtgtcaagggtgccaacgcaaaatcctactatcagagcagtgtccagtacctgtaccgagagttgctggttcaccttgacgatccagagagggccatccagggatgcaattttagaggtcctcaaagagggcagcgggctgttcccagatctcctggtgagggagacggaggccgtcatccacaagcaccgctcggccacctactgcgagcagctcctgcagcatgtgcaggccgtgccagccacacagtgaccacgctggtttcagccacggcacacccttgtccccacctgagccagagtttgtggcctttaaatctcataaacaaagcacctctgtgccagcagtgagactgtgacagcaagaatgtactcctcaggacacctgcccgctctttccctggaataacagcctctgagtggattctgcatgttatgtgatttgttctgttcatcaagagggctcccaaacatctgcagctgatttgaaattaaaagtaaggcgcagccgctcctcccgcagccacttcagcagcatcttagattttaagcctcacgtgcgcagctggttcatgaactattggctgcatcctgcttaggtgcccaccaagaaggtttttacctacttaacaaaaaagaaagaagccaaagtgattagaaagaaatgaaatcntcttttttggggtcctgtctactgaaaatttaatatctcagttgaacagactaaaaggaaatttagaatccctaacaacttaaccagatttctccctgtttttaaatatactggggactttaaagggttatatgtccgggtcacccgtatgttttttaagtccggtgttaatggctaacaggtgttggaaaaacaatattttcatgaagaatctaattggggggtggccccccattagggtaggcagggaaaggtaaaagttggcatt

SEQ ID NO: 263654 - DNA, 320 bp, Homo Sapiens
aatttgaaactttttgagcaccagtatgatgccccaagtggaaaatcccacacctgatctcatgtgatgagtccaaactgttgtatgcacaaaattatttaaaatattgcataaaatgaccttcaggctatgaatagaaggtgtctatgaaacataagtgaatttcgtgtttagacttgggtcccatcctccacatatctcattttatatatgtgcaagtattctcaaatccaaacatataccgagtctgaaacacttctggtcccaagcgtttttgaataagggatactcaacctgtagtcttttcttttaggaggggg

SEQ ID NO: 263655 - DNA, 487 bp, Homo Sapiens; identical to SEQ ID NO: 727

SEQ ID NO: 263656 - DNA, 712 bp, Homo Sapiens
gggagttttgtcttcattttgtgatggatggctctttcctttgcagccaaacagggaaaaagttaatggcgaagtgtcgaatgcttatccaggagaatcaagagcttggaaggcagctgtcccagggacgtattgcacaacttgaagcagagttggctttacagaagaaatacagtgaggagccttaaaagcagtcaggatgaactgaatgacttcatcatccagcttgatgaagaagttagagggtatgcagagtaccattctagttctgcagcagcagctgaaggagacacgccagcagttggctcagtaccagcagcagcagtctcaggcctctgccccaagtaccagcaggactacagcttctgaacctgtagaacagtcagaggccacaagtaaagactgcagtcgtctgacaaacggaccaagtaatggtagctcctcccgccagaggacgtctgggtctggatttcacagggagggcaacacaaccgaagatgactttccttcttctccagggaatggtaataagtcctccaacagctcagaggagagaactggcagaggaggtagtggttacgtaaatcaactcagtgcagggtatgaaagtgtagactctcccacgggcagtggaaaactctctcacacaacaaatcaaatgacacagaactcccagtcatgacccctcaagagggagaaaagcagtggagtg

SEQ ID NO: 263657 - DNA, 412 bp, Homo Sapiens
  misc_feature (38)..(38): n is a, c, g, or t
  misc_feature (65)..(65): n is a, c, g, or t
  misc_feature (81)..(81): n is a, c, g, or t
taaggccaactctggcttcaaagttggggcaatacggnccccggggacagctgcccttcccaagnctccttgattcccccnggataagcattcggacacttcgcccattaactttttcccctgtttggctgcaaaggaaagagccatccatcacaaaatgaagacaaaactctctgtctttgcttacaattattacagtgatagatgtaacacatacaaacataactatatcacagcagatgcttccccataattaccatcttcttttctgggacacatccatcttctgcatttcagtattttgccaacacagcagcaaaaataaaccctaaacaaaaagtgcccaaacagctacaccttgtttctattacatcaataatcaattctgaaatccatctattttcatctcaaa

SEQ ID NO: 263658 - DNA, 1052 bp, Homo Sapiens
  misc_feature (663)..(663): n is a, c, g, or t
  misc_feature (734)..(839): n is a, c, g, or t
  misc_feature (893)..(893): n is a, c, g, or t
  misc_feature (956)..(956): n is a, c, g, or t
  misc_feature (982)..(982): n is a, c, g, or t
  misc_feature (1026)..(1026): n is a, c, g, or t
  misc_feature (1040)..(1040): n is a, c, g, or t
gcccttaaaaccttggggaattccagggcagcaggaagttggcagtggccctggccccatggggttgtgggagaagtggcccattccctgctgcctttgatggggcccttcctcatccccatgggccattaaaggacctgctgttctgaggagggtgcacagttctgtgcataaaatgtccccaaagagcaatttatgttgaagagggtttaaccaccttctccctaatttattccccataaatctcgaattttgaaagatgatgtttataaaacaaccttctcttctaataattagctttcttatacttattaatcaaagattaattaatcaaaacatctgacccagcattaccactctaaattgataaaatcctaggccgaaaaacatgttttatgtcttgttagactgggcagctttatctaggaaaatagcttacttcttttcttttacccttaaaacatcatttttatgaaaatgtattatagtattagcttttgaaatgctgaaaatccttaaagatcccatttgatacctttggtctgcccaacacctaccctgccacctaatccaaactaggccaactgaggctggataccctgggttgaggctgatttcattaatacctgagaaacagcaaaatgtagaatagcgacagtggtntaaaattgtgggtgctggagtcaagagagcacccgatgcaaaccctggccctgctgcttagtagccacaannnnnnnnnnnnnnnnnnnnnnnnnnnnnnnnnnnnnnnnnnnnnnnnnnnnnnnnnnnnnnnnnnnnnnnnnnnnnnnnnnnnnnnnnnnnnnnnnnnnnnnnnngaccacagcataccgagcacggcacctgggcacacagtaagggcctcctaactngaagccattgtcatcactggcgcatcctgggagatagcatcacaagtgccagttcttgcactntgtcaccaagaggcctgggtgcgcanggggaggacttcagggaggaaggtattttttcagttccttcctngggaagggcaattnacaaacccaggg

SEQ ID NO: 263659 - DNA, 755 bp, Homo Sapiens
gggattcctcgcgagtgtatggcgtgggctcccttccccctctgtgggtcccgcgagagactctcgggctttgaggtgtgcctgcacaggagacagcaccagccaagctgattgtgtatctacagcgtttccggcctcaagactatcagcgcctgctagaagtgaacagctccagagagaggccacaggagactgaagatcctgaccactgcctggggctaggggtgtcacttcctagaaggggaagggaactctgggtctaacggagtccactcctggggcccactgtgcctcttcccctcagtgtcccttctgacagtgactcctctctctccagcgctgcctgtttcttccccctcctctaagctactcttccttgagccctccctggctgcttcctctcgctcatccgtcagatgcaatctgtgggccgcccctctcccctggccgctaagcagcctccattgatttccgctcgtgtttataggatttccacttagccgtgatcagtagttaagcacaggaaaatcccttgccaccccccctcccttggtcgatgccattgattctgccagcggctcctaaaccgccttacagctgagttagaagatgaggagaggcagcaggggatttccctgcccttgggatgtggggaaacagaagaaaagttgaggaaaatggtttggggatcgcctgttagaactcctagaaattctaatctgaactttgcccactggtgcccagctctgggccca

SEQ ID NO: 263660 - DNA, 427 bp, Homo Sapiens
  misc_feature (27)..(27): n is a, c, g, or t
  misc_feature (133)..(133): n is a, c, g, or t
cctcccttggtcgatgcccattgattnctgccagcggctccctaaaccgccttacagctgagttagaagatgaggaagaggcaagcagggatttcccctgccctgggatgtgggaaacagaagaaaagttganggaaatggttgggaatcgctgttagaactctagaaattctaatctgactttgccactgtgcccagctctggcccagagggtagagtgcctcctgtggaagtttaggggcaaatttgttccctgacctggagagggttagaaagaaccaacagctgccccctccccgcccccgtgttgagacagggtctcaaggctcaggggaagatgcatacctcctatgtaagaatgctcttcccttgctgttattcatacacactttccacttcaaatatacccaaatatggctttcctcaa

SEQ ID NO: 263661 - DNA, 1210 bp, Homo Sapiens
  misc_feature (48)..(91): n is a, c, g, or t
atgaggtttcatcgtgttagccaggatgatctcagtcccctgacctcnnnnnnnnnnnnnnnnnnnnnnnnnnnnnnnnnnnnnnnnnnnntgacaacccgcgcccagcctaactatgaggtgatttaaggaaagtaatgggaaggtgcacttaaatgccctgtgattccctcttttctttatggttaatctgggaaacttgtaagaaaagccttctcttgataacaaattttatgtaactagctcaaacagtgatttgccagatttacttaatcaaggaatatatttaggagggaatcatgcaagatagttttgggtaaagtttgcacagttcataatctaaaagttaaaatgcaaccttatatgctggagagtaaactgccagtaacagtacatttagaaacattgcattctgaaaaagtctcctggggtttatgtgggagtgttacaatttccagaatgactggtctagataatcaacatgtgtgtccggattttaactttaagaagttagatgggaagataaagccaatatatgaagcaatccgggaataagttacataataacctgcacataacaggtagtaagttcaaccataactttataaaaatgttgtatggaaatataatctcaaattctaggagttaaatgatctccaataaaatattcatgtccataaatatgaaaaaaggaaaagctccattgaaatatttttccattttaaatgactttcaggaggcacttacaaagactagaaatttcagtgtaacagctacagcctaccaattccacttggctgtagaagtcaaatttgaaaataatttaaataaaaatacttgccaatgttttgtgataattcccactgaagcccacacttacttgagtgttcctttctctctttaaatattttcacattcagaaccaatgcacattttctggaacaagtggatacatgtaaagaagctatactaaacttttataaaaaggacattatatccttgtatccttcctatatcctactcaattagttctatagattagtaaattttctaaagttattaaaagcagaagttttgaagatggattcaaaggattgatgagactgaaattctttgttaattcccccaaatctgctatggaatcaatttagggaaaggtctctgttcccaaagctatcttaactttttccgtaaaatttactttaccacc

SEQ ID NO: 263662 - DNA, 613 bp, Homo Sapiens
ggctacctcctagagaaaactcgagtggcctgccaggcttccagtgagaggaacttccacatcttctatcagatttgcaaaggagccagtgaggacgagaggctccagtggcaccttcctgagggagctgccttctcctggctgcccaacccagagaggagcttagaagaggattgttttgaggtgaccagagaggccatgctccatttgggcattgacacccctacccagaacaacatctttaaggtcagaagaaaagccacgccacttaagtttggcagagatgacgggcagccctttgcatagagcttttccctggacttggagttggtctttccctgaggatctaggactttgggcccttctgtgctacctccaaggaatcagtcacctctgttctgctgagtctggagaccaggtggtggggtggacggggcataaggaagagtgatgcatacacagtgctagagtacagaatgcagtaagtgatccatgggggcagagagcaaggtaccgcatgatcagaagagagaactagtgctaccgccttgcttgtctagtacattaaaacttacaagtcatgttcacacttctctgctcacttagttttcta

SEQ ID NO: 263663 - DNA, 833 bp, Homo Sapiens
gggaggaatgatgacaagaaaaggccgaattgcagtgtctccatcagcagtttgctctccatgggcacacgatgacaaaatatcctgaagcgaaccactagtctgacctcagtagcaggattggaagcttcatgccatgggagctgtcaagaaaggcatcccaaagagaactgaaatttaaaaataataatagaccttcaggaataggtgattgtccccatatactggggatgaaatacccaatgtaaccaaattccccagtaagatcacttagtttggcaatagtcttttcttttgagcatgttgaagtttatttgctcaatgaaggctgaaattataagtcagtatatatgtattactaagtagaacttgaggtaattatatgttttagtcaaaagcagtttctgtgggcttggtataaaccctactttgtgatttgctaaagcacaggatgttgactcaaaccaaaactagttttgtagttaatatgtgttgtgtttctgtgacttaatagtcaactagaaacgccacctacaacaacccaggtacttaagttttaaaagttttttttaaaacacttgtcaccatattttgaaaaatactaacatttggattactagttataaaagtgtaatttctactgtgtcataatcagccatgcagctggagacttgccctctttgtacagcaaagttgtgaaaaaaagtatttgcactacattttatttaaaccattagggaaaaaaagccaacccatgctttatttttgcccgagatgtaggggcttgtattattgggctagtgggtaagcccgggggaaccactaggggcctt

SEQ ID NO: 263664 - DNA, 827 bp, Homo Sapiens
  misc_feature (125)..(143): n is a, c, g, or t
  misc_feature (748)..(748): n is a, c, g, or t
  misc_feature (783)..(783): n is a, c, g, or t
  misc_feature (796)..(796): n is a, c, g, or t
  misc_feature (805)..(805): n is a, c, g, or t
aaaaggcccccaagttttttcaacaagctgctacaaaacttgggcttcctgagggggggcttttttgcccagtgcatgtactgtacaaaaatccaggcaggggggggtcagagagttcgccattnnnnnnnnnnnnnnnnnnngccccaggcacttgatgcctggaaatgatgtcagacgcagccactcctctgttagaactacagccaaacaatgcgcaggcaatccacagcagctgcccctgcaaatgtcagcgccagcccagtcaaaagagcttgaaacctaccaagccggaggacttggctgcgcttctaatcaaacgcaacattgttctcagcaaggaggaagaatggaaagtgtccccttgtggccaagcctggaacatcacatctgtacgttgcaatctgtggatcagctacgagactgagagaaaggaatgaaaggatggaagaattacaagatcaggcactgctgtctgtctgttccacggatgtaaccacagcacacgcgtggctcacggtactagtgtgataaatgcttgttacatgaaggcgtgaacagggatgagaagagacttcctggagaaacaaaaggactaacaatcaggaaggggaggtgatcggggcaggagtaaagtggacaccttcagcaaagccatttcgctgttgatcttctgattgttgcagtgttcatgtcctgttcaccagagccccctcgtgttttgatgtttgggccattgccgccagcntgatcttaggcaggccaattccttattttaccttnttttgacaccagnttggtcccnggggttcgttccacccgatgtt

SEQ ID NO: 263665 - DNA, 1434 bp, Homo Sapiens
  misc_feature (591)..(591): n is a, c, g, or t
ggggccactctgctggctgaggctgcggagagtgtgcggctccaggtgggctcacgcggtcgtgatgtctcgggagtcggatgttgaggctcagcagtctcatggcagcagtgcctgttcacagccccatggcagcgttacccagtcccaaggctcctcctcacagtcccagggcatatccagctcctctaccagcacgatgccaaactccagccagtcctctcactccagctctgggacactgagctccttagagacagtgtccactcaggaactctattctattcctgaggaccaagaacctgaggaccaagaacctgaggagcctacccctgccccctgggctcgattatgggcccttcaggatggatttgccaatcttgaatgtgtgaatgacaactactggtttgggagggacaaaagctgtgaatattgctttgatgaaccactgctgaaaagaacagataaataccgaacatacagcaagaaacactttcggattttcaggggaagtgggtcctaaaaactcttacattgcatacatagaagatcacagtggcaatggaacctttgtaaatacagagcttggangggaaaggaaaacgccgtcctttgaataacaattctgaaattgcactgtcactaagcagaaataaagtttttgtcttttttgatctgactgtagatgatcagtcagtttatcctaaggcattaagagatgaatacatcatgtcaaaaactcttggaagtggtgcctgtggagaggtaaagctggccttcgagaggaaaacatgtaagaaagtagccataaagatcatcagcaaaaagaagtttgctattggttcagcaagagaggcagacccagctctcaatgttgaaacagaaatagaaattttgaaaaagctaaatcatcccttgcatcatcaagattaaaaactttttttgatgcagaagattattatattggtttgggaattgatggaaggggggagagctgttttgacaaagtggggggggaataaacgcctgaaagaagctacctgcaagctctatttttaccagatgctcttggctgtgcagtaccttcatgaaaacggtattatacaccgtgacttaaagccagagaatgttttactgtcatctcaagaagaggactgtccttataaagattactggatttgggccactccagaattttgggagagacctctctcatgaaaaaccttatgtggaacccccaccctacttggcgcccggaggttcttggtttctgatggggacctgctgggcattacccgtgcctgttgaacttgctggagctttagggaactcattcctttttatcttggccctgccagggggaatccccccttttctcggaacccgcggcatcctatcttcctctgcaagggctcaccatccctccggcggcac

SEQ ID NO: 263666 - DNA, 691 bp, Homo Sapiens
  misc_feature (19)..(19): n is a, c, g, or t
  misc_feature (60)..(60): n is a, c, g, or t
  misc_feature (66)..(66): n is a, c, g, or t
  misc_feature (94)..(94): n is a, c, g, or t
  misc_feature (459)..(624): n is a, c, g, or t
  misc_feature (631)..(648): n is a, c, g, or t
aactgaggaaaaaacatgnaacagaaactgcccccggtggaacaacacgtaacctagtgnagtganctgtactcctttcctaggaatgcctgantccagagtgcaccctctttgacctaggtccccgggatcccccttgtcccccggagtagggacctaacctatagcacaaagtaatatgtgcccaatgcctatttgtgaaatgtttggtctttcctaaacgactaaaggatttgttgggtttttgccttaagttttgaaccaaatccctagagccagctgataatatttaataatctggaggagagaataatgatgtaccaataagtggagattcctccttatgatgtatgctaggttatggaagatgtaaaatattcaactttttcctcctttttttggactttgtattttactgcatgttttcttcatttttaatcaataaagagtaaattgtcnnnnnnnnnnnnnnnnnnnnnnnnnnnnnnnnnnnnnnnnnnnnnnnnnnnnnnnnnnnnnnnnnnnnnnnnnnnnnnnnnnnnnnnnnnnnnnnnnnnnnnnnnnnnnnnnnnnnnnnnnnnnnnnnnnnnnnnnnnnnnnnnnnnnnnnnnnnnnnnnnnnnnntttgtgnnnnnnnnnnnnnnnnnnaaaaaattttttaaaaccttttttgggggggggggcccccccg

SEQ ID NO: 263667 - DNA, 793 bp, Homo Sapiens; identical to SEQ ID NO: 765

SEQ ID NO: 263668 - DNA, 577 bp, Homo Sapiens
  misc_feature (367)..(402): n is a, c, g, or t
gggggagtggggaggcggcaagaggacctgcggcaggccctcttcggcagtctctccggcccggtttccctcggcgtgctactgtgcgctcgatccagcaccatggggaagcgggacaatcgggtggcctatatgaacccaatagcaatggcgagatcaaggggtccaatccagtcttcagggccaacaatacaggattatctgaatcgaccaaggcctacctgggaagaagtaaaagagcaactagaaaagaaaaagaaaggctccaaggctttggctgaatttgaagaaaaaatgaatgagaactggaagaaagaactggaaaaacacagagagaaattgttaagtggaagtgagagctcatccnnnnnnnnnnnnnnnnnnnnnnnnnnnnnnnnnnnntctggtaggtattcatcttcttcttcatcaagctctgattcttccagcagttcttctgattctgaagatgaggataagaaacaaggaaaacggagaaagaaaaagaagaaccgttcacataaatcttctggaaagctccatgtcagaaactgaatcagacagtaaggatagtttc

SEQ ID NO: 263669 - DNA, 908 bp, Homo Sapiens
  misc_feature (147)..(157): n is a, c, g, or t
aacatggtaaccttgtgagtgcctgtaagaaccacactgtaaagaactcatcattaatgcttgaaaatgttattaagaaggagacttaccatgcagacattccctatttaagaaccatttggttacagtgggttaagaatcacagannnnnnnnnnnaatctcacctgagttagcctagaatgcgctggttgcaaagtggtgtcagctgtggggatcttgggccctcgttcctcacctgcatcctgccctgcactcaggtgctccccctgaagtcagggtcacatcaggtagacctgttactatatgcacctttggcctggaatgctctgaagttggactggaaatgttactaggttggcctgttacaaaaaggaccccatcctgcttaaacacattgatctcccttgccctgcatttgagtctttctagcccacggtctgaaacttgaggcagctttccagatttggaatgtaaaaggctcagtgggcactctgttcatccctgggtggggagggcccagccaacagaagtgcatgtccactgtgcgggccagtgtgtgtttacacaaatttcatctcagctttgaaaatactgctattagtttccactgttggtgaactggattttttcctcctattgaaatgatactttcatacttataaagctgtcgtcaatatttatttcaaggtgctagatttaattttgttattaaattgaaatgcttatcttgtgttcaagcacagcactgattttaacaacctgcatttaatgtgaagtaaccgaagtaggatactgtaactgtgtaaggattttgtttgtaatcttgtaacattgaaccattgaaatgttcagttctttgcttttgagcaaaacgtcaattaaaactaaagtaaaatcttatatattg

SEQ ID NO: 263670 - DNA, 716 bp, Homo Sapiens; identical to SEQ ID NO: 861

SEQ ID NO: 263671 - DNA, 1030 bp, Homo Sapiens
  misc_feature (890)..(890): n is a, c, g, or t
  misc_feature (913)..(913): n is a, c, g, or t
  misc_feature (929)..(929): n is a, c, g, or t
  misc_feature (946)..(946): n is a, c, g, or t
  misc_feature (952)..(952): n is a, c, g, or t
  misc_feature (1019)..(1019): n is a, c, g, or t
ggtcccggccgggatgtacgggatatcgtcgaaccacgcgttcggcttggtcctgctctggtcactggggcttcccaggaggcagcagaggtctggtcataatccagtgtgaagatgaggtgaggaaggaaggggttgctgtccagtgttgggctggtcgctttgattcttcctgcacagctcagcccaccccatctgtactggaagggaccctggagccctgggaccaccccctttcaagtcccaaacactgagtcctctgtcattgtccttgtccctaggctacaatgctacacttggctcaggctgatcaccatgctagtcacaggagggagagagaggcagtgtacttgcccccatctcctggagggaggttgcgttggaaattctaggcccttcagcagagacccatttgtgcccagaccacaatatttcttcttcctcagggactacatgccacagacctgtatccccagtggcaactcctgttagctcccaaacttaaacagtgatctcttctaaatatacaaggcatctacccagccccaatagtgaataaaagtcacaaatttaagttcaacaccctaagcaatttctcaaagccagtctacctgactaggtctatccacgcacggttcccaaccccaaggggaaattaggggattagattaagagtaggtaaagacccttttgttctttcctgttgtaggggaggaagctgttctccccaccccaggtgcctttggaggttaaggctaggttaggccctgcactccacctggggggacggccccttcatcacctgaagtcctcttgctgtgttgactgggaccctcagtttcccacactggctaattactatggaaagctggctctgggccttcgtcttnttaggctttgtggcctagtttgnaaagtcttcacctttnacagggatcattttgtnaatggntgggtgttacatggcagggggaacttcacaaagctgttgttcagggtattggcaggggacaagggantgttttggttt

SEQ ID NO: 263672 - DNA, 662 bp, Homo Sapiens
ggtgtcataaacctctgagactgtagcctgcttcttagcttctcattgagattcctagaggtgcgttcgagttttcagagtaattttccagaccaaccagcgtcagtgggaaatctgacctcttttggcaaactgcgatcattcattttcctgagtcccctggtggggtggggggaattctgcctcaggaccctgaggggtctttggggcaagatggccttggtaatgcagccactaagaacaggacttcattcaaaggcataatgaagtaaccagggtgaccatcaagtaaaattaaagcacaagatcattgtaggaggcttcctttgtcaaagacgtgaacgtgggatttccaacgcaccacggtgtgtccactcatcactgcatgttaggaactgctgtctctttgggacacgagttaaaagaacacactaatttctggagtgtgcctgcagcttcacggccttcattttgttactaagttattttctggaagaacagcaaaaatttcaggttgaaaacagaactttccaagtgctactgaaattccgcagagaattacgctgcgatggtgggtttcttaccctagaaacatcctaacctgtatccacagaagatgtccttttatttttttaaaagatcaataaaatcaagagaaacga

SEQ ID NO: 263673 - DNA, 741 bp, Homo Sapiens
  misc_feature (296)..(377): n is a, c, g, or t
ggtgccttttaggggagcccgtgtatctctttgggatcctgaaagggggcaggaaaggctggggtcccagtccaccctaatggtatctgagtgtcctagggcttcagttttcccacctgtccaatgggaccctttctgtcctcaccctacaaggggcacaaagggatgacaccaaacctggcaggaacttttcacgcaatcaagggaaggaaaggcattcctggcagagggaacagcatgccaagcgtgagaaggctcagagtaaggaggttaagagcccaagtattggagcctannnnnnnnnnnnnnnnnnnnnnnnnnnnnnnnnnnnnnnnnnnnnnnnnnnnnnnnnnnnnnnnnnnnnnnnnnnnnnnnnntcagagcttaccccttggctgtgcagggtcaactttctgactggtgagagggattctcatgcaggttaagcttctgctgctcctcctcacctgcaaagcttttctgccacttttgcctccttggaaaactcttatccatctctcaaaactccagctaccacatccttgcagccttccctcatatacccccactactactgtagccctgtccttccctccagccccactctggccctggggctggggaagtgtctgtgtccagctgtctcccctgacctcagggttccttgggggctgggctgaggcctcagtacagaagggggctctggaaatgtttgttgactgaataaaggaattcagtccc

SEQ ID NO: 263674 - DNA, 804 bp, Homo Sapiens; identical to SEQ ID NO: 178473

SEQ ID NO: 263675 - DNA, 341 bp, Homo Sapiens
  misc_feature (150)..(161): n is a, c, g, or t
ggcatctgaagccaagctgttgtcattttcattcggtgacattctctcccatgacacccagaaggggcagaagaaccacatttttcatttatagatgtttgcatcctttgtattaaaattattttgaaggggttgcctcattggatggcnnnnnnnnnnnncctccagggagaaggggagaaatgtacttggaaattaatgtatgtttacatctctttgcaaattcctgtacatagagatatattttttaagtgtgaatgtaacaacatactgtgaattccatcttggttacaaatgagactccttcagtcagttatccaaataaaagcagttctgaaaaa

SEQ ID NO: 263676 - DNA, 653 bp, Homo Sapiens
tcgggcaacccccttcaaaataattttaatacaaagggatgcaaacatcctataaatgaaaaatgtgggttcttctgccccttctgggtgtcatgggagagaatgtcaccgaatgaaaatgacaacagcttggcttcagatggaattggactatttaaaattgagtttcccaggaaaaataggcactgatttctagaaggaaattaactccttaccgaagctatttattgaagccaatatggctggttaacgtcctcactagtataaagtaacccagtgcaggactctcagacattagctgaaccaagtgtacacagtcagactgcaagggcactgatgaggctactctgaaagctggttgtccccgtcctctaggtgtgaggaccactctgattttatcccaggggcccggtccattcttcccatactgcaactgtcgtgcattatacaaggtaccctgctgcttacccacttcaactactctgcaagtcgattagaaaatcttgttaaaaaaacaaagagggaaaaaaggctcacgttatctcatccaggctgcccgccccagccccccaactggaggcatgccgggtgggggaatgggcgggggcacaggaggctgtcctccaggggggacggcaggaggtgggtagccc

SEQ ID NO: 263677 - DNA, 351 bp, Homo Sapiens
  misc_feature (46)..(46): n is a, c, g, or t
gggaagggccccctaggagaggatcccaggtccttccattttaccnggtgagggcaacctgagacctcaaaggtgatgtaatttgtgcaaagattatagctaattagtagcagagccctgactgggacatagtttgaaggtgaaaaacttcaccaagctacctttcttgaaaggtccaaatgtttatgttttcaactattctttccactgtaccataactttcactacatattaaatgacactttataactaatataataggacaatcatcaatgcatatatagccagcccttcatatctgtgggttttgcatccatggattcaaccaaggaggaattgaaaacactgaga

SEQ ID NO: 263678 - DNA, 418 bp, Homo Sapiens
gaagaagtagataatctgaatagccctatatctatagaaacttaatagtgctgggagatataggtattattatcctcattttacagatgtgaaaattgaggctcagagaagtaaagtctattgctcaaggtcatgtggctagaatatggcagagccatgattcagatccaggtcttctgattcttattccagtgtcctttctagcataccatgttgcctctaaagattgcagctccttatttactagaaaattgttcctgcccaatctacatctccacctcaccccatcttttcttaagcactatgtttgtgtttttatcagtattatattcattgtctttggaatacatgttcttgtttgtgtttggaaaaaaaatctcttttaccagcttgcactcggaccaacttggaaaaaaaa

SEQ ID NO: 263679 - DNA, 850 bp, Homo Sapiens
  misc_feature (755)..(763): n is a, c, g, or t
  misc_feature (822)..(822): n is a, c, g, or t
  misc_feature (829)..(829): n is a, c, g, or t
gggaggacctcattcaagaatccatggcaaaaggagactttgacaatctcagtgggaaaggaaaacctctgaaaaagttttctgactgttcttacattgatcccatgactcacaacctgaaccgaatactgatcgataatggataccaaccagaatggatccttaagcaaaaggaaataagcgatactattgagcaactcagagaggcaattttagtgtctaggaaaaaacttgggaatccaatgacaccaactgaaaagaaacagtggaaccatgtttgtgagcagtttcaagaaaacatcagaaaattaaacaagcgaattaatgattttaatttaattgttcccatcctgaccaggcaaaaagtccattttgatgctcagaaagaaattgtcagagcccagaaaatatacgagacccttataaaaacaaaagaagtcacagatagaaacccaaataaccttgatcaaggagaaggagagaaaacacctgaaatcaagaaaggttttttaaactggatgaatctgtggaaatttattaaaaattgatcattttgatgtttactatcataaatcattcttagttccactgacactttacatggaaaatgagatttattgctataatacaagaatttaagaattgtgccattgtacttatcacaaaactaatcacatagccaatgatgtgtgagtgagaaacctatcaggtttgtcctgaggatatagcaagaaaagaaaataactgaaactccnnnnnnnnngagacggcgtctcgctctgtccacccgggctgggagtggcaatgggcgcgatcttgggntcactgncaacctctgctttcccgggtt

SEQ ID NO: 263680 - DNA, 816 bp, Homo Sapiens
tggtaccggtccggaattccgggatatcgtcgaccacgcgtcggcgcggccatggcgctcctgctttcggtgctgcgtgtactgctgggcggcttcttcgcgctcgtggggttggccaagctctcggaggagatctcggctccagtttcggagcggatgaatgccctgttcgtgcagtttgctgaggtgttcccgctgaaggtatttggctaccagccagatcccctgaactaccaaatagctgtgggctttctggaactgctggctgggttgctgctggtcatgggcccaccgatgctgcaagagatcagtaacttgttcttgattctgctcatgatgggggctatcttcaccttggcagctctgaaagagtcactaagcacctgtatcccagccattgtctgcctggggttcctgctgctgctgaatgtcggccagctcttagcccagactaagaaggtggtcagacccactaggaagaagactctaagtacattcaaggaatcctggaagtagagcatctctgtctctttatgccatgcagctgtcacagcaggaacatggtagaacacagagtctatcatcttgttaccagtataatatccagggtcagccagtgttgaaagagacattttgtctacctggcactgctttctctttttagctgtactactcttttgggaggagtacaggttatgcatattaacattcctcatggcatatgaaaataccaaataagccgaaaagaaatttaaaccaaccaaaattctgatgccccaaaataaccactttttaatggccttggtggaaagaata

SEQ ID NO: 263681 - DNA, 212 bp, Homo Sapiens; identical to SEQ ID NO: 1399

SEQ ID NO: 263682 - DNA, 892 bp, Homo Sapiens
  misc_feature (43)..(90): n is a, c, g, or t
gggcaccagaatgtgcctcagagctgtgacatttcaacatgannnnnnnnnnnnnnnnnnnnnnnnnnnnnnnnnnnnnnnnnnnnnnnnctgttgcaacagaaagtggcttggaagtcttaggtggtatgtaacaaattctttttaaaaattttaaagcagtatttaagtattcttaaatgtgtaaattcatttaatgttttacttctaatttcttgtatcttggctgtctggttttattgcatttttaaaaaaactgaactattatgtattgtaatgaatgatgtgaattctgaactgagacagataattgtattgctgtccaacaggggttgggaggggcattttgtagggtttgtataatttctagagttcgaaaggggtaatataaaaatgtgctcgtgtgtttagcctacgtttttctcatgcctccattaccagttgcaattgtgtatctaagacctccaagcttgtttttaaaacaaaacaaaaaaccctttctctattatctcagaaatataaatactgttatttttaatattaagaaattcaatataacttttaacacacactgtggaacattaaaccgtataaaaatgtaagtataactattttttaaattccaaggggttggtttgccttttttccttttaaaaattttccttaataattttggcccgatttaaccagaatgaattaaataaattcctagtattaaccccgcattaatgaaatttaaattaactttttggattttaatgggaagaggggataaaatattgatcttcccaagggggtttacacgtggaaaggggtatccctgtggaacaagaattaaaatggtggaattttttttaaagaggaaaaacaacaacccgggtaatttgtgaag

SEQ ID NO: 263683 - DNA, 1084 bp, Homo Sapiens
  misc_feature (162)..(171): n is a, c, g, or t
  misc_feature (878)..(921): n is a, c, g, or t
ctgcccagttacaacaacgaaatgggaaaccacaattaaaattcacaaaccatggcatgaaaaacaacacgcaccccatcaggaattacaccaaaccccttttcctttttattcattcaaaagagagtccaatacacaagtgtcaaatatgagcactgtcannnnnnnnnncttagaagggggaaaaacatttattttggcagtgctttgacaattccaggaagtggttttgataccacaagttgcaggaatagaaaccctaacaaacttggagggcatttgtttgagaggcaagggacgccttgcttagaaaacattcctcttgtgcttagtgaatcacctatcgcctcggtgggctgctgtgtctttccaggtgctgaaagagaaaacggaatttcttgcatagacagctgaagagtcctgtagagcagagtgatttttgtatctccaaccctcctcccaacttgaaacaaattctcaagcttctctggagcatcttttggtcacatgacccccgatcatggtaacccttttgctaagacacatgtgacaccaaggtttcctctgacactgcttctctagggttcagatgacagcataaaacatcactggtcaaaaatattagatattaagaatgtgggcgtttatgttcgtaacagcaaatactttgtagggtgtgtcacacaaaggagcatttttgtcatttaatatggtccccggggagttagcccaaaatcatacaaataagcctttttctaaagacaggtcaaagttggttaatttaacagttgaggaaccgtctcatgccaattaaaaaattcttacttcccaactattcaatggtccaaaaagcaattaaatgtgaccattcagttttnnnnnnnnnnnnnnnnnnnnnnnnnnnnnnnnnnnnnnnnnnnngagaactgtgacaaaaggattcaccagattaatcttgtgactgtgttctaaaagaaaatgaaatctcaaacttgaggtgtcctattcaagtattaaaaaaatgcaaacatcgtctgatcccattcgatttttatcatcataagaaatcattctctgaactgca

SEQ ID NO: 263684 - DNA, 858 bp, Homo Sapiens
ggggtttggtaagttccgtttttagccccggcctttttctagccaggctctcaactgtctcctgcgttgctgggaagttctggaaggaagcatgtgctccagaggttgggattcgtgtctggctctggaattgctactgctgcctctgtcactcctggtgaccagcattcaaggtcacttggtacatatgaccgtggtctccggcagcaacgtgactctgaacatctctgagagcctgcctgagaactacaaacaactaacctggttttatactttcgaccagaagattgtagaatgggattccagaaaatctaagtactttgaatccaaatttaaaggcagggtcagacttgatcctcagagtggcgcactgtacatctctaaggtccagaaagaggacaacagcacctacatcatgagggtgttgaaaaagactgggaatgagcaagaatggaagatcaagctgcaagtgcttgaccctgtacccaagcctgtcatcaaaattgagaagatagaagacatggatgacaactgttatctgaaactgtcatgtgtgatacctggcgagtctgtaaactacacctggtatggggacaaaaggcccttcccaaaggagctccagaacagtgtgcttgaaaccacccttatgccacataattactccaggtgttatacttgccaagtcagcaattctgtgagcagcaagaatggcacggtctgcctcagtccaccctgtaccctggccccggtccctttggagtagaatggattgcaagttggctagtggtcacggtgcccaccattcttggcctgttacttacctgagatgagctcttttaactcaagcgaaacttcaag

SEQ ID NO: 263685 - DNA, 692 bp, Homo Sapiens
agaactacaaacaactaacctggttttatactttcgaccagaagattgtagaatgggattccagaaaatctaagtactttgaatccaaatttaaaggcagggtcagacttgatcctcagagtggcgcactgtacatctctaaggtccagaaagaggacaacagcacctacatcatgagggtgttgaaaaagactgggaatgagcaagaatggaagatcaagctgcaagtgcttggtgagtcaggggagccaaagagcaaatccccactccagtggccccagatggaccactgtagggcttcctgggaggcatggggcactctcggggaggaggagagaaaaacctcaggacaggtttgattcatttttccttgatccaattctatttgggagtgagcctaggtcaacagatatcccaaattaacaaccttaggacatttaacacctcttcctgaagttagtgagtcctaagctttgaagagaaggaaaactagagatttttcctatttccttcattttgtcctgtgatcaacctaaatcagctcagctcatcttgattatatctccgaaattaggcttcattggacttaagaaaaaagagaatgtattaatataaagaatggggcaggagttatcaggagaatttttcaactttcataatgggcaggacaaaaaaacttccactcatagctc

SEQ ID NO: 263686 - DNA, 371 bp, Homo Sapiens
aatgattttttaattaaaaaaaagaacaacaggatagagctgttggggtggcacagtggcccaaagagcagcttcagagataattccttggttctatgatccctgtttaactccaaattacagtcggacttggatacatcatttgtaacattgtaggaaagaaaaaagtcttggttgtgaaaaacgatttgcatttgggtaaaaataaagtgaccatgcttttgttctgtaatactgtgtgacctgtggttgttgtaatggtgatcatggagaagcaaatatgaacttggcccggattttaaatggcctaaaatttgtggtagttgccaaagaaggtccccctagggggtcttaataaacccatttccctt

SEQ ID NO: 263687 - DNA, 810 bp, Homo Sapiens
gggaaacctctttggttgtcctttccttcctggggtatagaatgttcttggaagctccattgatttagtagctgctccatcatctagcttgtgaaaccattccaaactaattttttaaaaccataactgatttgtcattttgtatttgtgatataacaagtctagaagttagaactgttgtcattcacataataagattactctgtctccttgggaaaaaaactttatggaggctgtttgtcctctcaatatggttttaagattgaaagtaagaaaacggatttaggatgaaaactctagaactaccctatgctgtttatactgggaaatgctttgtaccaagtagcagtgactagacccacagacatgaaaagcaaccttaggagtaaagtgacccaaacattaaaatgacaggaaagagaaagtagaagcagcaataaatactgccccaactttcctggagcccgaggcctcatccatagctatgatcacttgccctctgaagcttatttttgcttctttgggtttaagaattgagaaatatcacatttgcccctgattgttttgacagtctccctagtgcctccctggtagtgcccctaaaggaaaaaccagggtggggctttcccttctcccttggacttttaccttaacttggttaagtctacgcccccaccggtttccaccccatccccccttatccaaccctctgggctttttttgaattttcctgaaaaatattggccctcatcccccctttttattttttggaagttctccctccccccttaatttcccgggaaaactttg

SEQ ID NO: 263688 - DNA, 205 bp, Homo Sapiens; identical to SEQ ID NO: 178482

SEQ ID NO: 263689 - DNA, 1239 bp, Homo Sapiens
  misc_feature (378)..(378): n is a, c, g, or t
  misc_feature (1042)..(1080): n is a, c, g, or t
actacgtctcatgcctttccttatattaaaacaagggtcaatgtcactcataaagaagagatcatcttaacaccaattgaagttgctattgaggacatgcagaaaaagacacaggagttggcatttgcaacacatcaggatcccgcagaccccaaaatgcttcagatggtactccagggatctgtaggcaccacagtgaatcaggggcctttggaagttgcccaggtttttctgtctgaaatacctagtgacccaaagctcttcagacatcataataaactgcgactctgctttaaagattttactaaaaggtgtgaagatgccttaagaaaaaataagagcttaattgggccggatcaaaaggagtatcaaaggganactggagagaaactatcatcggccttaaagaggccctacagccactgatcaacagaaagatccctcagttatacaaggcagtattgcctgtcacctgccacagagattccttcagtcgaatgagccttcgcaaaatggatctctaaactgaatgcacttgttttattcatctgcaaagagccatgtattcaacatcgagtgtgaaaagatctattggaaaacaacatggaatggaattctggaaattattattcattgaagaatgcagtggccaagaaaatatcaaatgtagattgttaacgcttgagaatcatggctatggtttctaatgttctggtaacaagctgttatcttttaagacattttaatgactcaaaggtacactatacatttaccattatttataccatagctaaggttaaaaatttattcactttaagttcgtattttttaatttatattaccatttatagattcattttggaaccattttaaatgtagtaatgcttattttaaaggtactattaaatatgtgaatgtttacactaattttaccgagtgggacttcaaaatttttattattgaccatgccagagaaacaattaaaggggttgactcaagaaactagttcccacacctaaccgaattaaaattcctggatagnnnnnnnnnnnnnnnnnnnnnnnnnnnnnnnnnnnnnnnttccagcagattattcccaaaaacataaaaaaaccttttggggcggccctcgggccctccaaaaagcttttctaagaacctttcccttttgggcggcgcgggggccccataagggtaaagtggaacctgggccaaaagcggtgttccccaaagggaaaa

SEQ ID NO: 263690 - DNA, 772 bp, Homo Sapiens
  misc_feature (312)..(312): n is a, c, g, or t
  misc_feature (328)..(328): n is a, c, g, or t
ggggaccctgcgcgcagcccgcactatggcagccccgccgcagctaagggctctgctcgtagtcgtcaacgcactgctgcgcaacgccagctaccacgctgcgttggccgtgcttaagggcttccggaacgggctgtctatggagccaaaatccgggcccctcacgcgctggtcatgacctttctcttccggaatggcagcctccaggagaagctgtgggccatactgcaggccacatatatccactcctggaacctgggcacggtttgtgttcacctacaagggtctccgtggccctgcagttcctacatnacaagggcaagacctnacccagcacacgcattcctggcggccttcctcgggggtatcctggtgtttggagaaaacaataacatcaacagccagatcaacatgtacctgttgtcacgcgtcctgtttgccctgagccgcctggctgtagagaagggctacatccctgaacccaggtgggacccgttcccgctgctcactgcggtggtgtgggggctggtgctgtggctctttgagtatcaccgatccaccctgcagccctcgctgcagtcctccatgacctacctctatgaggacagcaatgtatggcacgacatctcagacttcctcatctataacaagagccgtccctcccatttatgcagccctgaagtgtctgggctgtggctccaagatttggcccccatgcagacccttcccaaaggatactgccccttctccaagatcataaggccctcaaaaa

SEQ ID NO: 263691 - DNA, 523 bp, Homo Sapiens
  misc_feature (28)..(28): n is a, c, g, or t
  misc_feature (58)..(58): n is a, c, g, or t
  misc_feature (79)..(79): n is a, c, g, or t
  misc_feature (264)..(264): n is a, c, g, or t
  misc_feature (266)..(266): n is a, c, g, or t
aaggcaaagacctacccaagcaacacgnaattcccggcggcccttccctcgggggtancctggtgtttggaagaaaaanaataacatcaaacagccagatcaacatgtacctgttgtcacgcgtccctgtttgccctgaagccgccctggctgtaagaagaaagggccaacatccctgaaaccccaggtgggacccgtttcccgctgcctcactgcggtggtgtgggggctggtgctgtggctctttgagtatcaccgatccancncctgagccctcgctgcagtcctccatgacctacctctatgaggacagcaatgtatggcacgacatctcagacttcctcgtctataacaagagccgtccctccaattaatgcagccctgaggtgtctggctgtggctcaagatttggccccatgcagaccctcccaaaggatactgccttctcaagatcataggcctcagactccaactggtgttatcccagggttctgtttgctgaagtaaaaacactgattttaaa

SEQ ID NO: 263692 - DNA, 819 bp, Homo Sapiens
  misc_feature (780)..(780): n is a, c, g, or t
ggccttaaactgtgattctttctggtaggataagttataataaactgaccctaaagaatgcaatggcttttaaactgcagttactgtgttcttaatgaagcaatacccaaagctctgttcttttggagcacttgaggggagcttgaatgaaaggtgcagataagagcagtaccttgatcttatgctttctgagtgtcctgccttgttgccatctgcatggatgagtgaatgcttctatgcacgaggagactcaagccaactcagagtctgctttttccaacgctcttcccaggtttcttttgcaaagcttggtcatttggcccaggtcttcctggaaagtggagtacatgtcactgactagggtggcgtggtgtctttacccttaacattaagtcttgttacctcagtgatgtgaagccaatggttggaattataaaaagcatccttgctggttcttcacaggacactggaacccaccctgtcaattcagctagcatgtccacacagtcttgatgatccctctctgtaacaggcagctaacattaagagaagggggaaagagaagaagagagcaatagcttatgggagagctgagatcttacttcgttgacccatatttttcccctgaccaagttacctgtaaactggaatttgcaaggggatgctgtgatgataacccctttctattgctgtaatgttcatataacctgggaaactgagagaaggggatgtgtaaataaaagcttaaacatttttagtaatgtgtttaaaatgtcactnctctccttaccctggtttccccttttttttgcccagatg

SEQ ID NO: 263693 - DNA, 357 bp, Homo Sapiens
  misc_feature (286)..(286): n is a, c, g, or t
  misc_feature (347)..(347): n is a, c, g, or t
ttatagaaaccattaagacatttatttatataaatgaacaaagtatacagataaatcacataaaagcaaatcagaaaaactttgatttctctcctatgtttactaaattagcaacaacatataaaacccctactcaaatggtaacactgtaaaatgttacaactctttgggaatgcaataaggcaaacataagtcataaagttcttcatattatttcactaaataatccccctcccaggaatttatcataataaaatttaaaactacttaaggtattcagcaatanggggaaatactctaaataaattaggggtataaaggtaatataattaaaataatcattatcnccacctccat

SEQ ID NO: 263694 - DNA, 807 bp, Homo Sapiens
  misc_feature (50)..(50): n is a, c, g, or t
  misc_feature (401)..(410): n is a, c, g, or t
  misc_feature (419)..(672): n is a, c, g, or t
ggataaaaagcagtatacatacctacccttttctacctcatcatttgttngtaggggattaaatcccgggagagcaattctgaagcctataaatttccttgaagagatctaagaacctattatgctcttggtgtaccaagctctggggtatatattcagaatacctcatgttctggaagctgagcactagctcccctttattgcctgcctggcagagcctgtttgattactgcaggcccttttacccatgcttctagtttaggtattctttctttgatatgaggctcttgaccagaaaagagttctttctctaggtgttctgagagaagtttgtaaatttggatagtacattctatcctgataaaaccaccttgctgtggtcttgatgtacaaaaaaaaannnnnnnnnngagacagannnnnnnnnnnnnnnnnnnnnnnnnnnnnnnnnnnnnnnnnnnnnnnnnnnnnnnnnnnnnnnnnnnnnnnnnnnnnnnnnnnnnnnnnnnnnnnnnnnnnnnnnnnnnnnnnnnnnnnnnnnnnnnnnnnnnnnnnnnnnnnnnnnnnnnnnnnnnnnnnnnnnnnnnnnnnnnnnnnnnnnnnnnnnnnnnnnnnnnnnnnnnnnnnnnnnnnnnnnnnnnnnnnnnnnnnnnnnnnnnnnnnnnnnnnnnntgagcaactgctcctggcccaaaacatctctttctacatacacttgagtaggtggcataaaatgcactgtcaatatatagaaaacatgaaattttccaaatatttccgatcagagaatcacaagagcagcaaatg

SEQ ID NO: 263695 - DNA, 880 bp, Homo Sapiens; identical to SEQ ID NO: 178489
  misc_feature (491)..(491): n is a, c, g, or t

SEQ ID NO: 263696 - DNA, 851 bp, Homo Sapiens
  misc_feature (791)..(791): n is a, c, g, or t
gggagactacacccagggaatgaagagcaagcgccatgttgaagccatcattaccattcacatccctcttattcctgcagctgcccctgctgggagtggggctgaacacgacaattctgacgcccaatgggaatgaagacaccacagctgatttcttcctgaccactatgcccactgactccctcagtgtttccactctgcccctcccagaggttcagtgttttgtgttcaatgtcgagtacatgaattgcacttggaacagcagctctgagccccagcctaccaacctcactctgcattattggtacaagaactcggataatgataaagtccagaagtgcagccactatctattctctgaagaaatcacttctggctgtcagttgcaaaaaaaggagatccacctctaccaaacatttgttgttcagctccaggacccacgggaacccaggagacaggccacacagatgctaaaactgcagaatctggtgatcccctgggctccagagaacctaacacttcacaaactgagtgaatcccagctagaactgaactggaacaacagattcttgaaccactgtttggagcacttggtgcagtaccggactgactgggaccacagctggactgaacaatcagtggaattatagacataagttctccttgcctagtgtggatgggcagaaaccctacacgtttcgtgttccggaaccgctttaacccactctgtggaaatgctcaccattggaagtgaatggagccacccaatcaactggggggagcaatacttncaaaagagaatccttttcctggttgcattggaaaccccgggttatcccgctgggtcccgg

SEQ ID NO: 263697 - DNA, 873 bp, Homo Sapiens
  misc_feature (835)..(835): n is a, c, g, or t
ggggtggcggtgggcggaactcctagcggacacctcgtggagtccggccggaagagcaaccgagatgaaggtgaagatgctgagccggaatccggacaattatgtccgcgaaaccaagttggacttacagagagttccaagaaactatgatcctgctttacatccttttgaggtcccacgagaatatataagagctttaaatgctaccaaactggaacgagtatttgcaaaaccattccttgcttcgctggatggtcaccgtgatggagtcaattgcttggcaaagcatccagagaagctggctactgtcctttctggggcgtgtgatggagaggttagaatttggaatctaactcagcggaattgtatccgtacaatacaagcacatgaaggctttgtacgaggaatatgtactcgcttttgtgggacttcttttttcactgttggtgatgacaaaactgtgaagcagtggaaaatggatgggccaggctatggagacgaggaagagccattacatacaatattaggaaagacagtgtatactgggattgatcatcactggaaagaagctgtttttgccacatgtggacagccagtagacatttgggatgaacaaagaactaatcctatatgttcaatgacctgggggatttgacagtataagtagtgttaaatttaacccaattgagacatttctccttgggaagtgtgcatctgacagggatatagtactgtacgatatgagggcagctactcctttgaaaaaggttatctttaaaatgagaacaaatacaatctgttgggaaccttatgggagcttttccttttttccgcngcaaatggaggatataacttaaataccttttgaaaagg

SEQ ID NO: 263698 - DNA, 522 bp, Homo Sapiens
  misc_feature (24)..(24): n is a, c, g, or t
  misc_feature (28)..(28): n is a, c, g, or t
  misc_feature (397)..(445): n is a, c, g, or t
tttccattgcatattccacatctntttnttttcacttttatttattatcattatttttcacaaaggtacaaggaatttcagaaacaacattaaaacaatcattcaaactgtttcaggcacggtttcaattaaaagcatagatttgatttctgacttcctgtttccttctatgatacaatctcaagttttgtttcaggaagcacaattattgtagcgttaaggtggatacctgccaaagctcatctcctagtgctgtcctcattctcagaaagttcctgagtcaacagaaaggggacgcccagggtatggaataaggagatgagagcatgctctgccaactggctgggacctgaatgtgctaggcaagttccactacatcagctcaagaacataaacnnnnnnnnnnnnnnnnnnnnnnnnnnnnnnnnnnnnnnnnnnnnnnnnnttacctatccctctcccttgctgtgaaataatttaaataatttattctagatgtaaaaataataatacaaaaaagtt

SEQ ID NO: 263699 - DNA, 884 bp, Homo Sapiens
  misc_feature (248)..(273): n is a, c, g, or t
  misc_feature (830)..(830): n is a, c, g, or t
ggggggtcacggcggagctggctctcacgtggaggcggggaaatttcgcccaccggaatgatcaccaagacacacaaagtagaccttgggctcccagagaagaaaaagaagaagaaagtggtcaaagaaccagagactcgatactcagttttaaacaatgatgattactttgctgatgtttctcctttaagagctacatccccctctaagagtgtggcccatgggcaggcacctgagatgcctctagnnnnnnnnnnnnnnnnnnnnnnnnnnggtgtcagcaccctttgcgaggagcatgtagaacctgagaccacgctgcctgctagacggacagagaagtcacccagcctcaggaagcaggtgtttggccacttggagttcctcagtggggaaaagaaaaataagaagtcacctctagccatgtcccatgcctctggggtgaaaacctccccagaccctaggacggggtgaggaagaaaccagaggtggccagaagctctcagtggccgggggagacgagcaacgagccacaaaaagacgcggggcgggcgcccggggccagcagagaagctttcctaaggccctcggattggacggcggggccccaggggggctacgcgggacctgagcactaaggtgggttcaccagagacgacgacggtgaatgtgagccgtggcgtctactagtcgtgcgccggcagaggagatcgcgggcgggaacgcgccggcggcgcgcacgggcgagcacacgccgcccacgagcgaaccagtgacggaagcgaacgcaggacgaccagaccgccgagagatagacgcaatgcaatganacccgaagagtcgcgccagccagtagccgccgccggaccacgcaccgctgacat

SEQ ID NO: 263700 - DNA, 881 bp, Homo Sapiens
  misc_feature (365)..(365): n is a, c, g, or t
  misc_feature (796)..(813): n is a, c, g, or t
ttttttacaagcaaaccaaattcccagtggcccgggattctccaataaattttccttttgcccccgtccccttaaaaaaacccagtttggttccccaccccaggtatccaaggcgccattattcccggaccagccccagttcctgctatccattccaggtttcccttagcaaaattaaggtgcttccgatatacctcggcaagggcttcctgaatgggaagtttttctccatcatctccattaaaaaatattttttcacttctaaaggtcctcaaagaattgaagccaggcccttggggaaatatcccttaaaggggagagagtggcttcccaaaaaataaacttcccttccagcaccacaccanccagctcagagaattcacttcacggtgggacggtcactcaaagtcctactgtgaacctcatcccccaaaaaggtaatggcaaaggctagaggaaaatcctaaacaatcacctatgccttgtatctttctctagaaacacaatctactagtagaaaaaccaatttgaaattttaaaaatgtggatgctactcatgagggctgtcatcaacgtaggaaaactattaactcaagtggatgacatgtttcttttcctgtattaaaaaagctcctcacatttaataattctgatttagatcagttttgatttaacagacagcatgaatcaaacttagctaaaaccttaatgatgttgtaatatttattaacatagccaattctcaatatagaagatttatgaatctcctaatacttccactttataaactggcttnnnnnnnnnnnnnnnnnngaaacgctcttttgaagaacaaagtttcagggcttggaggaaagagaaagtgatctttacaaattccc

SEQ ID NO: 263701 - DNA, 429 bp, Homo Sapiens
  misc_feature (360)..(360): n is a, c, g, or t
  misc_feature (413)..(413): n is a, c, g, or t
ttaagccagtttataaagtggaagtattaggagattcataaatcttctatattgagaattggctatgttaataaatattacaacatcattaaggttttagctaagtttgattcatgctgtctgttaaatcaaaactgatctaaatcagaattattaaatgtgaggagcttttttaatacaggaaaagaaacatgtcatccacttgagttaatagttttcctacgttgatgacagccctcatgagtaggcatccacatttttaaaatttcaaattgggtttttctactagtaggattgtgtttctaggggaaaggatacaagggcatagggtgattgtttagggattttccccctaggccnttgcccttacccttttggggggttgagggttcccagtaggacttgagtgaccntccccccctggaggtg

SEQ ID NO: 263702 - DNA, 809 bp, Homo Sapiens; identical to SEQ ID NO: 178495
  misc_feature (663)..(663): n is a, c, g, or t
  misc_feature (761)..(761): n is a, c, g, or t

SEQ ID NO: 263703 - DNA, 816 bp, Homo Sapiens
  misc_feature (678)..(678): n is a, c, g, or t
  misc_feature (698)..(698): n is a, c, g, or t
  misc_feature (709)..(709): n is a, c, g, or t
  misc_feature (775)..(775): n is a, c, g, or t
gggttaagtagcagtatgtattctagccaggggtcttctggatctagccagtccaaaaattcatcccagtctggggggaagccaggctcctctcccataaccaagcatggactgagcagtggctctagcagcaccaagatgaaacctcaaggaaagccatcatcacttatgaatccttctttaagtaaaccaaacatatccccttctcattcaaggccacctggaggctctgacaagcttgcctctccaatgaagcctgttcctggaactcctccatcctctaaagccaagtcccctatcagttcaggttctggtggttctcatatgtctggaactagttcaagctctggcatgaagtcatcttcagggttaggatcctcaggctcgttgtcccagaaaactcccccatcatctaattcctgtacggcatcttcctcctccttttcctcaagtggctcttccatgtcatcctctcagaaccagcatgggagttctaaaggaaaatctcccagcagaaacaagaagccgtccttgacagctgtcatagataaactgaagcatggggttgtcaccagtggccctgggggtggaagacccactggacggccagatgggggtgagcacaaattcttccagccatcctatgtcctccaaacataaacatgtcagggagggagnagtttcaggggcaaggcgtngaggaaaagtngattaaaggacaaattcaaaggttttccaccttccggggagtttcagtgggattttttcttaaggnggacctcaggagttcaaaaaaatgtggggggaggcacaggt

SEQ ID NO: 263704 - DNA, 514 bp, Homo Sapiens; identical to SEQ ID NO: 84214

SEQ ID NO: 263705 - DNA, 951 bp, Homo Sapiens
  misc_feature (710)..(710): n is a, c, g, or t
  misc_feature (773)..(773): n is a, c, g, or t
ggtgcatggccttagctttctaggccactgggagttgtggctgggcttcccatcttccacagagacatctccctgtgggatgggcagatgggcctggccttgagaaaggcattggccattggttgccatggtgaccagggaccacgttgctgcctgtgaatgctgagtgagcgagtaagggaggaggggcgattgagggttcacctctgccttggggaggctgatttctcacacactggctggccctctcattctcactcctccttgggccctgaggctgctggatccagtctgcctgcctccctgtgcagtccagccctgccttgctgcagccccagcccagatggcactcagcgctctcccctgagggagtccctgggcctagccatcccctcactattcccgacccaaagggtgacttttcatctgaacttaaggtgggagatatttttaacttttttccactttggaaaatgtcactgtgacaaaagccagcatactttccctgcacccatctgctcaccagatctcaggcaggaaaagcccctctctgttgaagtcaggggctatcttttggtatacttgtgtgaaagtggctggttgggagcagagctaagtggcttcccattaacctgagggctctttctttactctgggtcagacctgaggttggggaaggcgactgagccatgctcagaatgtctggtccntggcttgggcctgagtagggcagagagggcctttcatggctgatcagagcttaccagccccanccccaccatggtagccttagggtgctgactgcctgatactgcctgacaagtgcctgacacgcagcctagttccttcctggcccctctctcactggctgggaaaccctagaccatgtcagataggacaacactgctgggttttacatccagatagtaataaacaccatttcatcatttt

SEQ ID NO: 263706 - DNA, 1346 bp, Homo Sapiens
  misc_feature (540)..(540): n is a, c, g, or t
  misc_feature (577)..(577): n is a, c, g, or t
gggctgccaggacctttgtccaggggctgactgtgggcagagaagttgcaaaccgagtttccaaggtcagcccaaccccagggtgtatccgtgccctcatgaagatgctgtactgcccatactgtcgggggcttcccactgtgaggccctgcaacaactactgtctcaacgtcatgaagggctgcttggcaaatcaggctgacctcgacacagagtggaatctgtttatagatgcaatgctcttggtggcagagcgactggaggggccattcaacattgagtcggtcatggacccgatagatgtcaagatttctgaagccattatgaacatgcaagaaaacagcatgcaggtgtctgcaaaggtctttcagggatgtggtcagcccaaacctgctccagccctcagatctgcccgctcagctcctgaaaattttaatacacgtttcaggccctacaatcctgaggaaagaccaacaactgctgcaggcacaagcttggaccggctggtcacagacataaaagagaaattgaagctctctnaaaaggtctggtcagcattaccctacactatctgcanggacgagagcgtgacagcgggcacgtccaacgaggaggaatgctggaacgggcacagcaaagccagatacttgcctgagatcatgaatgatgggctcaccaaccagatcaataatcccgaggtggatgtggacatcactcggcctgacactttcatcagacagcagattatggctctccgtgtgatgaccaacaaactaaaaaacgcctacaatggcaatgatgtcaatttccaggacacaagtgatgaatccagtggctcagggagtggcagtgggtgcatggatgacgtgtgtcccacggagtttgagtttgtcaccacagaggcccccgcagtggatcccgaccggagagaggtggactcttctgcagcccagcgtggccactccctgctctcctggtctctcacctgcattgtcctggcactgcagagactgtgcagataatcttgggtttttggtcagatgaaactgcattttagctatctgaatggccaactcacttcttttcttacactcttggacaatggaccatgccacaaaaacttaccgttttctatgagaagagagcagtaatgcaatctgcctccctttttgttttcccaaagagtaccgggtgccagactgaactgcttcctctttccttcagctatctgtggggaccttgtttattctagagagaattcttactcaaatttttcgtaccaggagattttcttaccttcatttgcttttatgctgcagaagtaaaggaatctcacgttgtgaggg

SEQ ID NO: 263707 - DNA, 776 bp, Homo Sapiens
gggtagtggccaggggccctggacgctagccacggagctgctgcacagagcctggtgtccacaagcttccaggttggggttggagcctgggatgagccccggcagcgccttggcccttctgtggtccctgccagcctctgacctgggccggtcagtcattgctggactctggccacacactggcgttctcatccacttggaaacaagccagtcttttctgcaaggtcagttgaccaagagcatatttcccctctgttgtacatcgttgttttgtgtttgtgttgtaacagtgggtggagggagggtggggtctacatttgttgcatgagtcgatgggtcagaactttagtatacgcatgcgtcctctgagtgacagggcattttgtcgaaaataagcaccttggtaactaaacccctctaatagctataaaggctttagttctgtattgattaagttactgtaaaagcttgggtttatttttgtaggacttaatggctaagaattagaacatagcaagggggctcctctgttggagtaatgtaaattgtaattataaataaacatgccaaacctttaaaccaaaggtcgtgatgatccgaaatacacataacattgtcggcccgcctcgggcccctcaaaaaaacctttcctagaacctttccgttttgggggcgcggggcccccaggtagggtaagcggaacccgtggctaccacagctggcttcccccaaagggagaaacctcgggccccaggaacctaaccggccttgggcat

SEQ ID NO: 263708 - DNA, 1000 bp, Homo Sapiens
  misc_feature (25)..(25): n is a, c, g, or t
  misc_feature (42)..(42): n is a, c, g, or t
  misc_feature (51)..(51): n is a, c, g, or t
  misc_feature (62)..(70): n is a, c, g, or t
  misc_feature (79)..(79): n is a, c, g, or t
  misc_feature (465)..(465): n is a, c, g, or t
  misc_feature (603)..(603): n is a, c, g, or t
acaaaaggccaagacccagaacctncccccggaacctgaacncgaaataancccaactgttnnnnnnnnncctaccgangacaatccaggaagtttgaaatattggactggtaacttggccatccaaaaaatgttttaagccagtccttaacacaatggtattgtggttatgttccaaaaaagtacccctatctttggagttatatttgaatgtctctgatcacacagacatgaaaatactatgccctgttaatgggactcaaactgatccctgtgggttggggcaggggataggtggggatgcaggtaaacaagactgaccacaggacagctgttggaggatgggtacacagagcttcattctgctattctttttgtgcatttgtgaaaatttccataataaaatgtttttaaaaatgagtttggatagcattatactataaaatattttaaaatttccttctntaatgaagacttgcaagcagaaaaatataattttctaagggtcaattaactagtacattaactcaagtaacagttacttagcgcagggcatggtggcttatgcctataatcccaggtaaaactaggctctggagtcangccagatctaggtttgaaccctagctctgtcattttctatctaccagttcaatgttttttggcatagcacacaatttctgtgacccttaggctccacatctataatgtggcagcaacaactttcttggtcagtagagcactctgcaaagggcctggcacatggtaagtgcttggtgtagaattcaaataattccactaccatttcagtcataaatgcatacttttctataatctaacatctctcaaattgggatgtctcataattgatggcatatcatgatttaattggcaggttttttccttagtcgtttgtaaaaaatggtgctacagatcaatagcatctaagagtcaatataccatggtatcaatcattgtaaagatatattcccaatttccc

SEQ ID NO: 263709 - DNA, 814 bp, Homo Sapiens
gggtgggccagggttctgtgtccatccctggtaccatgggggccctctacatcgagcggcctgcagatgtcgaagagggtttctctatccaggcccctctggtgtatcattttggttccaccactcctggcactaacatcaagctttataataagattacatctcgtttagcagatgtgttcaaccaaaggtgtgaggtgaaccgaaggcaatctgtgagtggctgtgtcattaacacctgtggctgggtcaagggctctggttaccaggctctggtgcatgcagcctcagcttttgaggtggatgtcgttgttgttctggatcaagaacgactgtacaatgaactgaaacgggacctcccccactttgtacgcactgtgctgctccctaaatctgggggtgtggtggagcgctccaaggacttccggcgggaatgtagggatgagcgtatccgtgagtatttttatggattccgaggctgtttctatccccatgccttcaatgtcaaattttcagatgtgaaaatctacaaagttgggggcacccaccatcccagaactcctgtttacctttgggcatgtcctcaagaggataatcagctcaagctaagtacctgtcactcctgggcgagatatggtgcaccacctactgaagtgttaagcactgccgaagggtacgaagagaaccctgtccgagacaagtgtaacctggctttatttggtggtgaccagtgtggaacctgggagcattaaggggtttaattggtttggcctccaaacccctccgcccactggctaaagaaccttcctttccc

SEQ ID NO: 263710 - DNA, 835 bp, Homo Sapiens
gggagacagagcagctgctgttccagcaacagcagcaactgccgcacccttgaaaggaggcccctgccgtgtggacccgtaaaataaaatggatgcaacttctccaggagtgcttatgttacccaaagagaaacagatgcacaaagagaaggaatgagatgctcggggatattttatcaaggaaaccagcaaaccgtctttttcctgaagaccttttaagattaggacaagcagctgtttataaaagcagaacagtgttaagatttgaactgtaaagtaggatcatgctttgaagtatattctagctaaaagcaggggataaactagataaaacttggagactctaagacctgaccctgattaagtgggcctacaagtgagaatctgaagaacagctctctggctgaacatatcccttggatgttgttattaccagctgcctctagatttgagaacagtgctgagcatgcttttagaatgatctttgaggtactttaagcctagctacacctgaaagcataccctagccctcatttctgtttgcttgaaccaagagcctggaaaaagaagtctaaaagaactttctagtgatatccttcagtcctgttctaaaaagaacctcgtgttcttcaccgagttaaagaaatttcacaacctcccagggggcctaatgtgggagttcattttccacttactgcttgaatcaactgaaggttccttttcacaagtcttttcccttagagaggaaaaagtatcctgagctcctcaaccctactaatttcattagtgctggaaaaaaccaaaaatccaggttaaaagtcctataaatgtaaaa

SEQ ID NO: 263711 - DNA, 815 bp, Homo Sapiens; identical to SEQ ID NO: 2121
  misc_feature (552)..(552): n is a, c, g, or t

SEQ ID NO: 263712 - DNA, 1295 bp, Homo Sapiens
  misc_feature (1063)..(1063): n is a, c, g, or t
  misc_feature (1222)..(1222): n is a, c, g, or t
gggtggacactttcaaggccttcagtaagaagatggacgacagcgtcctgcagctcagcactgtggcatcagagctggtgcgtaaacatgtggggggcttccgcaaggaattccagaagctgggctgccggtcagtcagtgaaggtcaggccagggtctcagcctcccctagagcctattttgcttgctcacctggccactgctgccttatccattcagcagacaccgaggcctgctgcacccttgggtcggatgctgggcacccagggctgtgacatgcctgctcttcaggagtcctcagtgaaggtcggggtcagacacagacagagtcaatgcagtatgactgatgtttaaagtgagggatttctggaagctcatagaagggaccacagcattccactggtcagggaagactccatagagtaggcaacatttgggcagtgttttgaagaatgacaagggcctgccagacagtacatggggggagaaagactttcaggggagaggaacagcatgggcaaagttatgggaggcatgcaaacatctccctcttctctcccttactttccaagcaagttacggtaccctttccatggggattctggcctgtgtggtaggaagggatctcccttgctcccatgttgctggctgtccgtacatcaccctgtcccctgcaggagggggctacaggccatctccctcctgtaggcctctgactcccctccacttttgggccctcagcttatctcgggcaggggaccattgcagcatcctcccctcctcggactcaaggtgctgaggtataagccctgggccccagatccctggtgacaccttcctggagaagactctcaaaagtgactgtatatttgagttcaccagcaataactccccacactcgaagcaggtccaaacccaggatctcagggtccttgggctctgtggcactgtcttcccaagatccttcctgttgcaacaatgggaaacctaagaggaaaaaagacaggggcctgcttgcccagccatgcgagggattccatgcccacctgccctctgtctgccntcgctggaatgtgggcccctgctccccgtcaggtttgtgctgtctctgacctatgtttacgatccccgaggggtttctgcctcctcccaaccaaggtcaagggtgtggtccagcagcttgctgtggggtgctgacatgtgtcaccactgccccccgttngccccgggggggtcatggtctcctcctggatgctgctccttgaatcttttttcttgataaaccttttacaatt

SEQ ID NO: 263713 - DNA, 474 bp, Homo Sapiens
  misc_feature (306)..(319): n is a, c, g, or t
  misc_feature (343)..(352): n is a, c, g, or t
ggcaaaaaggacagtttaattttgtacagattatgcttacctcaggtttctttagtgtgcttgaatgcccttctttccatataacacttatcttcttcttaattcggcaatggaatatcttttaagttttaaaaaaactggaataattatatctatcttttttgccgtttatatttaggggtttttgttgataaaatcaagtcttggttgtggcttgctgaattaaatatttatgagtggtgcatttttaagtatagtgaacaagacaccatattaagtacagtgataaagcatctatattctgtnnnnnnnnnnnnnntctgcctatgcatgttttttaagnnnnnnnnnntggctgtatcggcctgtatgggactgtaatgcgcttagtggtctgacatatactggaaatgtatgtatactggcgtactttatattctctaaaatgcttaatgcctttgaaattttgtaatc

SEQ ID NO: 263714 - DNA, 815 bp, Homo Sapiens
  misc_feature (439)..(439): n is a, c, g, or t
aaggttcgtggtggccttccaagaaacaggggggaaattagaggggattcccttcttagggcaaaaggcaaccccatacacctttggatacaaaggccaaggctccagggccccggaagtggaaggagttaccggctaacattcaaattatcccccagattggaatggttggggggtgaaatatgggcagtgcagaaaaaagaggggaaagaaaggcaggcatttttctctcccccattgggtctacttagctgacatgcggcggaaaataaattgtaagaggactttgataatgtgttaattatgcagctgcattttccataggccatctgcataatcccatctcatagagatgctccaaactacctgaggacatttgggttctgaaacactgtcactctagtctcatcagaaaatcaaacatggatgcaacttggcnaatgaaaaacataaaaatgtcacccacaatagccgttgagcttgaatgacagaaatgaaggacggaagatctacacatcctacttagctcttgacttcgggttttaaaaattcagagttaacaaaggaaaatccttcgaattctgattggtcaatattcctgatgacttccctggtcgggaggtgttaggactggtggatggcgggtgaaaaatcggtcgaagttttcagcatttcgcccacaagcttttggcttataagggggctggatctctttgcgttcaagtttctcccaatcaatataccggaaaaatgcatgctctttgatatcacgttcgccttcaggtccacaacccagacgtttcctgggtgtttgg

SEQ ID NO: 263715 - DNA, 769 bp, Homo Sapiens
ggggccttgccaaatggtttggctcagatgtgctacagcaacccctgccctccatgcccgccaaagttatcagtgtagatgaattggaataccgacagtgagcagggcaggcagactcaactaagcccggacctgtggtggcacactgggcaggaccctgcttcatctcgggttggtttatgggcttttactttggagcactctgtgtgaagctgtttggtggaacccatgcatctggtgtggtccgcattatgatggaaggatcttaaccagtcgagtggagtgtacattgtctgaatacaggatgcacaatgttgtcaatcctggaaatggtctttcttttttgtaagatatgtgaatgaagtgttggtgtcctcaccaagaggtggcacctaagggttctgaggaaataaatgtatagacccttatgtacagacctgtgtataaacaacttttgtatatacatataggatagcttttttgaactatacagctgtacataaaagtagctgatattagttaggcctgtgtcaacagtttggatttttttcacttgtacatttgggattttcttttggttgattaaaattgcatatgctaagtgtgtgaaatcccctcaccccccccttctaccataataccctgtccgcccgcctccgccccttaaaaaagctttctaaaaccatttcttttgggcgcgcgggccccccataggccaagcggaacatgggcccaaacctgttttcctcaaggaataacccggggcccg

SEQ ID NO: 263716 - DNA, 1373 bp, Homo Sapiens
gcccagatgagccagctggagttgcaacaggcagctttagaagggctggccttgccacatgaccttgctgtacaggcagcaaacttctaccagcctggttttggcaaaccacaggtggacagaaccagagatggattcagaaacaggcaacagcgagtgaccaagtcaccagcacccgtgcatcgagggaattcctcttcccctgcccctgctgcctccatcacaagcatgctttctccttcctttacccctacctcagtgattcgtaagatgtacgagagcaaagagaaaagcaaggaggagccagcatctggaaaagcagctcttggtgacagtaaagaggatactcagaaggccagtgaagaaaacctcctgtcatccagctctgtacccagtgccgatcgagactcttctcccactacaaattccaaactgtcagcattacagaggtcttcgtgttccaccccactgtcccaggcccaaccgttacaccaaagaacaagattatcgacctaaagcaactgggagaaaaacacccaccttgggcatccccagtttcctacaacaccttttctccgccctgtccaccaagttccccttgtcccccatgtccctatggttaggcctgctcaccagcttcacccagggttggtacagaggatgctggcccagggagtacatccacaagcatcttccaagtttgctccaaactggtgtgcttcctcctgggatggacttgagtcatttacagggaatatctggccccatcctgggtcagcccttttaccctttacctgctgctagtcaccctctcttaaaccctcgtcctggaacacctctgcatctggcaatggtgcaacagcagctacagcgctcagttctgcatcctccaggctctggttcccatgcagcagctgtcagcgttcagacaacccctcagaacgtgcccagccggtcaggcctgccccacatgcactcccagctggagcatcgccccagccagaggagcagctcccctgtgggccttgccaaatggtttggctcagatgtgctacagcaacccctgccctccatgcccgccaaagttatcagtgtagatgaattggaataccgacagtgagcagggcaggcagactcaactaagcccggactgtggtggcacactgggcaggacctgcttcatctcgggtggtttatgggcttttactttggagcactctgtgtgaagctgttcgtggaacccattgcatctggtgtggtcccgcattatgatggaaggatcttaccagtcgaagtggagtgttccattgtctgaatacacgatgccccatgttgtcatcctggaaatggtcttcttttgtaagatatgctgc

SEQ ID NO: 263717 - DNA, 268 bp, Homo Sapiens
taagatatgtgaatgaagtgttggtgtcctcaccaagaggtggcacctaagggttctgaggaaataaatgtatagacccttatgtacagacctgtgtataaacaacttttgtatatacatataggatagcttttttgaactatacagctgtacataaaagtagctgatattagttaggcctgtgtcaacagtttggatttttttcacttgtacatttgggattttcttttggttgattaaaattgcatatgctaagtgtgtgaatgaa

SEQ ID NO: 263718 - DNA, 249 bp, Homo Sapiens; identical to SEQ ID NO: 96811

SEQ ID NO: 263719 - DNA, 978 bp, Homo Sapiens
  misc_feature (43)..(73): n is a, c, g, or t
  misc_feature (129)..(525): n is a, c, g, or t
ggaaactgcaggcctgggtggcaggagtgagactctgtcctcnnnnnnnnnnnnnnnnnnnnnnnnnnnnnnnaacaggaaataatgataccaattaatatggcactgttaagggcccccacaaccctnnnnnnnnnnnnnnnnnnnnnnnnnnnnnnnnnnnnnnnnnnnnnnnnnnnnnnnnnnnnnnnnnnnnnnnnnnnnnnnnnnnnnnnnnnnnnnnnnnnnnnnnnnnnnnnnnnnnnnnnnnnnnnnnnnnnnnnnnnnnnnnnnnnnnnnnnnnnnnnnnnnnnnnnnnnnnnnnnnnnnnnnnnnnnnnnnnnnnnnnnnnnnnnnnnnnnnnnnnnnnnnnnnnnnnnnnnnnnnnnnnnnnnnnnnnnnnnnnnnnnnnnnnnnnnnnnnnnnnnnnnnnnnnnnnnnnnnnnnnnnnnnnnnnnnnnnnnnnnnnnnnnnnnnnnnnnnnnnnnnnnnnnnnnnnnnnnnnnnnnnnnnnnnnnnnnnnnnnnnnnnnnnnnnnnnnnnnnngctggctctctacgtggcagagcagcaaacacctcatacctactaacactttgcagcatccaacaacaataaataagtgatgttattttctgtttcataggtcaggaaacagagggaaagtgctggtgagatccaggcagggagttgaatcctggccgcctggctgtagagtctaggcgccctcagtggaaccagtggacccagtagctgacatcagaggctgaaatcccagctgtgctgcatccctgtggtctcctgtcccaactgggtgttgatccaggacctgcaggctcacaagctctggaccctctgccgctgatgttttcttcttgcaacaagggacacagagaataataataataacaaacatggcatagcagcagaaacatatggaaagtctgtccgttcggacgcgtgggtcgacgatatcccgtaaattccggaccggtacca

SEQ ID NO: 263720 - DNA, 769 bp, Homo Sapiens; identical to SEQ ID NO: 178508

SEQ ID NO: 263721 - DNA, 1210 bp, Homo Sapiens
gggggaaggatctaaaatggtttcctgttaaattttttgccaggggaacctgaagtcttgggtatagaagggcaaatgccttggggaaaaattcctttggaatacccaagttagcttcccaggtttctttcagggtgtgccctttaatttgccatcttttgggatccaatatctaggatccaagtggaaaattcagtaaacgtagggcatcaccccattattatcttccgggggttttgtaaactatacttgtatagatgatcatgaccattggaaaaactcagctgcaaaatcgtaattgaatctgaacaccacagtcaaaacttaagacacatacttttctggaagttcatgagccttggcccactgtagattccgcacaagagattcagcagaatattctgttccctgtatgggatcagtaagtgcttctcttctcagataaactacttcgaatctctagagcctgtttgcctttgggtaaggtgacaacttacccatatcttctgcaacttcatccagtaacacagtgattgtcttatcttctaataatctgtcttgtaaaaatttcataaagattccatttgccaatccagaatgctggatttcaaaagcttctgctccttgacacgtggcatatccaaacacaatattggcggtgacttttagtgcatccaagattggaatggtatcatcgtagtcatttctgtttcctacacatatccaataagaacacattaagtccagtttctgttttcttgcatcaatttcagtatattttgtacacacagacaattttcagacctatatggatttggagcatcaacggggaccatgaagctgttcccaaaattttcataaccatgtcctgcataatataataacccatatactcccttgtctaaaaggagtaaaaactcatccacagcattacgcatctcatattcagtaagatccaacagtgaaaccactttgaagtccagctgtctcagtaagttagtcaattcgtacacatccaccaaaggagctttgagcttggggtgctcccggtaattcatatttcctatcaaaagggcaaccttgtccttcgccaaaggctggtcagttgtttgctctttattatcaggatgaccaagattatttaattcatcttcagtgcactccactgcctcatctgttcttcctatgatgatttctaccttcttgctat

SEQ ID NO: 263722 - DNA, 296 bp, Homo Sapiens
gtatccccataaatacatacaattataacttgtcaatatcccaataaaaataattttttaaaaagaaaatgttagaaaagcaaacacttgcccacatgggacttctgtatacaccaataagcttcattttctcttctgcctctcacatgacattgataattaaagagttaatctttaagcaggaattacaatgccaatttgggcttaataattaagataccatgatatggaatgctaaagtcgatcatttaaaattttctacgcagaatatcaaggaggtaaatttatgcctacat

SEQ ID NO: 263723 - DNA, 787 bp, Homo Sapiens
  misc_feature (580)..(580): n is a, c, g, or t
ggcaataggtggaaagaagaaacgaagaaacttactgaaagtgcagaaattagaatcaataatctaaagagtgagctgagtcgacagaaacttcatacccaagagctgctttctcagctggaaatggcaaatgaaaaggtagctgagaatgaaaagctaattctagagcatcaagaaaaagccaacagacttcaaaggcgtctaagtcaggcagaagagagagctgcttcagcttcccagcagctcagtgtgattacagtgcagagaagaaaagcagcctccctgatgaatctggaaaatatttaaaaatattcatagttcactcacagaactttagagttgggaaagcagttggactagaagtgtattgaaatggtaaagcctgcaaagtataatagttaaggcttgtgttatttcgcgtaagcattgttgttctgttttgagggttattggaaaacagagcagtgacccacttccctgtaagtaaagaaaatataatccctatattgagcttcagtggagaataaaccagctgagaagaactcattgccttcatcaatgtgtctgttttttaattccntcctttttcccttgaaaggacataataattttcaaactatgcaaatttctctttcataagaaagagtttttaaagaaaattctaagaatttaatatttcagtttccaagatttgagaattttacatctaattgttacttctaactcatttttaaagttcctaagtatccattttattatgaactcataaatgtaataaattgtgcac

SEQ ID NO: 263724 - DNA, 877 bp, Homo Sapiens
tcctatgaagtagatacctgcctatatagctagtaaatagcagagccagcaggtaaaaccaaatgctttttttcttagtaacttcattttactgtgtcaagaaatatttgagtgcatgagtgcacaaaggaaaaaaggaaaaaggaacctcgtcctcaggtctttagcctgatactggttgctcctgaacactggtttctctctttagccttcaacctggactactacacagaggttctggacctctcctacctgcttgaccacctggcttctgaccctttcttccgccactaccgccagctcaatgagaagctagtgcagctcatcgaagactatagccttgtctcctttatccctctcaacatccaggacaaggagagcatccagcgagtcctgcaggctgtggataaagccaatggatactgtttcggagcccaagagcagcgaagcttggaagccatgatgtctgccgcaatgggagccgacttccatttctcttccacactgggcatccaggagaagtacctggcaccctcgaaccagtcagtggagcaggaagccatgcagctgtagcaacaaggtggaccctggagagcaggatgcataatccagcactggggaaagtggaggctcctgatgcaggctgcagacccaagagcaagtcctcccagccagagctggcgggctggcaaggggatattcagctctgcaaaggacttctggccaaaaagccagacatggtgccaagcagaacaccccccatactgtcagtggtgtccgtgagctctgggccctgccaccagaaagtcgagcactggtcctagtcaggctgtgatgaaatgtgctacaatacaagagtttattttcttacaaatta

SEQ ID NO: 263725 - DNA, 544 bp, Homo Sapiens
  misc_feature (86)..(86): n is a, c, g, or t
cccccatgagcgcgatggagcctcaccacttaaacggatccctgggctcggcgacatggaacgggttcccgaagagttccccccgngccgtggccggcctgagcaacgccccgggcaaccccgcgggacgacggcgaaaatgcggccgccgggaccttcctgcaacccgttcccgagcgaaaagctactcgcccagggatgaccatgagccgtgtgaattgggcggcagccccgggcctctctgcgggcctaggcttctgcccaggcgcccctgctcagggcgaggggctgaggtcacacctcgggcacctggactcctggccaatcaaggcttgcccagctgggaggccccacacgaaagactcttaccattttattaaaaacgcaaggacctcagagacgttcttttctgtatggacccttcctgccatttgtattttgtcccagagagaaaggctctttggggggcccctctccccaggacgtcagggggtggggcccataaataaatggaagctggttttggtttttggaaagccaacca

SEQ ID NO: 263726 - DNA, 609 bp, Homo Sapiens
  misc_feature (368)..(372): n is a, c, g, or t
  misc_feature (374)..(379): n is a, c, g, or t
  misc_feature (381)..(381): n is a, c, g, or t
  misc_feature (384)..(385): n is a, c, g, or t
  misc_feature (387)..(440): n is a, c, g, or t
  misc_feature (476)..(476): n is a, c, g, or t
ggagtcacagtgttgctgcaacatagagctgacattaactgtcaggacaatgaaggccaaacagctctacattatgcctctgcctgtgagtttctggatattgtagagctgctgctccagtctggtgctgaccccactctccgagaccaggatggctgcctgccagaggaggtgacaggctgcaaaacagtttctttggtgctgcagcggcacacaactggcaaggcttaatcaaaagactggaaaactgcagtctgtaatagcataaggcttccattatgaaagaaaactacaaaaataatacttcttttccacccgtctttggtatgtattggctaataaaatcagttctgtggaactgggaaaannnnnannnnnnanaannannnnnnnnnnnnnnnnnnnnnnnnnnnnnnnnnnnnnnnnnnnnnnnnnnnnnntcatcaaccttcccccggaacaaacacattcaccancacttaaagaaatttgtggccccccttgggcccttaaaaaatttttcaaaacatttcttttgggcgcccggggccccgtagggaaagggaacccggggcccaaacgggtttccccaaggaaaaacccggggcc

SEQ ID NO: 263727 - DNA, 790 bp, Homo Sapiens
ggtggaagacaaagcaaccggaagcgaaacagagactgctctctgaagcctgcaaaacccgcctctgctggttcttcatgcatcaccctgatggctgcgctctgtccacggactgctgcccgtttgcccatgggcctgcggagctgcggccaccccggaccaccccgaggaagaagatttcatgagctgcatcccttgccagccgaggccctggttggggaggccaaaccaaggagagcttccccagcagtcgtcagtgctgtggtctctgctctggctgtgtttcagcccacctcctcccagctttctccacatcctcacagtgatgaaccgtatttcataaacatcacacgccagagaagccacagttactcggaagcccccagctgactgcctggcttgtttcagatgcagccgcttgaaacgtgcgcagcatcttcatatcataaagattgtgcacggatccttacaatgtctcctgggggagagcggctgaggctgccttgcacagggcccttcccagggccgctgtccgacgcctgccccccccatgttccacatcctgtgaagaaggatgggggctccctcgagaaagtaagacccgtatctgcccagccgttttctcaccaccactgggaagagcagcctggctctgggaagcaaggaatcccaccagaattggggtatttttttaaaaaaggttgtccagggccttggcttatggctggaggtttggtttttttagagtttcccggagaaaataaaaacccctccctaaattttccctgcc

SEQ ID NO: 263728 - DNA, 980 bp, Homo Sapiens
ggtacggtccggaagtacgggatatcgtcgacccacgcgtccggatgtccagtactactgggtggacgtgatgctgaatccaggcagtgccacttcgaatgttgctatttctgtggatcagagacaagtgaaaactgtacgcacctgcacatttaagaattcaaatccatgtgatttttctgcttttggtgtcttcggctgccaatatttctcttcggggaaatattactgggaagtagatgtgtctggaaagattgcctggatcctgggcgtacacagtaaaataagtagtctgaataaaaggaagagctctgggtttgcttttgatccaagtgtaaattattcaaaagtttactccagatatagacctcaatatggctactgggttataggattacagaatacatgtgaatataatgcttttgaggactcctcctcttctgatcccaaggttttgactctctttatggctgtgcctccctgtcgtattggggttttcctagactatgaggcaggcattgtctcatttttcaatgtcacaaaccacggagcactcatctacaagttctctggatgtcgcttttctcgacctgcttatccgtatttcaatccttggaactgcctagtccccatgactgtgtgcccaccgagctcctgagtgttctcattcctttacacacttctgcatagtagcccttgtgctgagactcagattctgcacctgagttcatctctactgagaacatctttccttttttcccttctttactagaagtcttgattcaatgcttaggcttcaaagcaagtcataatgcggttaactgtactcggttgcgcggggcggaaaccaattatcaggaggggtttcggtgcaagaggctgcagccccggaggaaagatgccaacagtgagactcgcgcgccttaaacagtgccagtaattttcaactcaatggacacggccctgtctctatctatccc

SEQ ID NO: 263729 - DNA, 898 bp, Homo Sapiens
  misc_feature (342)..(630): n is a, c, g, or t
tctgccctataatgctcccttgaagcacacctcagtataagctacttgttaatactcaaagtaacttagttaagaaagcattaattcttgcctgtgggcttttaagactgggagagagaaatatgcaacaattttaccagtgaatttccatgactgacaggcaaaccagccttcacattctgaaatcatctacataaaactagagcacccttattcaaccagaaaataccattttcatgaatactaaaaggaaaatagtaaaccatgaaatattacaatgaaaaaaagggacggaattaaatttttcaaataaacttcaatatctgccaagagggaattccnnnnnnnnnnnnnnnnnnnnnnnnnnnnnnnnnnnnnnnnnnnnnnnnnnnnnnnnnnnnnnnnnnnnnnnnnnnnnnnnnnnnnnnnnnnnnnnnnnnnnnnnnnnnnnnnnnnnnnnnnnnnnnnnnnnnnnnnnnnnnnnnnnnnnnnnnnnnnnnnnnnnnnnnnnnnnnnnnnnnnnnnnnnnnnnnnnnnnnnnnnnnnnnnnnnnnnnnnnnnnnnnnnnnnnnnnnnnnnnnnnnnnnnnnnnnnnnnnnnnnnnnnnnnnnnnnnnnnnnnnnnnnnnnntccatattgttaacatatagttaacactttaaaactgatgtgctttaattaaaaagcaagcaaatatacgataaaacagacaaggaatcaaagcacagatcctgaaatcagaatctaaagaaaataatacagtggggttgtatacaacttagcttagtaagaaattataattatacagaagcgatcggagctaccacaaaactgtgtaagaataaacaggtaattttaacagatggttatgtaaattggcaggtcgggtaaagaaccc

SEQ ID NO: 263730 - DNA, 682 bp, Homo Sapiens
gggggggcctgctgggtggcttagcactgcagggctctgcgcgggaacgctaacctggtccggagcgagtctgggtctcagccccgcgaacagcctttcacgagtcttcaagctttcaggctatcttctagtcaagatgagtgataagccagacttgtcggaagtggagaagtttgacaggtcaaaactgaagaaaactaatactgaagaaaaaaatactcttccctcaaaggaaactatccagcaagagaaagagtgtgttcaaacatcataaaatggggatcgcctcccaacgagcagatttcaacattacctgacagtcttgattttaggcttgtttttttgtaaacccatgtgtttgtagagattttcagacatcttcggatatcttctcacctatgttccctggctaagaagtcagaggtagccaatgtttccttaaattcatttttaaacttaccattggtgcatatgttccagatggcagatgctgtcaataatctcaccattgatgacctttgtgtatgtagttcttgcatcctatactggataagcctgttttaacctgctatgatgggtgcttccattgcttcataatcttcatgaagttgcatgcttttgcagcttttcacagtttatttgcatttctaatgtagcaataaagtaaccaatataatcacga

SEQ ID NO: 263731 - DNA, 1909 bp, Homo Sapiens
  misc_feature (404)..(404): n is a, c, g, or t
  misc_feature (918)..(944): n is a, c, g, or t
  misc_feature (1489)..(1489): n is a, c, g, or t
  misc_feature (1515)..(1515): n is a, c, g, or t
  misc_feature (1545)..(1565): n is a, c, g, or t
  misc_feature (1604)..(1604): n is a, c, g, or t
  misc_feature (1663)..(1709): n is a, c, g, or t
gactaatgaaataactgttcactattgtgggttctacttgcagggttcagactaggcaatgtggtacatgctatacaggcaactgagcagagcattcatgccactgacctggtacctcgcttatgcttaacattagccaacctgaaccgtgtgatttatttcatctgtgacaccatcctctgggtgaggagcgtaggtctcacctctggcatcaacaaagagaaatggcgaacgagggctgctcaccactactactattctcttctgctgagccttgtcagggatctgtatgaaatctccctgcagatgaaacgagttacatgtgacagggcaaagaaagagaaatcagcatcccagggatcctctttggtttcagcgtggctgagggaggaaacagaatggcntccaatcctttcttacttcttttattccgatctctgaagcagcatcctcccttgctcctggacacagtgaagaacctttgtgatatcctgaaccctttggaccagctggggatctataaatccaatcctggcatcattggacttggaggtcttgtgtcctctatagcaggcatgatcactgtggcatatcctcagatgaagctgaagacccgttagggtgtttttaggcttggaactagtacctactttaaaagatggcctcttggtgggacagacatttgtataagtcacaggccatgtcatactgtgcttaagttcttgttcatgtgagcatttaacaacctgtgatgtgggcagagatgaggccaagaacggagaagggaggagcatgaagagttgtatgtttttggagtgctggagtgacttgtgaatttctgaatattttcccttcatctaacattgattgaacatctcttatgtgcatagtgggagcttagtatttgctgaatgaatnnnnnnnnnnnnnnnnnnnnnnnnnnngaatgaatggccctcccaacaacaactcccgccccaccctctcccccgaccgcccctcggcacgcacgtcctcgcacccaactagacccctctccaccccgcccgcccctccaacacaccccatcccgcctgcgcctgtgaaaatactctttctactcggataagggagtgcacgatgccgggcggcgccccggcccctagcccacaccacgcaaccctcctccgccctctcacctcaccaattacggtggggtagagggctggggcggggtggaagggtgtgttttgtgctcgtcgcacagacctactcggtcgtccgcgccaacacacacccctgcccacgacatgcactctgtgtctggacgcctgtcttcccgcccccactccctgtcctgctccatgatatccttcctcgtccatcctcccgctctagcctcctccgtctcaccctccctcgttcttttctttcacgtcgctcgctcactcaaagcgaaacatataaagagatatatagcaccacacctgtgagcaaaccaaccccacangcgtcatcaacggcccaactggcttngtgtatgtgatattatcgtgaagcactctnnnnnnnnnnnnnnnnnnnnntttctctcctggctccagtcgcttatcaccaccaatctngctacgccgcaccaccgcccacgtgcgccaccctccctctcgctccctccgaccggccnnnnnnnnnnnnnnnnnnnnnnnnnnnnnnnnnnnnnnnnnnnnnnnatacacagatggtcttgcatcgctggagtctaatgtacttttagaaaaaataaaaccgttgagacaggtgaactagtagaaattagatactgcgctgggagcagaaaaataaaaccaaagagacgacccattccgcgagcgcacgcaccccacacaactgagcgcctcttctcccccgctatgggcgacacgagtctgct

SEQ ID NO: 263732 - DNA, 731 bp, Homo Sapiens
  misc_feature (440)..(595): n is a, c, g, or t
  misc_feature (604)..(618): n is a, c, g, or t
  misc_feature (645)..(653): n is a, c, g, or t
gggaggccagccagaatggcaataaggactccgaatacataaaagcaaacagaacactccaacttagagcaataacggctgccgcagcagccagggaagaccttggtttggtttatgtgtcagtttcacttttccgatagaaatttcttacctcatttttttaagcagtaaggcttgaagtgatgaaacccacagatcctagcaaatgtgcccaaccagctttactaaagggggaggaagggagggcaaagggatgagaagacaagtttcccagaagtgcctggttctgtgtacttgtccctttgttgtcgttgttgtagttaaaggaatttcattttttaaaagaaatcttcgaaggtgtggttttcatttctcaatcaccaacagatgaataattatgcttaataataaagtatttattaagactttcttcagagtannnnnnnnnnnnnnnnnnnnnnnnnnnnnnnnnnnnnnnnnnnnnnnnnnnnnnnnnnnnnnnnnnnnnnnnnnnnnnnnnnnnnnnnnnnnnnnnnnnnnnnnnnnnnnnnnnnnnnnnnnnnnnnnnnnnnnnnnnnnnnnnnnnnnnnnnnnntttgtgggnnnnnnnnnnnnnnnaaaaatttttttaaacccttttgtttnnnnnnnnncccccaaagggaagggaaccgggccaaaatttgtcccaaagaaaaaccggggaagaaaaaagggtgttgtttcccccc

SEQ ID NO: 263733 - DNA, 846 bp, Homo Sapiens
  misc_feature (690)..(762): n is a, c, g, or t
gggagactaccccatccaaggtccctgccagcagccaaggcatgttctcaaagctctttctaagacatcttttctctcttgtgccctctgcagctcaggcctctggatcacccttcacccccactgccaactacaattggttagctctgagtccacagttgccagagaaaagggctctcagcaccagactagcattcaacgacccaagcaacctgcctctaaggtctgtaagccagcctttgacctgtccctaaactgatccaatcctccaggccctgccttgaactgtcttctcctgcagactctgactaccagactgagtcagcaaaaccttgaactagtgccaccttttacctgcacctggaatcccttgcgtatgctccctgcccctctactcccaaaggacgttccctcagtctaaagagatcaaaagtcccttccagaaaaactcccgtttcctcggtgcagctaaattgcacagaagagtttattgctaaaagagctaaaagttagaacagggaagctcagataatttatactactaacatgtaaatgactgacggagttataaccctttctgaatactctgatctaaagctttatgtcctaaaacttccaaaacacaaagtccccaaaatggaaaactctaggcccctggccctggggaaagggacggctcccttaccacannnnnnnnnnnnnnnnnnnnnnnnnnnnnnnnnnnnnnnnnnnnnnnnnnnnnnnnnnnnnnnnnnnnnnnnnttcttactcctacctcccacgttttaccggcccgtctcctagctcgggcgcaaaacccgccccaacacctctccatggcgccct

SEQ ID NO: 263734 - DNA, 1065 bp, Homo Sapiens
gggatgcatacatgtgatttgatgatgtcccgcagtaagaatgatttttaaaaaatgaattttccttttctatagatcatagatacttggcttttattgtgacttagttttaatgtgtaatactcatgattatatttgcactaactgagttagattctgacttgagaataaccataattgtgtgaatggttgaaaatacctgactggcatgtaaaaatagagggaaatagagacttcaatctataaatagattgtcttatacagtgcttatttttttattagttggttcccacattaggaactttcctatagtaaagctctaaactctactaatgttgacaactaaacttttaagtggcttgcaaagacctatttagcctataatgtatcttaactatacaacctcatcatcttttacagaaacaggttttgtgaacccttgaaggctggtaatgtgtcattcctgatccggtccctggcatctgacatttaggcctcacagtcataggcactcagaaaatttctgatggatgagtgaatgattaaatgggaaatgcagtagtctaggagatagtgggtttgtgttctaattctttctctctttctatcaaactagattgtctctaccaagtatttaaatgaggcagttagattacctacttctaaggtgcctctactttttcaggatgttgtttctgtaacagagtcatctggtttctttgtccctccgcccctctctatgttaatgattgatgaatgcctgaagtatatggagttgcagtggcaattactggggtttcagtggtgaacataaccagtccaggttccattgcccttgcccctgtcctcagagctccatctctccttagcagtattctctcttcatccctgatgggctgtataatctaaccatcaaatcccttctctaagccaccatcataggactcagtgctcctgtgtaggagatacatgctagtggcctagaactggggtggtccttgcttctgctaccaagggtgaggtaataaatgttttcctagcctcactcccttcaaactggtgttc

SEQ ID NO: 263735 - DNA, 1015 bp, Homo Sapiens
  misc_feature (955)..(955): n is a, c, g, or t
  misc_feature (973)..(973): n is a, c, g, or t
  misc_feature (985)..(985): n is a, c, g, or t
ggggaggcggctgaacaaggttgtgggggtaggaagctagggttagaggcaacccgtgaggctagaaccccgaacgtggtcggttggagcaaatatgtccctccggaggcacattgggaaccctgagtatctgataaaaaggataccacagaacccaagataccagcatatcaaatcaagactggacactggtaacagtatgactaaatatactgagaagctcgaagagattaagaaaaattatagatacaaaaaagatgagcttttcaagagactaaaagttacaacttttgcccagctgatcatccaagttgcttccctctctgatcaaacactggaagtgacagctgaggagattcaaaggctggaagacaatgattctgcagcttcagaccctgatgctgaaaccactgccaggaccaatgggaaaggaaatccaggtgagcagtcgccgagccctgagcagttcataaacaacgcaggagcaggggactccagccgctcaactcttcagagtgtcatcagtggtgttggggaactggatctagacaaagggccagtgaagaaagcagagccccataccaaagacaaaccttatcctgactgccccttcctgctgctagatgtgcgtgatagagattcttaccagcagtgccacattgttggagcttacagttacccaaattgcaactctgtcctagaacaatgaaccccttattcaaatgatattcttggaatataaaaatgcccatggaagatcatcattctgtatgacgatgatgaaaggctggccagtcaggcggccaccaccatgtgcgagcgtggatttgaaaacctcttcatgctttccggaggtggagcaaggtctaaaagtcttagctcagaaattcccggaagggactggatttactgggttccctggccagcatcttggccagcagggccctttccttcntgggggtctggcccgggnaacggttccagnccccaaaggggcaaccccttaccagctgga

SEQ ID NO: 263736 - DNA, 809 bp, Homo Sapiens; identical to SEQ ID NO: 175118

SEQ ID NO: 263737 - DNA, 608 bp, Homo Sapiens
gaaatgagtcatttctatgggactgtcaccccaaaccctggggacagagtgactgtggacacaaggaagatgctggcgtgaggtgctctggacagtcgctgaaatcactgaatgcctcctcaggtcatttagcacttattttatccagtatctttgggctccttctcctggttctgtttattctatttctcacgtggtgccgagttcagaaacaaaaacatctgcccctcagagtttcaaccagaaggaggggttctctcgaggagaatttattccatgagatggagacctgcctcaagagagaggacccacatgggacaagaacctcagatgacacccccaaccatggttgtgaagatgctagcgacacatcgctgttgggagttcttcctgcctctgaagccacaaaatgactttagacttccagggctcaccagatcaacctctaaatatctttgaaggagacaacaacttttaaatgaataaagaggaagtcaagttgccctatggaaaacttgtccaaataacatttcttgaacaataggagaacagctaaattgataaagactggtgataataaaaattgaattatgtatatcactgttaaa

SEQ ID NO: 263738 - DNA, 760 bp, Homo Sapiens; identical to SEQ ID NO: 32886

SEQ ID NO: 263739 - DNA, 837 bp, Homo Sapiens
  misc_feature (442)..(451): n is a, c, g, or t
  misc_feature (606)..(614): n is a, c, g, or t
  misc_feature (678)..(686): n is a, c, g, or t
  misc_feature (739)..(739): n is a, c, g, or t
  misc_feature (751)..(765): n is a, c, g, or t
gggccacggggactgaagatggcgccgcgaggtaaacggttgtcctccaccccgctggaaatcctgttctttctgaacgggtggtataatgctaccctatttcctgctggaacttttcatatttctgtaataaaggtgtcctgctaccatatccaacagctaaaccctagtactggatgtgggtgatgcctcctcctttatcttgggaattgagtaattccccctgttttttgggaccaaggggaaaccctctgccaagcgaaaaaaggccactcaagtaataaccgggggcctttgaacctttcccatcctggccatgagtggccctccctaatttacctgggtgggttggaagaacccatacggtaacctccccgcccctggtgaaaaccccatccttgggaaaaggggcgcattctcctgggctccctcccctctcccnnnnnnnnnncgtcccagaaacagctgttttttaaaactttgtgagagagggggggcctcaccccctttgtgggcggcgggggtcttttttcttctcccccccctaaatagcgggacacaaccccgcaaattcttttgtgacaagcgtgtcccccgccagaagannnnnnnnnctgtcggccgtccagggacagaagaagcccgcccattttcaatgcggcgggtttggtgaaaaannnnnnnnngcatacaattttattttggggcggccactctctcggggcggaaacaccttctngtcggacgccgnnnnnnnnnnnnnnngcactggggcgaagaaaaaattagtcgggaggggggggagggcacacaagacattgttatcccctcctcccc

SEQ ID NO: 263740 - DNA, 882 bp, Homo Sapiens
  misc_feature (765)..(765): n is a, c, g, or t
ggagagaattcagagccaaactaacatcagatgcagagaaggaatcagtaatgatgtttggacggaaccttcgtcagctccttttaacaagccctgttccagggcgcaccttaatgggagtggatcctggttataaacatggttgcaaattagctataatttctcctactagtcagatacttcatactgatgtggtttacttgcattgtggacaaggcttccgagaggcggagaaaataaagacacttttgctgaatttcaactgcagcacagtagtgattggaaatggaactgcctgcagggaaacagaagcttactttgctgacctgataatgaagaattattttgcaccactggatgttgtttactgtatcgtcagtgaagcaggagcatcaatctacattgtcagccctgaagctaacaaagagatgccagggctggaccctaatttgagaagtgcagtttccatagcaaggcgtgtacaagatccattagctgagctagtgaaaattgagccaaagcacattggagttggaatgtatcagcatgacgtatcccagactttactcaaggcaacactggacagtgttgtagaagaatgtgtcagctttgtgggagtggatattaacatctgttcagaagttttgttaaggcatattgcaggactcaatgccaacagggccaaaaatattattgaatggcgagagaaaaatggaccctttatcaaccgagaacagctgaagaaagtgaaagggctgggccaanaatccttccaacagtgtgctggcttcatcagaatcaaccagggttatatccgaacgttttgcagtcagcaaacttgaaacttcaggccaaattccaaggagttgctgtggacatctt

SEQ ID NO: 263741 - DNA, 821 bp, Homo Sapiens
  misc_feature (779)..(779): n is a, c, g, or t
agtggacttgtttacaaaagtggctcaggagaaattggatcagaaacaagtgacaaaaaggattcattttatacagattcaagtagtatcttaaactacagagaagattcgaatatactttcatttgatagtgatggtaatcaaaacatactttcaagtactttaactagtaaaggaaatgaaaccatagagtccatctttaaagctgaagatttgcttccagaagcagcttcactctctgaaaacctggatatcagtaaagaagagacccccccagttagaacacttaaatcacagtcatctttaagtggaaagcctaaggaacgttgcccacccaacctggctcctctctgtgtttcttataagaatatgaaaagaagctcttcacaaatgtcattggataccatttcacttgacagcatgatattggaagaacagttattagaaagtgatggaagtgatagccatatgtttttggagaaaggaaataaaaagaactcaactacaaattacaggggcacagcagaaagtgtgaatgctggtgcaaacctacagaattatggtgaaacttctccagatgccatcagtacaaattcagagggtgctcaggaaaatcatgatgacctgatgtccgttgtggtatttaaattactggtgggtatggggaaattgacatccgaggggaagatacagaaatctgtcttcaagtgaacccagtgacaccagaccaattaagggcatatcagcccttcggcattaccctttgtaatcgtcccagnttggtttccgaatcagaaagctggtaatttcaattccaaaac

SEQ ID NO: 263742 - DNA, 823 bp, Homo Sapiens
acgagccaccaggcccagcctgacgtggtattttctttacggaccaggtagactttaaaacgagggtaagagaaaagccagtgtctttctgaggtaaataatttctgccaggaaacttcccagccccaccagcagccaccctaaaaaaaatcactcgtgtccccagggacttctaaagcttggggctccaggaaatcatccagtagagttggagattcagagatttcttgaagccagggacatgctcctaactcctttcccattaaaggtgttagaatagaccagagggtgtcccttttccacagtaatgggatcggctggtgtgccttcagggaggaagagggaggtggtcaagcttgaaaaactggctttaggatggttctgactttgttctccctccccaagtgttctcaacctccattctgcagtgttcagagttttagggaaagggtttgggtgccccagcatccaggtgttgtgtggcttagcgcatgtgaagtgaaaaccttctggggttgtttggaagcagctttctggttcttgtgattgtatcctgaggtcccagaaccctattctcccacgaggatcctcagtgaccatggtggccacacgcctggccagcctgctggctcctgggtgagctgaagaaccttgcctgtggcacttttcgagggtgagctggaaccgagagaacatggtccccgtgctgggactcatgcgggtcatttcctgccggcctggtttcgcctggtcgtgtctttatgagcaccatgtaagcctccttgtattgagataattgggcattaaacattaaactgcaaaa

SEQ ID NO: 263743 - DNA, 1078 bp, Homo Sapiens
  misc_feature (167)..(167): n is a, c, g, or t
  misc_feature (176)..(176): n is a, c, g, or t
  misc_feature (643)..(667): n is a, c, g, or t
aattccccaagcccgcttaattccatgggccccagggtttttcccttaggaaaacaaggttaagggccccaggttccactttacctaagtgggggcccggggcgcccaaaacggaaaggttctagaaaaggttcttcgagggcccgagggcggccgaacacggtaantttatttgntattgggttttgctttgtcagcctttattaatcaagagtaaagccgagccctagggtttccttaacaacaacaaaaagaacatcaaccttgtttatggcaaacagtgacttaattcttaatgactgttcattatatgtttaacaccacagagcaagaattgatcacgtttcaatcacttattcttctgagattaaaatacaagattaaaacagattaaaataaaattcactccaagaatttaaaaaataattccaaatgaaagacatttcaaacactgtatatagaactcaggaccaaaagaagaccttaaaacattttttacctttgaggtagcacaataatgctgaattagatttattttattacagtgagcttaaaaaaacaacacggaatctaccctttgctcaaggtgggctaaatggttttacgcaaacccctccatgaggttagtgacagttcttgtccnnnnnnnnnnnnnnnnnnnnnnnnnaaagtataaagatagccctgcagtgtgtaaaaggaaacctatgggaaggctgcttcccataaaatagacaatagaatcattgaggaacgtcagcagtcaagacaggaggaacaagaggtcattgtagtgaaaaaccaaaacaacttgtatcttggcaagattggtttacaagttcatgacaagaacaaaaattccaacatcagccaactgaaaataaaagataaaagatgacattcatggatctttttatttttctctgtgcaaaatgctcttctttctgaattagagggtagcttgtacactgtgacatgacatgaaatgctgtgtgcccagggtgctgctgggtgccaacagcacctctcactggaatacggatatcactgtgtgcagagaaaacggggcaatcagagg

SEQ ID NO: 263744 - DNA, 769 bp, Homo Sapiens
gggaagatggattaggggatgataaagaccccaacaagaagatgaaacgaaacttaaggaaaattctggatagtaaagcaatagacccttatgaatgcactaatgaggctaaatcagatcaggcctgggcttcagtataagctcctatctcagtctggccccgttcatgccccagtcttcacaatgtctgtagatgtggatggcacaacatatgaagcctcaggaccatccaagaaaacagcaaaacttcacgtagcggtgaaggtattgcaggcaatgggatatccaacaggctttgatgcagatattgaatgtatgagttccgatgaaaaatcagataatgaaagtaaaaatgaaacagtgtcttcaaactcaagcaataatactggaaattctacaactgaaacctccagtaccttagaggtaagaactcagggccctatcctcacagcaagtggcaaaaaccctgtaatggagctcaatgaaaaaagaagaggtctcaagtatgaactcatctcagagactggtggaagccatgacaagcgctttgtaatggaggtagaagtagatggacagaaattcagaggcgcagccaaataaaagtggcaaggaggcacttactgcttgagaactgttctgaccatgcgaatatagaaagaatatctcgcagggtggaacctggctgcatcacgtcggcagaagacacagactttgcactgcgtaatcgtgacttgacacctgcaagtctatacgcctagatacagatccg

SEQ ID NO: 263745 - DNA, 622 bp, Homo Sapiens
gcaagtagcttggggaagctgaataaactctaggcccagggctactaaagacttcaggatagaattctccatcaaatatacagcataagtaaaactgctctgcactgtttaatccatttccaaggggcttagaaaagctaacaagggtgtgtcccctgtcctgccccaccggtttgctggctttgtaataacataagaccattgtggttgttggtgtcagataccttcccatcctgagctctctcacctacctgctctctctcctagagcaggatactggggtacttttaagaagggtgctccttttaagatgcccagaaaagctgtatttaacttcttgctatttgtaacttggggatggtctcccctggccccagggcacataagagcaaaggctccaatggtcagtggatgactctgcaaaagtgaccccctgtgccagaagctatagccctctccccaacaggtctctcttgttggccagagggcctgcttcccatgggcattgcaagtgccaccgtgcggggcctggctctgcacacccaggaaaaagtctgcagacccccaggccttccgcaataattcaccagaccagaagccactggtggtccagagaaccctt

SEQ ID NO: 263746 - DNA, 1121 bp, Homo Sapiens
aaacaaaagattctggcagccaggaggtgctgtctgaattgagagtactatctcagaaattgaaggaaaaccatcagtccaggaagcaaaaagcaagttcagaggggactattccccaggtccagagagaggaacctgccccagaagaagaggagcccctgttgctacagagaccagagagagtacagacgctggaagagctagaagagctgggaaaagaagaatgttttcaaaataaggagcttcccagacctgtgttagaagggcagcagtcagagaggaccccaaataatcgccctgatgcccctaaggagaagaaaaagaaggagcaaatgatcgacctacagaacctcctaaccacacaatctccctccgtgaagtctttggcagttcccacaatagaggagctggaagatgaagaggagagaaaccataggcagatgataaaggaagcttttgctggggatgatgtcatcagagatttcttgaaagagaagagggaagctgtggaggcgagtaagccaaaggacgtggacctgacactacctggctggggcgagtggggtggtgtgggcctaaagcccagttgccaagaaaagacgccggtttctcattaaagcccctgagggtcctccaagaaaagataagaatttgccaaatgtgattatcaatgagaagcgcaacatccacgcagctgctcatcaggtacgagtgcttccatatccatttacccaccattggcaatttgaaaggaccatccagacccccataggatccacatggaacacccagagggctttccaaaagctgactactcccaaggtcgtcaccaagccaggccatatcattaaccccataaaagcagaagacgtgggctaccggtcttcctcaaggtcggacctgtctgtcatacagaggaatccaaaacgaatcaccacacgtcacaaaaaacagctgaagaaatgctctgtagattgagttgctggaggagtgacagccaggagccctgacttcacttcctttggtccagttttactctgatacagggtggattccaaaactggctcagtacattgcatgtagttaagccacattttaaaaataaaggcattttttaatct

SEQ ID NO: 263747 - DNA, 1132 bp, Homo Sapiens
agaacctgtccctgcagaaaggttccttggccatgctttgggcctctgctctttatatgtttattctattctccatttttccaccccgtccttaccctaggcctaaacacaggtacagatatgtgcatgctcagggcagctcctaggcctggactgagctctcgggggaattagataaatattccaacatcctcatgcctggcccatttagtttcatcctttagttacccaggccagtagctttgggttatcccttcctgtagctccaaacccagcactttggagcagcaaaatagggcactgacaggagatgaaactctctcctatctcagaatttgccaacttctgggctgggctcctaggaggtagttttcttgaaggggactgcatcctagttgacctgaattttccagaccaggagggactgctgtgctctcccttctcgccatcatactgtttggctagattcattcagcagtagaagctgtttgatctgttgaccccagcatactgctgtttcttcaccagcttcattgtgtcacagtagcttcctttgggaggatgatgtgatagaacactcagagagaggggagggagaagagagatagtgggtatgcttctctagctccccatcttccaggtccacctcttgacttcctgttcccctaaacctgagcacatcacgccaggccctctttgctgccaggacagcatcagctcactcctcagcaataatctagggtatgtgggaaggtcagggctgtggtaaggaatagaatcaaagaggggagtgatacggggtgggggcacttggccgcctgctaaacttggacattaattttatatcatgacccccttttaagccagtgagctgggcttcagtttttcccaggccatgcacatttaatttatttcagagaaactctaattgtattttcactgcagtatcttgtattttttatttgtgatttaagaaatgtgaagagaaaatacacagacacaataatggctaacattgtttctttcattccttgttctagagctaaccactctaaaattgtttggtaatgtcacttagtgtaattaattgtaacatattcttttaaataaattgatttattgatcaaaaaaa

SEQ ID NO: 263748 - DNA, 989 bp, Homo Sapiens
  misc_feature (626)..(626): n is a, c, g, or t
  misc_feature (662)..(662): n is a, c, g, or t
  misc_feature (686)..(686): n is a, c, g, or t
  misc_feature (690)..(690): n is a, c, g, or t
  misc_feature (695)..(695): n is a, c, g, or t
  misc_feature (718)..(718): n is a, c, g, or t
  misc_feature (769)..(769): n is a, c, g, or t
  misc_feature (782)..(782): n is a, c, g, or t
  misc_feature (852)..(852): n is a, c, g, or t
  misc_feature (880)..(880): n is a, c, g, or t
  misc_feature (898)..(898): n is a, c, g, or t
  misc_feature (909)..(909): n is a, c, g, or t
  misc_feature (946)..(946): n is a, c, g, or t
  misc_feature (962)..(962): n is a, c, g, or t
ggagcccaagtgtttttggctgaaattcctgctgatccaaaactctatcgacatcacaacaagttgaggttatgctttaaggaattcatcatgagatgtggtgaagctgtagagaaaaacaagcgtctcatcacggcagaccagagggaatatcagcaggaactcaaaaagaactataacaagctaaaagagaacctcaggccaatgatcgagcggaaaattccagaactgtacaagccaatattcagagttgagagtcaaaagagggactccttccacagatctagtttcaggaaatgtgaaacccagttgtcacagggcagctaagaaaagccatcttcattcgtggagactgtggccctgcaaccctggagaaggacttgctggtacttaaaaaatgggacatttgccacccaggactgactgtacactccctgatcagccagcactctggaagctttgggatcccaggaaccatggaattattcccaaatggactctgaccagatttttgccatactggggggtggcgggatggaggatgggtactcaggcatgactgcgtatttattaaagtgtgtttttccacaatgtaccaaacaaggcataagcagcttctcctgctngactggccaatcactgcccatctggagagatgattncctctgggcccatatttggatttnattnggagntaactcaaattgcctgagggaanaattggaaaaattatccaccaagtcggattcaaactgaagtttcactcttntataggaaggcangggcaaacttcgtaggagtaccgaaacattttcaataaatctacaaagggaagccttactacaattccanaaatcatcatggttggaaattttggganggagattatgtgtgaacntgttacccttntggtaatggtggactaatttgctgtatagttaatgtnttttgtatattactgntacattaatttaacatgcatttataga

SEQ ID NO: 263749 - DNA, 441 bp, Homo Sapiens
  misc_feature (74)..(74): n is a, c, g, or t
  misc_feature (110)..(110): n is a, c, g, or t
  misc_feature (131)..(131): n is a, c, g, or t
  misc_feature (150)..(150): n is a, c, g, or t
  misc_feature (159)..(159): n is a, c, g, or t
ttaagtaagacacgggggtttcctcccatgttggccccggctggtcctcaaactccctgaccctcgtgatacgncccgccctcagccctccccaaagtgcctgggattancaggcgcgagcccacccatgncccggcccagtgtcctttncctatacancgtacatacatgatgatggcttgagtcagccgcagggcagtgggcttaatgagagggatctttgtaaagacagctcttcacttcagctcagtagctttggtcataggcaagtttgttttccattatcataatttgatgattcttgtgatgaattcaatgctagttcttaaagaactcttttatttctgtatgtggagctaatgtttaccttggaaattttgcaaaatacatgtaagaaagaaataaaatatattttgaaaggaaaaccaaattaacctcttt

SEQ ID NO: 263750 - DNA, 896 bp, Homo Sapiens
ggtgatgaccaaggaggaaatcactaagacatttgagaagcagtggtatgaacgttcttggacaagccacagttctgagccttaaccctgtagtttgcacacaagaacgagctccacctccccttcttcaggaggaatctgtgcggatagattggctggacttttcaatggttctgggttgcaggtgggcactgtatggctgggtatggagcggacagccccaggagtcagagcctcagcccggctgccctggtggaaggtacaggtgttcagcaccttcagaaaagggcataaagtggtgggggacaattctcagtccaggaaaatgcattgaccattgctggctatttgcttacctagtaagaattggattcatttttgaccagattattcttctatgcttttttgcaataaatcaaatcccacatatctacaagtggtatgaagtcctgcaccccccaggaggcctgtccaggcatgtcttcagaggcagggtgggttacactcatttacctcccctctccccaccaaattatgacacaaacgagtatgtttcctctctagaaccctgtaatgcctcctcccccatccccagagctccttactgtaggtcttaccctggacaaggattttttcaagttggaggcacagaacatgagcaatctgacattcccacagcccctcaaacatgcaaggctactaaggcaggaggagtataaatgatggatattgaccaagacctgcttggacggagaccgccatattatctgttctcttcgttcacaaaacagccttcacttgtctcagaatttgatggacacatactgtgatgagcaggagcttcagatgcactctttacacattttgttgaaataaacctctacatttgtaaaaaa

SEQ ID NO: 263751 - DNA, 862 bp, Homo Sapiens
  misc_feature (782)..(782): n is a, c, g, or t
  misc_feature (821)..(821): n is a, c, g, or t
ggggggagccagcggtatggcgtcgggctgcaagattggcccgtccatcctcaacagcgacctggccaatttaggggccgagtgcctccggatgctagactctggggccgattatctgcacctggacgtaatggacgggcattttgttcccaacatcacctttggtcaccctgtggtagaaagccttcgaaagcagctaggccaggaccctttctttgacatgcacatgatggtgtccaagccagaacagtgggtaaagccaatggctgtagcaggagccaatcagtacacctttcatctcgaggctactgagaacccaggggctttgattaaagacattcgggagaatgggatgaaggttggccttgcatcaaaccaggaacctcagttgagtatttggcaccatgggctaatcagatagatatggccttggttatgacagtggaaccggggtttggagggcagaaattcatggaagatatgatgccaaaggttcactggttgaggacccagttcccatctttggatatagaggtcgatggtggagtaggtcctgacactgtccataaatgtgcagaggcaggagctaacatgattgtgtctggcagtgctattatgaggagtgaagaccccagatctgtgatcaatctattaagaaatgtttgctccagaagctgctccagaaaccgttctccttgatcggtgaaaccattaaaggagcccagtgttccccgttccatgaaatctccccttttacttgggaaaacaggaatattgactanccaaatcccaatgcaattgaagccgtactgcttttttgngcagttattcattccagtgattaaaactgattgtgcagaat

SEQ ID NO: 263752 - DNA, 818 bp, Homo Sapiens
  misc_feature (231)..(231): n is a, c, g, or t
  misc_feature (769)..(769): n is a, c, g, or t
cctttaagagggttaaaatccaaaaatagtttcactgacacctgtaactctgatattccattttctcttctgaagggctaagctaggacatcttttcttttcaaagctgatcttcagaacctcaagactggcagaaagcaggctcccagctgcagctcggccacaatactttgcaacaggcaaagttcccacataggtgcaaatgatgctttaagagttatcaaaactttntaaaaaataatgcattaatatggagcctccacatttttctgacgaaattcctctaaaggtggtggcagctgtgaaacagaaggcactttgtgctaaaattcagagggtctctcaagagagaacgccacagcagagagacccaaaccgcctaagttgcaagcgaccctttagggtgggaagaagtatccccccaggaaggcatctgcaaaggaaaaaaattgtaatcatgattccaaagcaaaaatggctaaagttggaagagaagaaataccaagagagaagacaaaacaatgcctgtgccaaggacttgaggagtgagctttacaaggacttgtcagctggctcttgtacttctattgggctggttccttcaccatttccaaaggggttcttggagaccttgcaggaacaggaacagcaccttagccaagagggttccaggcctcctgcctaggcctgggctctcctcgttaggtcccaggaataaattgagtcccattggcagcacttgcaggtattctagtccacgggcaagatntgcttagggattttgtggtacagccggtgaagagaaagtgagggttttc

SEQ ID NO: 263753 - DNA, 1197 bp, Homo Sapiens
  misc_feature (456)..(456): n is a, c, g, or t
gggtactgtgtttggcatcgcagttccgacggcagccgccgtttcgcgacccacggcggacttgcataaacactttctagttggaatctcaccctgtgaggtgggcaaggtagtgatattcctgtttgacgccgacagaaataagagagattgactctcagaaccatgtggcgggattttaaaggaggatcttaacagtggctcggacagacccgtgttttctgctcctagcattaactacgtcgttaaacccttctgaatttatttcgtctgtgaaatggggaaaagatagccaccttgcataactggtgaagaattcgtaaactgacagcagaatctagtaagaggactggcccgtggtcggctcttaatggtgtcacagaataaagaaaaagactgggagagagatgagagctgatagaccagaggagaccaaagactgaaactgaagactanaccatggaaattgggaacaagcacttactcgcttagagggtgaaaaaagtgaatttgcctacagggccaatttggaagcacctctccctggaagccagtcaatgaagagccattgggaggattttaaattaaggaaccgaaaaatggagtctgaaaatagaggcgcagagaccggtcaaccacaatgaagaacaagccattttgacctccatcctggctcatctcctctgtgttctcatagcatcatattatagaatggatcacaaacgcctttgcagttgcctatttatttgtccatttctccctccagactgcctttgtgagaaaaacacccaaatgccacaagtgcatccccagggaggtgcagggtggcaggagctgaggatgcaaaaacataattgctttctatctactctgatttgagcttcatcaaatcctttggctcccaaggcattctgcagcagatgtgtgcacaatattccagcactaggacttgtgtctgcgggtactgctcgaggcccaagaatctgagggtctgcaaagcctccaagcccttccccttcctgcccaggcctcagggcctgtgctggccaccctcctatacagcccttacttggcattcttgctaagtcctgtgggggctccatccttgactcttttcattccacgctgatgtcttcagggctctgcgcctcaggggagaacttgcaatgctagtaataaacaaagagtactcatgat

SEQ ID NO: 263754 - DNA, 830 bp, Homo Sapiens
  misc_feature (159)..(159): n is a, c, g, or t
  misc_feature (467)..(467): n is a, c, g, or t
ggtcctggagcactgtaaaaagagctgattcaagtaagtagatgcctgttttgagaccagaaggtttcataattggttctacgacccttttgagcctagaattattgttcttatataagatcactgaagaaagaggaacccccacaaccccctccacanaagagaccaggggcgggtgatgagacctggggtttagaaccccaggcgacgacctcaaatcactgcattcattctgagcccccttcctgtccccaggggaggtgtattgtgtatgtagccttagagcatctctgcctccaacccagcagttctctgccaaagcttgtggaggagggagagccctgtccctgccctcaggctccccagtgctcctggcccttctatttatttgactgattattgcttctttccttgcattaaaggagatcttcccctaacctttgggccaatttactggccacaaattntcgtttaaataccattgtgtcattgggggggaccgtctttacccctgctggactcccacctatccgccctgcagcagaaccttggcggtttataggtaatgatggaacttacactcctcttcccgaaggcccaagtagccctctgggatcttgcaacacacgtcgacttcccagccactaggccacctcccaagtggcccttctgcccttaccccaacacagaggcaactctccccctctcgggcaagaaggagcgaggttctgggggagactccggagccgcgcggggggcgcctgcgtgagcgcaagcgcaaaatgtggcgaaagagcgtggggcggggacctcgcgggccgccggcgggc

SEQ ID NO: 263755 - DNA, 1418 bp, Homo Sapiens
  misc_feature (711)..(723): n is a, c, g, or t
catagtgcactagcattttcttgaaccaataatgtattaaaattttttgatgtcagccttgcatcaagggctttatcaaaaagtacaataataaatcctcaggtagtactgggaatggaaggctttgcatgggcctgctgcgtcagaccagtactgggaaggaggacggttgtaagcagttgttatttagtgatattgtggggtaacgtgagaagatagaacaatgctataatatataatgaacacgtgggtatttaataagaaacatgatgtgagattactttgtcccgcttattctcctccctgttatctgctagatctagttctcaatcactgctcccccgtgtgtattagaatgcatgtaaggtcttcttgtgtcctgatgaaaaatatgtgcttgaaatgagaaactttgatctctgcttactaatgtgccccatgtccaagtccaacctgcctgtgcatgacctgatcattacatggctgtggttcctaagcctgttgctgaagtcattgtcgctcagcaatagggtgcagttttccaggaataggcatttgcctaattcctggcatgacactctagtgacttcctggtgaggcccagcctgtcctgggtacagcagggtcttgctgtaactcagacattccaagggtatgggaagccatattcacacctcacgctctggacatgatttagggaagcagggacannnnnnnnnnnnnacctttgggatcagcctccgcaattccaagtcaacactcttcttgagcagaccgtgatttggaagagaggcacctgctggaaaccacacttcttgaaacagcctgggtgacggtcctttaggcagcctgccgccgtctctgtcccggttcaccttgccgagagaggcgcgtctgccccaccctcaaaccctgtggggcctgatggtgctcacgactcttcctgcaaagggaactgaagacctccacattaagtggctttttaacatgaaaaacacggcagctgtagctcccgagctactctcttgccagcattttcacattttgcctttctcgtggtagaagccagtacagagaaattctgtggtgggaacattcgaggtgtcaccctgcagagctatggtgaggtgtggataaggcttaggtgccaggctgtaagcattctgagctgggcttgttgtttttaagtcctgtatatgtatgtagtagtttgggtgtgtatatatagtagcatttcaaaatggacgtactggtttaacctcctatccttggagagcagctggctctccaccttgttacacattatgttagagaggtagcgagctgctctgctatatgccttaagccaatatttactcatcaggtcattattttttacaatggccatggaataaaccatttttacaaaaataaaaaca

SEQ ID NO: 263756 - DNA, 823 bp, Homo Sapiens
  misc_feature (441)..(441): n is a, c, g, or t
ttttaccaggcagtttggacaatctagttcaaaggattctaaaacatttcaacattataagaaaactgtaatttaaagctaaaaaattgtaatacatcgaactaatataaattactcattaacatgttctattgtttttcacaaaatccataattaaggaatagtgggttaggtgagacatttttcccaacatttggtcagattagctaagcagctctgggtaaaggatgcctcctctgaatcaggatcttggcctcttaaatgagggcactggactaactgcccattcacatcccttctaatctacacattttatcacaactgttcatcttatataatccttccaaggatgaagtgtttcaactcagtgtattttccagacaaagctcccctgtttaagtggcaaaactcttctttaaactttaaaaattttttacgttnaaaatgttatttccaatattatttcctgccaccttagaagatgttgagggataacttaacaacacagtctctaaatgacaccagtctcctggacttgccagctgatgacaggatctgcagatacgtctcaggctctgctccaattctgagcaactctgggccacactgagtgagaaagagaatgataccacctacactgtatcgctttgtttcaaagaccaatagagttataatatatcaaagtatttgtaaagtacaaattaccatacaaatgcaaaggactgctgtaataaacctaagcaaacttttccctgataatgaaatctggatagttttagaaaatatatgttgtttgtcaagacttgtgcaataggccatgtgt

SEQ ID NO: 263757 - DNA, 1040 bp, Homo Sapiens
  misc_feature (898)..(908): n is a, c, g, or t
ggggaaggtgttccacggtggcgcgatgtgtgccccgtggtcctggagggtgggagggtgttgtccccctgtctgcctcgcgtgtttgttgcccctcccaccgagcgcctgccactgtttgccccccctgtgtagtatggactccaaatccgttgcgattcagtcattggcaacttccaattgtgtccttcactgttccgtattagccctttcttcactgacctcgcccggaattaaggcttgtaaattatttagccattctttcccccttatacgcaccttcaggattgccttcccccattaacccattccagtccctgtctcttccctacagcattacacaaaggacacaccacaacctagagaccacatttactttacagttttaaaattaatatatcgccactatccatagtgtagtaagttatttcagatcccttatttgggggagggcatctgtataacccagcccatctaaagatttgggcaagtctgccagaaatacataagaagccctgcatgtgataaacacataggagttttctactttcaagagatgacatccagaaccaagctatgcattttcagagtagggaatggacacacagcttaaaaacctctggactaaaaatatttcatagcacaaaaggccagagttttgtttttctttaacccctttttaatgttatatagtcagtgagaaaaacagaatagtcatgtgtgcatcaacacatctaatttgaaaaggaacatttaagattcttacagaaaatctatcataaaaaacaagtcctttatactttcattcatttactcactaattcagccactggctgtttctaaaccagcaaactaatcaaaggtctggcaactcactcctcatcccaccccattcccnnnnnnnnnnngaaacgcttctgcttaaataacccaagtggtcttattcataaagtagctgcccgacgcgtgggtcgacgatatcccggaattccgaccgtaccagccgctttttaaacaaggtgtttatagtcctaaggcac

SEQ ID NO: 263758 - DNA, 408 bp, Homo Sapiens
  misc_feature (355)..(355): n is a, c, g, or t
aaagaaggtactactgctgtaagaagttaacaagtaataatttcctatttaacatctgttcataatgacatttccgctgcatttttttccatcaagaataccaaaacagtttcctaatatacagtatttgaaagtgtttgccatattggctcttaaaatgatagactaatttttctcattcaataaaagaaaatttctaataacaaaatacatgtaaagttagaattttataatttccacaaaggaagcagcatttattaaccagagtacttgtttgcaattttttatctgtgaaaatattttaaagctcttacaaaacttaaatttttaaaaaatcagctcaaaaattttttcncatgttgttgggcataccactgctgtctctgctttcggttttccaactctccc

SEQ ID NO: 263759 - DNA, 823 bp, Homo Sapiens
gggggagtctgcaggatggcaccggacccctggttctccacatacgattctacttgtcaaattgcccaagaaattgctgagaaaattcaacaacgaaatcaatatgaacgaaaaggtgaaaaggcaccaaagcttaccgtgacaatcagagctttgttgcagaacctgaaggaaaagatcgcccttttgaaggacttattgctaagagctgtgtcaacacatcagataacacagcttgaaggggaccgaagacagaacctcttggatgatcttgtaactcgagagagactacttctggcatcctttaagaatgagggtgccgaaccagatctaatcaggtccagcctgatgagtgaagaggctaagcgaggagcacccaacccttggctctttgaggagccagaggagaccagaggcttgggttttgatgaaatccggcaacagcagcagaaaattatccaagaacaggatgcaggccttgatgccctttcctctatcataagtcgccaaaaacaaatggggcaggaaattgggaatgaattggatgaacaaaatgagataattgacgaccttgccaacctagtggagaacacagatgaaaaacttcgcaatgaaaccaggcggggtaaacatggtggacagaaaagcagccctcttgtgggatgatcatgggtgattttactgctgcttggggctatcgtggttgttgcagtctggccgacaactgatggcagtaaagagaccaccagcagtgacaccggcatgacagatgcagccaaacctttgtacgcaaaactgtctccataattccccaagtctgtag

SEQ ID NO: 263760 - DNA, 1177 bp, Homo Sapiens
  misc_feature (172)..(172): n is a, c, g, or t
  misc_feature (182)..(197): n is a, c, g, or t
  misc_feature (291)..(301): n is a, c, g, or t
  misc_feature (707)..(707): n is a, c, g, or t
atgggggggatcccaccccctattttcggccccggggtttcttttgggaccaaatttggccccatgtttccctttccccggggggccccggccccaaaggaaagtgttgaaaaagttttttgggggcccgagggggggccccccaaaggcttctctcttcgggcgcgcgggnccaacgcccnnnnnnnnnnnnnnnncttcgcggcctgctcgcgcctctcctctgtcgggcgcggggccgggtcttttccctctcgccctctccttttttggaggaagtttattaaattnnnnnnnnnnnctacaaatgagtaattataaaatataatttcactcttttcattatttaccacaaaaatttaaaaataccaatatacagacgagcacaagtgaactggaaaagagctaaaaattgtataaaagacaaatctaaactcaagaatatatgagaagtgacatacaccatacactctcaagtgagttcagaaagcatgttccgtgctgggcaggttttctttccaggtcagtttttattggcactacacctggaaagctctctaagccaaagttcttatgtgtcaggatcttcctagacctcccttggaaagcatttctcataaaacaactcacaccagacaggctgacttattgtaggcacaaaaatcataaatgcctctcataggccccatggagcttggaaaaaaaangatctgctaatgaaagcattacaaaaacagaaaagtggcacctagtggccacttagcagcttttctttatggcttctagctaatcatagatgtcggcctgtctgccagtaacattgtgctgggcaagtatgagtctccaattccagggctcagtgatgacccacctgagggggagatacctcttggcagcatgatctgaaactggacactactaaacatggtctgggaactaaatattggctatttcttgtacctgtgccccagattttacggagatccctcaaagactatgacaacaaagacatccttttctgtcgtgacactgtaaataaacactttcctttaaattccatttatttactaaaagtctctattctgtactttcctgtttgtctttgtttcacaatagatttctaaatttagtgatgacccatataactcatttcacttgattccaagtatcatcctgt

SEQ ID NO: 263761 - DNA, 1639 bp, Homo Sapiens
  misc_feature (992)..(1000): n is a, c, g, or t
  misc_feature (1286)..(1286): n is a, c, g, or t
  misc_feature (1545)..(1545): n is a, c, g, or t
tcctggtctgacctcagtgccctggagttgttgaaatctataccagtgggagttggtcagatctatggctgtgataatccatggacagggggcattttcctgggagccatcctactctcctccccactcatgtgcctgcatgctgccataggatcattgctgggcatagcagcgggactcagtctttcagccccatttgaggacatctactttggactctggggtttcaacagctctctggcctgcattgcaatgggaggaatgttcatggcgctcacctggcaaacccacctcctggctcttggctgtgcctgttcacggcctatcttggagtcggcatggcaaactttatggctgaggttggattgccagcttgtacctggcccttctgtttggccacgctattgttcctcatcatgaccacaaaaaattccaacatctacaagatgcccctcagtaaagttacttatcctgaagaaaaccgcatcttctacctgcaagccaagaaaagaatggtggaaagccctttgtgagaacaagccccattttgcagccatggtcacgagtcatttcttgcctgactgctccagctaacttccagggtctcagcaaactgctgtttttcacgagtatcaactttcatactgacgcgtctgtaatctgttcttatgctcattttgtattttcctttcaactcccaggaatatccttgagcatatgagagtcacatcccaggtgatgtgctctggtatggaatttgaaaacccaatggggccttggcactaagactggaatgtatataaagtcaaagtgctccaacagaaggaggaagtgaaaacaaactattagtatttattgatattcttggtgtttagctggctcgatgatgttaacagtattaaaaattaaaccccataaaccaactaagccttatggaattcacagtcacaaaatcgaagttaatccagaattctgtgataagcagcttggcnnnnnnnnnaaatcaatgcaagttacacattatagccagaatctgtatcacagaggtgcaagctgacagcagagctcagtccccacttcctgcaaacaatggcctgcaccctatcccttgtgtgtgtgacattctctcatgggacaatgttggggtttttcagactgacaggactgcaagagggagaaaggaattttgtcaatcaaaattattctgtattgcaacttttctcagagattgcaaaggattttttaggtagagattatttttccttatgaaaaatgatctgttttanatgagataaaataggagaagttcctggcttaaccggttcttacatattaaagaaaagttacttactgtatttatgaaatactcagcttaggcatttttactttaacccctaaattgattttgtaaatgccacaaatgcatagaattgttaccaacctccaaagggctctttaaaatcatattcttgattcatttgaggatgtcttataaagactgaagggcaaaggtcaggattgcttacgggtgttattttttatagntggttgaatcccttaatttaaaaaagctcatttattttttggcacactcacaatattctcctctcagaaaatcaatgggcattttgaaccaccc

SEQ ID NO: 263762 - DNA, 820 bp, Homo Sapiens
  misc_feature (566)..(599): n is a, c, g, or t
ccccatgccattgaagctgaaaagtttcagtgcaatttatgcaataagacctattcaactttttctgggctggccaaacataagcagctgcactgcgattgcccagtctagaaaatctttcagctgtaaatactgtgacaaggaatatgtgagcctgggcgccctgaagatgcatattcggacccacacattaccttgtgtttgcaagatctgcggcaaggcgttttccagaccctggttgcttcaaggacacattagaactcacacgggggagaagcctttttcttgccctcactgcaacagagcatttgcagacaggtcaaatctgagggctcatctgcagacccattctgatgtaaagaaataccagtgcaaaaactgctccaaaaccttctccagaatgtctctcctgcacaaacatgaggaatctggctgctgtgtagcacactgagtgacgcaatcaatgtttactcgaacagaatgcatttcttcactccgaagccaaatgacaaataaagtccaaaggcattttctcctgtgctgaccaaccaaataatatgtatagnnnnnnnnnnnnnnnnnnnnnnnnnnnnnnnnnnccacagagagagagctgcaagagcatggaattcatgtgtttaaagataatcctttccatgtgaagtttaaaattactatatatttgctgatggctagattgagagaataaaagacagtaacctttctcttcaaagataaaatgaaaagcacattgcatcttttcttcctaaaaaaatgcaaagatttacattgctgccaaatcatttcaactgaaaagaac

SEQ ID NO: 263763 - DNA, 1221 bp, Homo Sapiens
  misc_feature (19)..(19): n is a, c, g, or t
  misc_feature (384)..(385): n is a, c, g, or t
  misc_feature (387)..(388): n is a, c, g, or t
  misc_feature (623)..(637): n is a, c, g, or t
  misc_feature (826)..(826): n is a, c, g, or t
  misc_feature (850)..(850): n is a, c, g, or t
  misc_feature (1189)..(1189): n is a, c, g, or t
  misc_feature (1193)..(1193): n is a, c, g, or t
ttatgtggtcttatgattntattacagaaatctttttaacactatactctaaaatggacattttcttttattatcagttaaaatcacattttaagtgcttcacatttgtatgtgtgtagactgtaactttttttcagttcatatgcagaacgtatttagccattacccacgtgacaccaccgaatatattactgatttagaagcaaagatttcagtagaattttagtcctgaacgctacggggaaaatgcattttcttcagaattatccattacgtgcatttaaactctgccagaaaaaaataactattttgttttaatctactttttgtatttagtagttatttgtataaattaaataaactgttttcaagtcaaaaaaacannanncagcgaagccaacgacgctacccacacccacagactattctactatgtgttgctataataccaaatcaaacgccagccgcgcccccctcccgtgaaagagaggcgtgttgctacacccaccccacaggagaaagctgtccctatatccccgcctttacacactttcttctgaacggggccccctctgggcgcgccgcgcgaagatagctgttcacaccacacacctcgtggagtnnnnnnnnnnnnnnntccgccccccaccgcccaatggaggagaaaaacggggcttaattatatatttgtttccataaataacgaggagaaacattcaatgtgttaacacaataatcaccaatacacccggggagagaatactccccccccgaccacgacagctttagaatcatgcaccctggtctcccgtggcgggtctgtggngcaaacgcgagacggggtttggcnttgtcctcctcaacaacaccttcccataatcaatgcctcccccatgaccgcactccaccgacgagcgcctctctcctcggcaggaggtagatctcttcaaccaaactatgaagagccgcccactccacatacgaaaataatccacaagcagcacgaatgcaaggcacaccaacaaaccccggccgcgccccgcctccctcccagcattcctcctccgcacagacccaacaattacggatgtgtgaccacacgaaagatgtcacatatataagaatcactggggctccccccagcaaaaattatcctctcctaccatcggccgccagttcttgtgcacanagantttgtacttggtaaacaaacaaaacaca

SEQ ID NO: 263764 - DNA, 804 bp, Homo Sapiens
  misc_feature (579)..(579): n is a, c, g, or t
ggggcttcgctgaggcagtggtggccgcactataccgttagaaactcaatttcccggaggttgtgaggccctttgaggcgaaatcgctctgggcgtgaaaggagcaggcgttggcaatggaaggaccaccgcgacctcaggctgaccgtagggatgggatcttgagggccctccgagtcccctgggcttgcgctttctttctttgcagccaccgtgcctaccgcgaggatgagctcggcctcggtcaccgatttcgagaaggagcatctctggatgtatctgcaggcgctcggcttcgagccaggcccggcaaccattgcctgcggaaagatcgtgtcgcacacgcacctcggagtgaacatgtttgacaagctgaaccgtgatgcctttcatataatttcttattttttgtttcaagttctggaccagtctctcaccaaagaagttttcaaattttgttggcccccatttgaccaaaaaagtgacactgaattccgaaaacattgctgtgaatggataaaaaggatttctggtgaatgtggaagcagctttcctcaagttgttggttcactatttctnttctcctggtggtcctaagtttattcatctgatgtatcattttgcaagatttgttgcaatgaaatatattaaatccaattctaaaaattcttctcatcattttgtagagacatttaacataaaaccacagggacttgcacaaatgccattgccagatgccattttcgcacggtagcagattttttacaaattttggcaaaaaacaagattgtggttaccccaaaa

SEQ ID NO: 263765 - DNA, 1341 bp, Homo Sapiens; identical to SEQ ID NO: 3834
  misc_feature (1037)..(1037): n is a, c, g, or t
  misc_feature (1061)..(1070): n is a, c, g, or t
  misc_feature (1317)..(1317): n is a, c, g, or t

SEQ ID NO: 263766 - DNA, 1065 bp, Homo Sapiens
  misc_feature (933)..(933): n is a, c, g, or t
  misc_feature (1003)..(1003): n is a, c, g, or t
ccgaagaaacactcccaggacaggacagctggaacggggtccccagcaggccggactgggcatgtgcgccctggccgcagcgctggtggttcattgctacagcaagagtccgtccaacaaggatgcagccctgttggaagctgcccgtgccaacaatatgcaagaagtcagcaggctgttgtcagaaggtgcagatgtcaatgcaaagcacagacttggctggacagcactcatggtggcagccatcaaccgaaacaacagtgtggtacaggtcctgcttgctgctggggctgatccaaaccttggagatgatttcagcagtgtttacaagactgccaaggaacagggaatccattctttggaagtcctgatcacccgagaggatgacttcaacaacaggctgaacaaccgcgccagtttcaagggctgcacggccttgcactatgctgttcttgctgatgactaccgcactgtcaaggagctgcttgatggaggagccaaccccctgcagaggaatgaaatgggacacacacccttggattatgcccgagaaggggaagtgatgaagcttctgaggacttctgaagccaagtaccaagagaagcagcggaagcgtgaggctgaggagcggcgccgcttccccctggagcagcgactaaaggagcacatcattggccaggagagcgccatcgccacagtgggtgctgcgatccggaggaaggagaatggctggtacgatgaagaacaccctctggtcttcctcttcttgggatcatctggaatagggaaaaacagagctggccaaagcagacagccaaatatatgcacaaagatgctaaaaagggcttcatcaggctggacatgtccgagttccaggagcgacacgaggtggccaagtttattgggtctccaccaggctacgttggccatgangagggtggccagctgaccaagaagttgaagcagtgccccaatgctgtggtgctctttgatgaagtagacnaggcccatccagatgtgctcaccatcatgctgcagctgttttgatgagggcccgctgaacat

SEQ ID NO: 263767 - DNA, 1265 bp, Homo Sapiens
ggggggggaattcccagggccgttagttcatggcccccgggattttccttgggaagccggcttatggcccatgtttcacttttcccttgccgggggcccggccggcccaaagcaaattgttttgaaaaaggttcttcgaaggacccgaaggggggccgacaagggtctctccccccggtctgttctgggtcctttgaaaaggacccacgtcaatccttttaattgggtacaggaaactacttttcttttcaagagaagcccttgcgctctggttggattttgtgccccacgtatacaaaatctatggttattgagttaagttaggatcagagttaaaacttcctgccaaggtagttttgggatcaaacggactacgtttaccatttgagagctatttgctatctagaggtgagaggagtctgtacaatgtcgccgctgggtgggcgggtgcagctggctgtccgaggaggggcggccgtcccctttgcacactaggtgcaggcagcgcggcactacctggagatcatgaagctggagtgggactggctgaaggaggtggtgccagcactcagctgggagaagccgctgtgactggactccaggctcgtcatggaacctctgaaatcccaccgagccgatcacctcgggtgtagtacatcactttacacttgtgcgaagagacctgcagggacgcaagcacgtcgtccacccggggaaggctgctggcggcgcacgcaggcatgctgtggaatttccactgcaggatgtagaagcccggccacctggtcacatgggaaccctgcacgctttctccttctttgcagatcagaggcgactccaccatgctgtagtcgcggcccagctgccagactttgtctatgagctgcacattgttcccacccggagaggtgatgctgtgggctcccagggagtcctttttgggtggttgtggcgacctcttggagtgatagatgttaaacacaatgtcccctttgcacacgtcaaaatcacaagtgatgactgaagaggcatccacaatctgaatgagaatctcatgtggggctcctttgaagacgcttgcagactggtagatgatatcagtccagagcttcaggtcttcattctccagctcctctacagtccagtacagagatttggggaccagtccaccctctggcacttcgcacatgcactccccactcaggaaatctgaaataatctatcaatgtaatccagcaggcctccaggaccctggtagtcatttc

SEQ ID NO: 263768 - DNA, 773 bp, Homo Sapiens
  misc_feature (558)..(558): n is a, c, g, or t
tctaagatagaggtttggtcaacagtgcttaataataaataagaacctcctgccattctaattttcctgctgcaccccatcccccacacacccctcacgaacattgatataagcagtattaacacagtataaagaatgttcaccttgcatatgtcatttcaggcacatggattcaggagaagcacagttgagtggaagaaatggtagacttgtgaggcttgcccaggccttgtgtacacgcaataagtggtgagccatgggtctctccgtcagcgcctccctccccgccaccacttcaggccaacaatttaaggtgctgagttgtaaggctcctccattgtcagtacagggctcgcctttgtagccctgatcactaccagtacacttttcaagacaactgagtatttttgtatgcctttgccttcccctttgtccatgaaacatgaagagttgtttatggttcttgacttctctgagcagagtgtctgcatctcttggagagttacacatttctttcatgaaccatttttctcattcttagatgcacctgtttttatncctttgcagaccatcttctggccttcttattttcctgtctggcaaagacagaaattacaggaagataggggaggggttttttaaaccatctccttttcaaaaggaatgtaatggtcagaaattttcccttgtgccacaccaaagaaacctggaaaccttaaaaaagccccccacctattttccctctaaagcccaagggttccttaagtgggccc

SEQ ID NO: 263769 - DNA, 1574 bp, Homo Sapiens
  misc_feature (57)..(108): n is a, c, g, or t
  misc_feature (112)..(147): n is a, c, g, or t
  misc_feature (185)..(350): n is a, c, g, or t
  misc_feature (954)..(954): n is a, c, g, or t
  misc_feature (1138)..(1138): n is a, c, g, or t
  misc_feature (1529)..(1529): n is a, c, g, or t
cccctcctccccgcttcccaccacccgcccacacacaccaatcacttagggcgctannnnnnnnnnnnnnnnnnnnnnnnnnnnnnnnnnnnnnnnnnnnnnnnnnnnccgnnnnnnnnnnnnnnnnnnnnnnnnnnnnnnnnnnnnagtcgacggtaccggacatatgcccgggaattcggccnnnnnnnnnnnnnnnnnnnnnnnnnnnnnnnnnnnnnnnnnnnnnnnnnnnnnnnnnnnnnnnnnnnnnnnnnnnnnnnnnnnnnnnnnnnnnnnnnnnnnnnnnnnnnnnnnnnnnnnnnnnnnnnnnnnnnnnnnnnnnnnnnnnnnnnnnnnnnnnnnnnnnnccaaagggaaacactaaaaattccctatagatatattccacgaaatatttcaattgggctgattttaattaggctgtatcattgatgcattactggaatcgatcttatgtcttttgcattttaatcacttgagttaatcaaccactggcaaatcccatttgacaaagattaccattgtaaaaaacagatactgtggtacatccctagaaattcattcacatttaacacttctaaaatcgcaacaatagccctctttgttttccatgaccacattccccaccccctatatgaattaccgcactttaaagcttccaactcccgtaaacctttctcatcctccgaaactgcacacctattacacccgccacacccaaacaaacgctattcttccttgaaacacactcatctcaacggcttcaacctacgaactaataggcaaccttccccccaagggcttgtttccgccccctgcaaacgtggtaaattgtgccgcctttaggaaagcccccgcgccccctcccaattttcggtcggctcggacaaatggccgtttaaaccctcttctggtctatattgggaaaacaggttgctcttctttacaccngaccacctataccctctttgtatggcttcaacacttggcattccactcccccccctcacacttccccacacagagaatggggttttcacacaaaatccccctccttttcccacacgaaaaatcccattacgcctcttccgtacaaacagtaagaggagtacatccttccaaacagattacacancaggggggtctatataaaacaccacgccacattatttgttcccccaccatattattttagaattcttgtgggcccaacaagtgaagacccctctctaattcaaccaccttcgccgcattttcctttccctttattttgtacacccccgccgcaaaaatacccccccgaattacacagagcattcccctttctcatctgaacccaattcatacacctcgttttgaagcaacaaaaaaacctcgggaaagccgccgctccggggggattcatttctaccaaacacaaattgcgctctatctttattacaaacccccggccacaacgccacactcttatttttctttcccccacaaaaggtggggcacgcacccggccgcctatttcgtgtaanacttacgtgctatttcccccccgcccctttcacacccatttctcg

SEQ ID NO: 263770 - DNA, 1199 bp, Homo Sapiens
gggcacagactgtgtttatgactcaaccgttggttggaaaagactttgtttcatgtgtatttgaaagatggaattattttttccttcctgacctaaccttagaactggattagggtgggatctttgaaaagctgacatttgctgctatcattccaacactaaattcttaagtagttgcccaagggccagctcagtttatccttcggagagacaaggatatgcatgattcttaaccaggctatatgttaaaaaaaattggaaaatgcaatacattttttattatacaaactacagaatgagtatgcaagttttatttatcaaaatgtaatggatttttaaaggctgagaaattttccttatacctaccttttcagttattttaattataccaaattatcaactagaatagcttcatccatatgaaatataaaatgaagagacacctaggctctatcaggcttaggattctttgaacttatttccactttaatttctcagtggaagttaagaggggtgagaaaacaaagaaggggaaaaactgacaactaacaaaaccagcaccacatcgctaggtggtgcttactaattaccttctcaggattttcctcagattgaaaagcttatgaggatttcttgggagtcttaataacctgcctgttagtacagagctttcctgatgatatttactcttgagcacatgtggttgtaaaaccttaactttctttctccagggagggtggtgatagaaacagatggtagtatttatgaactgatgttctcgtgaaatgttgagggtggggagaaaagactttaagggaggagagccatctattttgttcctaaagccacctctcagcagaatcgtcatgtttttctgatgcaccgctctgcttcatgcccaagatgacttgcgaggcaatctcaggagctgtggacttaaccattgcaaagcacactgtctttctcagcgttctctgcaagtcagtaggtgttagtatggttgcaaagttcactgtctccagcaaagttggaactggggctacctctctacagctgtttcctcagaggggaaaaatcttgaggaccagatgggtgggagcttctgggagttcagagggaaatggggtgttctttccagccacaaaggctggctggcttttttactttcagcccactttctggacattttttaccatacc

SEQ ID NO: 263771 - DNA, 456 bp, Homo Sapiens
  misc_feature (191)..(191): n is a, c, g, or t
  misc_feature (264)..(264): n is a, c, g, or t
ggattaaaaccttaagttaaatataaatgttacaactcaatgtttgcttttagattttatacagtatttgttttgttttggttttgagtgtatataatgcagcattagcaatatggttccaatagaggagttaaatatatattgttaaaggagaccctgtagcagtcaaagattttattgatttaatgacnaaggaaattaatgaaaatgtttttgtttttctgctgtaattctgcattaagcctcacatgaaaatcacgattnctagagtttggaatgcaaaattaattgttttaccctcaagctgggaatatttttcaaaataaatactataatatagatatcaaattattacctccccatgttatgttgaaaatttttttattaaattgataaaactttatttccattatattcataatgttctgttatacataacattaaaatgttcattaa

SEQ ID NO: 263772 - DNA, 792 bp, Homo Sapiens; identical to SEQ ID NO: 3915

SEQ ID NO: 263773 - DNA, 401 bp, Homo Sapiens
  misc_feature (26)..(26): n is a, c, g, or t
cctttctccgtggctggcttccccgnactagggaaacgggttgtaaatggggaacatgacttccttccggagtccttgagcacctcagctaaggaccgcagtgccctgtagagttcctagattacctcactgggaatagcattgtgcgtgtccggaaaagggctccatttggttccagcccactcccctctgcaagtgccgcagcttccctcagagcatactctccagtggatccaagtactctctctcctaaagacaccaccttcctgccagctgtttgcccttaggccagtacacagaattaaagtgggggagatggcagacgctttctgggacctgcccaagatatgtattctctgacactcttatttggtcataaaacaataaatggtgtcaatttc

SEQ ID NO: 263774 - DNA, 656 bp, Homo Sapiens; identical to SEQ ID NO: 3921

SEQ ID NO: 263775 - DNA, 987 bp, Homo Sapiens
  misc_feature (926)..(926): n is a, c, g, or t
gggtgacaatatgctgatgctccttggagtcagtaataaaatgaccgacagggaaagggataaagtgatgcctctgattatccaaggttttaaagacgcagctgaggaagcaggaacatctgtaacaggcggccaaacagtactaaacccctggattgtcctgggaggagtggctaccactgtctgccaacccaatgaatttatcatgccagacaatgcagtgccaggggacgtgctggtgctgacaaaacccctggggacacaggtggcagtggctgtgcaccagtggctggatatccctgagaaatggaataagattaaactagtggtcacccaagaagatgtagagctggcctaccaggaggcgatgatgaacatggcgaggctcaacaggacagctgcaggactcatgcacacgttcaatgcccacgccgccactgacatcacgggcttcgggattttgggccatgcgcagaacctggccaagcagcagaggaacgaggtgtcgtttgtaattcacaacctcccggtgctggccaagatggctgcggtgagcaaggcctgcggaaacatgttcggcctcatgcacgggacctgcccggagacttcaggcggccttctgatctgtttaccacgtgagcaagcagctcggttctgtgcagagataaagtcccccaaatatggtgaaggccaccaagcatggattattgggattgtagagaagggcaaccgcacagccagaatcatagacaaaccccggatcatcgaggtcgcaccacaagtggccactcaaaatgtgaatcccacacccggggccacctcttaatctagacagaaatagctgtttggttttgtttttaaatagatctatttcccttatcacttcaattaaagactataaacaacaaaaatctcattgtgtctanacatcggggtgccttaggtcggtttgtaagtggatacaattaataaaataaaatccattgc

SEQ ID NO: 263776 - DNA, 606 bp, Homo Sapiens
  misc_feature (165)..(165): n is a, c, g, or t
taaatttggtcatttttttgactgatgtgctacttcttactagattagggagatgcacttagcttttaaaacctgagttcctgttacatgatgaggctcttgggacgtgtgtctctgactctgcgttgcgagcagagtgaggggatgcaggatgatccctggggncctgtccctgtgctccctacccatcgagcccactacctggctggggagacttgtgaacgcatctcaccaaacccttcccaacagaccctcagcgagctctagcagctgccagctacctggcccagaaaagaaatacacccatcgtctcctactgatatcatttagaaaacggaagatttcaacctacttaggaaagctattaatacggtctgttctctcacttaagtaattaacggccaggtcacactaaaaatgtatacatgacgtcaagtcaaagccaagacatctacaaagcctaagacgctggttgtgcagctgcaggaaagacctgggattcaggctagattctgaggagtaaactgtgcttaaagagacatttagagacccatgcaggcatctaagaaccctgtcaccactgcggactgtgactctggacctgcc

SEQ ID NO: 263777 - DNA, 1092 bp, Homo Sapiens
  misc_feature (87)..(87): n is a, c, g, or t
  misc_feature (677)..(689): n is a, c, g, or t
attccaccaggccgggaaatccccccagactttcatcccactttcaggggggtctagcccaaaagcgccttaaagagatgctggttngttattgataaaagcccgagatgacagagccactgtttcatcacactgactcacattttggtttgcaatccactttcctctctccctcatttccacatggaggaaaaaaagtgattttcttttcctcctcccagtaacatttctgactgaagtgttgttctaagactgcgaacaatcaatcctgtccaacaggggtgttgctgggtgtcacctactaggaccagccctacagagagccccagaaccaaccctggtgtgggaagtgctgactgctgacagagaatatgcaatgctcctcgcccactggtgttaacactaaaggctctgctaaaatggactaaattacatgagtcaacatcatgttttctgtttttggcatttcaacccatagagaatttctatctgaaacaagctgctctgaggcttgaagataccccccagtatcttcaaaagctgttctgcagaatcaggagtaacatttaatactgttgtcatctatagcattctttgtttctacgtgatttgtcaatgccgatactatatcctctaaaatcaaaagtatgccaaaaggcactaatctttcacacttnnnnnnnnnnnnnggttttgtggtccctgtgtttccttacattatcaaaaatatcatttggcaaaagcagtccttagttttcccctccccaaagccaaccctagtgatggccctcactttcttgcttgtttctttagggggcctgaggactgactatgttagatctctatattattgaagctgaacaactgattacatttctaaaactctttctacccaggacttttaaaacactaggtgaagaagaataaggcatattagtaggtacggacaaattctcaaaaaagtacagttgggctttgaaaagtctgtggcatttttttaaattctggatttgttgattttcaagtgctaaatacacagaatgtttcgaacgcgtgggtcgacgatatcccgtaattccggaccggtaccag

SEQ ID NO: 263778 - DNA, 924 bp, Homo Sapiens; identical to SEQ ID NO: 231592
  misc_feature (468)..(488): n is a, c, g, or t
  misc_feature (490)..(726): n is a, c, g, or t
  misc_feature (760)..(760): n is a, c, g, or t
  misc_feature (841)..(849): n is a, c, g, or t

SEQ ID NO: 263779 - DNA, 213 bp, Homo Sapiens
ggggcgcggagccctgctctcgcaactcaagatggcggacgagagtgagacagcagtgaagccgccggcacctccgctgccgcagatgatggaagggaacgggaacggccatgagcactgcagcgattgcgagaatgaggaggacaacagctacaaccggggtggtttgagtccagccaatgacactggagccaaaaagaagaaaaagaaacc

SEQ ID NO: 263780 - DNA, 891 bp, Homo Sapiens; identical to SEQ ID NO: 4008
  misc_feature (187)..(187): n is a, c, g, or t
  misc_feature (765)..(765): n is a, c, g, or t

SEQ ID NO: 263781 - DNA, 866 bp, Homo Sapiens
  misc_feature (717)..(717): n is a, c, g, or t
  misc_feature (742)..(742): n is a, c, g, or t
  misc_feature (744)..(744): n is a, c, g, or t
  misc_feature (829)..(829): n is a, c, g, or t
ggtacttgaagtacacagagaaagcttgggtgatggaactagaatggctgattcaacaacaatgttatcaataagtgatccaattcatatggtgctaatcaaaacagacatatttggtgagacgactttagtagcatcatattttctggaatggcgatcggttttgggctcagaaaatggagtgaccagtctgactgtggaacttatgggtgtaggcacagaatcaaaagtttctgtgggaattttaaatataaaacttgaaatgtatccaccactcaatcaaacgttatctcaagaagtagtgaacacacagcttgctttggaacgtcagaaaactgcagagaaagagcgattatttcttgtatatgctaagcagtggtggagagaatatttgcaaattcgaccctcacacaactcacgactggttaagatttttgcacaggatgaaaatgggataaatagaccagtctgttcctatgttaaaccacttcgagctggacggcttcttgatactccaaggcaagcagcaagatttgttaatggtccttggttatgaacgagcccctgttattggaggaggaggtaaacaggagcagtggtgcactctgctggcccttctctgtagaaacaagggtgactgtgaagatcacgctaaccttctgtgcagccttcttcttgggatatggattaaaagccttttgttgtggttgggaccanggcaaaaggagtacctcatgcatgngnttatgggctggtgaaactgatggggccattcctttttttgggaggagttaaacaggaacacaggtacatccattaaacctaccanatcctggatggaccttcccagttgcttgaaaagcccc

SEQ ID NO: 263782 - DNA, 879 bp, Homo Sapiens; identical to SEQ ID NO: 4059
  misc_feature (444)..(444): n is a, c, g, or t
  misc_feature (626)..(626): n is a, c, g, or t
  misc_feature (629)..(629): n is a, c, g, or t

SEQ ID NO: 263783 - DNA, 1104 bp, Homo Sapiens
  misc_feature (934)..(934): n is a, c, g, or t
  misc_feature (1082)..(1082): n is a, c, g, or t
  misc_feature (1087)..(1087): n is a, c, g, or t
gaggcttcattctggggggtcagggagcccttcagaagttacgttcttccccactaaaagagccatgtttcagcattccttctcaacattcgtggtttccaatacttaccaatgatactcacaaaagcccttgggaccctggggcccctaatgagaaaaggctttaacctatattgggtttaggataagccagggactccttgggtatcagaagcaatgagcaggagctcactagttcatgcaatgtacatgtcccccaaacacatgggatacaacacgggcacacaggcacataggctatgcctggtgaccaaaactctaatgtcctcaaccaaggacaaagttagccaacaaacgacaaagatgtggccttgtattctcctcccaaccagacaaatctgtttccttccaggaactcagaacaaggactcaagaacaaattggcaaccagaggcgggctaccagctaactcttgctaggccacatggacattcacctagtcctgcagacaatgcatgtgttacccaccctcactgacagtccttcaaacaagaaatttcctatacatgggagccaccactctcctgtgacccccatcacccataaaagaccacatcctaagcctgaacagacgccttgatataacccatgtcaaaaaacggatgttggccctctctgtctagcccctgttggagtaatgtgctggacctcagttcgacgaggatgacggtatagagttttcactcattttgttcagctttccaaggaatgtatatgtggaagtcatcatcgatccacgcacagtatttgtccctgcaaatgaggaaactcagagtgctctgggaaagaagtgcttacattcagaagggatccaacaacttccgaagagacctttgccatttgtgtccaggggcttcctgggtatctccgcagntcacacaaggtaacaattgtccctcaccaacatgtgcctgccctccatgccagtgctacctggggagggtgcagagttaacacagggcgtgctttcagaaaagacagacagggtgcacagggtcacgaggggccatgttcatccagtnccctngcattttattctactat

SEQ ID NO: 263784 - DNA, 967 bp, Homo Sapiens
gggggaggggtggggaatactggaaataatcagggcaatttttttctttcccataattggactagataccttggtactgttgaccttctcagcatctcccttttgccttagatggcaacaccctccagtctgtagcagagcagtccaacccagattagtgcagcccggaggcttagggtgcagcctccctggtcttcctccacacagttgttcaccaacagaccagacctcctttaaccacagtgtcaacatagtatcggaaagagagccatttcttaggggaataaaacagtttcgcttctttagctcatctgtggtgtcagaatccttggagctgaagagagaaatcaaaagagcatgatgatggctgcctggtttcaggtggaacttaatgcattgatctttagaagctccttctgttggaagttgagtacctgtgatctaaaatgtcctggaggcagatgacatctaaaatatgtgctttccaaccagcacagctggcgctcttagctcctgattggttgtgtgttttattaaggatcagtgcagttaagtcgtattttaaagtgttacctcccctcctaacccttccccttcttggacactgaaggaaaaggccaactagggtgttagccctctgggcaccaaggaaactaacagctttctcaaagcggtgaccactcaggccagcccagacaaatctgagggatggccagtgcactccaatgatgggacaggcctaacaacacatgtaagcttccccgagagctttcagctggttcacctctttgttctctagactcttaagtactgactgctttgacttttgtgattatgttatggtgatgtgtagtcagtgtaccaatatgttcacaacctaggatcatgataatggagtgtgttttgggttttttttaactgttcagaaaaaaagtaaattacaaatataagattaaagtgaattttc

SEQ ID NO: 263785 - DNA, 725 bp, Homo Sapiens
  misc_feature (527)..(527): n is a, c, g, or t
gggggatttagattgtcactgccacctcggtcggtgcttacttcgctgccagctggtcgtcgccatgaacccggacctgcgcagggagcgggattccgccagcttcaacccggagctgcttacacacatcctggacggcagccccgagaaaacccggcgccgccgagagatcgagaacatgatccttgaacgacccagacttccagcatgaggacttgaactttcctcactcgcagccagcgttatgaggtggctgtcaggaaaagtgccatcatggtgaagaagatgagggagtttggcatcgctgaccctgatgaaattatgtggtttaaaaattttgtgcaccgagggcggcctgagcctctggatcttcacttgggcatgttcctgcccaccttgcttcaccagggcaactgcggagacagcaggagcgcttcttcatgcccgcctgggaacttgggagatcattgggcactttattgcccagacagagatggggtcatgggaactcacctttcgaggctttnggaaaccacagccacgtatgaccctgaaacccaggagttcattctcaacagtcctactgtgacctccattaaatggtggcctgggtggggcttgggaaagacttcaaatcatgcaatagttcttggcccagctcatcactaaggggaaaatgcctatgggattacatgcccttttatcgtaacctattcctggaaatc

SEQ ID NO: 263786 - DNA, 968 bp, Homo Sapiens; identical to SEQ ID NO: 4429
  misc_feature (299)..(299): n is a, c, g, or t
  misc_feature (604)..(615): n is a, c, g, or t
  misc_feature (627)..(818): n is a, c, g, or t

SEQ ID NO: 263787 - DNA, 193 bp, Homo Sapiens
  misc_feature (14)..(14): n is a, c, g, or t
  misc_feature (40)..(40): n is a, c, g, or t
ggaattcgagaccnagcctgggctacatagtgagaccacntctctactagaacttaaaaaaagttagccaggcacggtgataaatgcctgtagtcccagccactgaagccagaggatcgattgaaccagggagatcatggtcacagtgaactatgattacgccaacctgggtcacatagcaagactctgtttc

SEQ ID NO: 263788 - DNA, 774 bp, Homo Sapiens
ggaagcttagtgtatataatctcaaaagggatggaatatttacaactcatatttataacatgttgaatcttctcagttatcagtagtcatcagaagtgtcaatagctttctaaataaatattaaatatctactgtcctgtagtgaaggagtaatttttagtaattttctctttacaaagtctccagtgtttccaggtaaatatttgtgaaacaaaatacagcaaactacattgttacttcagtgtattgttgccaaaaatgacaagatattatattaaaatcagtaaattttagacagattttaaaaattaattagcctacaatagaggttatatggtaacacggtgatcttctaagcagttaagtgactgactgttctggcaacaacgacttctccgtgactgaagggccctgttcatttcctgatcctgaagctcgtctctcttttgagcctccgcttgctttggtcgatggtttccctcagctttttctttgctgttcttcatcctcgttgttgctgtcatcatgttcactgtggcttttacaatacagcctgtaaattccttatgacatagttcagtgcatttggctttatcgcctgctccacagttctttacctttacttggcttagagaaactgtatctttgttgcttcatataacctttccccaaccccactaagctggacataacttattagtggtcctcccgtcactttatttgtaaaaatattttgttttgctaggagtggtgctcatgcctgtcatcccagca

SEQ ID NO: 263789 - DNA, 869 bp, Homo Sapiens
  misc_feature (169)..(169): n is a, c, g, or t
  misc_feature (191)..(191): n is a, c, g, or t
caggatatatttggtgagcccttataattattcatcttatatattagaaaaatatatattttttatactatccacaggcagtaacgctgcgggaggggccggggcaccgacaggggctgtacgcaccaggacatggggagtgtcaggtcaagtgcatcgctgggaggcnagcctggcccagtcccttctcnccataaactcctgggaaggggcattccccctttcgtgctccttagagaatcaaaggggtcttgggccaaggttaggggtctcccagggctaacaggcagggtgtctcagttacatggggaaaccgtgggatccccgaggctttgaagatcaagaatcaccagggaaggatggagtagggaactaacgtcagtcccctgggaattagcccctcaactgcgacacccccaggtggataggagccgtgcaggcaggacagtctgtgactgcccaggatgagccaactcagaaggcagaagacctgactcctgaacctctccctctgtgcttgaccttggacaagtcgctgtctccctaccccagactctgccgactctaagcgtccttgcgactctacacttatgtgaaaccttttttccctgggccctctcttgtgcttgatggggaggagggagccaacctgcagggtccagctgcaggagggcccttctccaaggaaagctttgggagcaagggagaagtaggggagggcagctgggaggaaaagggataccggacagagttgggactggggttccccaggggctgtcctctgccaacagaaggagcgagtttccccatgaaccttccagggcagagtcaggagccctgggtcccatccaaatctcgccctccatctc

SEQ ID NO: 263790 - DNA, 926 bp, Homo Sapiens
gggtaccggtccggaattcccgggatatcgtcgacccacgcgtccggttgaaacaaacatattgctgtgcggggacagccacttcacagacatgcagacccatttctttagagatattaggtttaaaacccattttaattttattttgctgaaggttggaatatataaagtaatggattcacaaaatatgatatcttaaaacatgtgaaagatttgaaagtggtgcatttttacttttaagagcagcaatctttgaaattagtcaacaatgcagtcttttttaaaagtcagttttctcaagtagtatgttgtaacgtaagatgtaactgatataactagattttgactggtaaacttaaagtgctttttatatttgaggttgactttaaaaagccattgagcagtcctcagaggttatggactctcaagcgactaatggaatagtgttctgttgtgaagtctagaactaaagcaccttgtattgtctgcttctaaagtgtcctatagtttttaacttaaagtgtaaagagtaacattttatcttatgtcaattaaagttacatttttcatttgttggtgtacatgtgctacctgttttatggggaatgtttaacacgatcctccaagttggttctatgcataaccattcaccaaatactgctgctgtgattccttgaaggaaatattctgtggtctgctatgatgcattgccatcttgctgcttgacaataggtttataaataattagaattacgtgttttaatagtacctttgtatatataacaagatgtaaaattaaagatgaggaatgtgtgtaaatgatcattcactgtttttgttttaaaactggtcagtactatgaagcttctgtggtttgtatgatgttttaactttcactttaaactgcatagaataaattaaattga

SEQ ID NO: 263791 - DNA, 836 bp, Homo Sapiens; identical to SEQ ID NO: 178574

SEQ ID NO: 263792 - DNA, 610 bp, Homo Sapiens
  misc_feature (87)..(87): n is a, c, g, or t
  misc_feature (110)..(110): n is a, c, g, or t
  misc_feature (131)..(131): n is a, c, g, or t
  misc_feature (155)..(185): n is a, c, g, or t
agtcattcctttttcaattcgctttcaactttgttgattacatcagggagcgtctcagttggtgttaccagtcttttaacacctctntaaatcgtgtcatctatttaacncaggagaaagtaagcaggcancaatgtttggtttctagcacagcnnnnnnnnnnnnnnnnnnnnnnnnnnnnnnngctcgcacacgggtcttgagtttggtttttagcagtcctgcctaaaattaactaaatttctggtttgaattgctgttcgggggaaaaaaaattaactaaatgcaccatccaaaagcaagtttttggatttacaagattaagaacccagacattaaaagggaagaggctctaccaacaaggccctgcctgagcagcccaacccaagcaacctgagcctcagttctttctgtacaacaaggagttttgaaaggtactcacttttggcagatttcaggggtgtctgaatagcttctgctgttagtttgtttatttcggtgatatccaggtcagcctatgacaaacatagccagaaagcaccaggcttattccaccaaaatatgaggaacaatatttcaagataaaaacttttttaaaactattatttg

SEQ ID NO: 263793 - DNA, 319 bp, Homo Sapiens
  misc_feature (203)..(203): n is a, c, g, or t
  misc_feature (216)..(247): n is a, c, g, or t
  misc_feature (277)..(277): n is a, c, g, or t
gtaccagcacctggcctgaattgagtaattttgaattatatgcagagaaagtcattcctttttcaattcgctttcaactttgttgattacatcaggggagcgtctcagttgggtgttaccagtctttttaacaccctctctaaatcttgtcatctatttaacccggggaggaaaggtaaggcagggcaaccaatgtttggggnttctaggcacagnnnnnnnnnnnnnnnnnnnnnnnnnnnnnnnnaggctcgcacacggggtcttgagtttgggnttttaggcagtcctgccctaaaattaactaaattctgggttt

SEQ ID NO: 263794 - DNA, 914 bp, Homo Sapiens
  misc_feature (451)..(498): n is a, c, g, or t
  misc_feature (874)..(874): n is a, c, g, or t
ggagaatgggttcaggccaagtcggtgaagatggatgttggcaaaataggaggataccctcatttgctgaatgggggacctgctctgagcctgcccaggggccaggcctgctccaggttaaactggacggaaggcccaggtctcagtttctttcaaccaggagaggccgctgcctagagcccctccccaccttttcctggatgggtgaggcaagccaggagagcaagcagtgttgtcctcacgggaggaggactgagcgactgggaaaactcggctctacatctcacccagaacggcttttagaaacaccacagctggagagtcctggctgagccttgggagtttcagctctttggcggggtgcccaggtgccatgcgatcagcgaagcctgcgagttggcaggactctgaggtttcctgcagaccatgccatgagattgaaggtgcgggnnnnnnnnnnnnnnnnnnnnnnnnnnnnnnnnnnnnnnnnnnnnnnnntccttgtcgggccgccctcggcccctcgaaaaagcttctctagaaccattcggtttgggccccccgggcccccagtaaggtaaattgaaacatgggtcattaggtgtgttttccctaaggaaaatccctggggccatggaactaaggggcttggaaattcctcaccccaattaacaacaaacgccccgggggggcccaaccggaagcggttttttggaaacaaaattcccagaatgggaaatttcctggaaggtgccttttaactgggaaatccttattcacaacggggggaggtctcaaaagggggaagccttcggagttatctccaatttttaaccgccccccgcggcccttgggccccactttttgtggcggnggtaacctggtgttgtaaaaattctcccttgtgaacgggc

SEQ ID NO: 263795 - DNA, 848 bp, Homo Sapiens
  misc_feature (616)..(626): n is a, c, g, or t
  misc_feature (694)..(702): n is a, c, g, or t
  misc_feature (771)..(771): n is a, c, g, or t
  misc_feature (776)..(776): n is a, c, g, or t
  misc_feature (823)..(823): n is a, c, g, or t
aaataagtttatccctgtaacattgtggtagagttttaatacagtatttagttttttattgggcttttttaaaaagttaacttttaacatagctgctcagggattaaatcagattggaaaacccattctgactccacatactgctacaaagaaatacatcgttgtttatattgagctgcaggagatagtacactttaaacttaagaaagttaaatgtttcacaataacattgcaatataatcttcagctactctctttccattggtaaaatctctgatggtgtgataactctttgccaacctacgaaacccatatctggaagaatcaccagctcccgtgagcagcttcatgtaaatagatgcactccaagcagattgcatgcctcaggtgtttgtcttctagtaatcatggagtgtgcaacacccagagtaacactacaaggggcaggactgcaaacagcaggtcctggctaaaaacccttaatgctgcattgctgccagttgtaaagagatgcctgaatggaggcaagttctgccctgtgggtgaaactgatgatgtactgtactgtcatatataaatccactaaatccagctacctggaactgtggccatgcannnnnnnnnnnctttaaagaccagtgtgatagtaggccatgcatctgagatacgatattccttggtaactagagggagnnnnnnnnntccaagtaggttcaggcttatgttgtattttgagagtctggttttatttgaacagaaataactctacangaaangctcttgtaaataatgctcaaatttgcaccccacagatcaaatccanttaaaaatgaatcttgtaaaaaaaa

SEQ ID NO: 263796 - DNA, 911 bp, Homo Sapiens; identical to SEQ ID NO: 178576

SEQ ID NO: 263797 - DNA, 891 bp, Homo Sapiens
  misc_feature (343)..(467): n is a, c, g, or t
  misc_feature (589)..(632): n is a, c, g, or t
  misc_feature (860)..(860): n is a, c, g, or t
atatcggcacagcactcaggaaagcctaaagcttgaagactccatttatttatagtgcatcccaatccagatacgtaacaattaacgagttatttttactataagcaaagttgcctaaaatcatagttgatactaaccatggttaacagagctctaaagtttgacagaaagtgagattcaaatcctttcactctcatatgctaaaccttttgccttactctgggtcatcagagaaatttaggtgagaatgtatgatgaagtctgtgttttagattcaatgcagatatatcattgtgcgcagaactctttctggttatatccagttaagagtaaatcaggcttnnnnnnnnnnnnnnnnnnnnnnnnnnnnnnnnnnnnnnnnnnnnnnnnnnnnnnnnnnnnnnnnnnnnnnnnnnnnnnnnnnnnnnnnnnnnnnnnnnnnnnnnnnnnnnnnnnnnnnnnnnnnngtgcccggccgaaatttgtgattttataactaagaatttttagttaagaacattatcagtaaagacaacgtaatcccaccctggagagtttattgggagcccaggaatattcatttttaatnnnnnnnnnnnnnnnnnnnnnnnnnnnnnnnnnnnnnnnnnnnntgatcagagtaacaggagtttctctcaggagtcatactccatgagcctggacccagtggttctttacgtggaaacaaatttcacctataggtaacctggtaactgctattttcttctgtgtgctctgtcaacaaagttatcagtgggcttgcaagagatgcctttaatactcagagcattctatctccccccctatctggttttagaagggaagggcctttcattaantttaccctttttgaagaaagttacttaggac

SEQ ID NO: 263798 - DNA, 1066 bp, Homo Sapiens
  misc_feature (951)..(960): n is a, c, g, or t
gggattccaacaaggtaaaccccaaggatttggaccccaaatatgcctacatccaggtgacctatgtgacgccgttctttgaggaaaaggaaatcgaagaccggaagacagatttcgaaatgcaccacaacatcaaccgctttgtcttcgagacacccttcacgctgtcgggcaagaagcacggtggggtggcggagcagtgcaagcggcggacgatcctgacaacgagtcacctgttcccctacgtgaagaagagaatacaagtaattagccaatcgagcacagaactgaatccaattgaagtggcaattgacgagatgtccaagaaggtttctgagcttaatcagctttgcacaatggaagaagtggacatgatcagactgcagctcaaactgcaaggaagtgtcagcgtgaaggttaatgctgggccaatggcctatgcacgagcttttcttgaagaaaccaatgcaaagaagtaccctgacaaccaagtaaagcttttgaaggagatcttcaggcaatttgcagatgcatgtgggcaggcccttgacgtgaatgagcgcctcatcaaagaggaccagctggagtaccaggaagaactgaggtcccactacaaggacatgctcagcgaactctccacagtcatgaatgagcagattacggggcagggacgacctgtcaaagcgcggagtggaccaaacctgcactcgagtaattagcaaagcaactccggccctacccacggtctccatctcatctaagtgctgaagtctgagggctctgcaagcatcagacccacctctaaagagaactttctgaatttgcagctaatctcggggaagaagaaagataggtttaatttatttgaagttttcatggtgttaatatttttgtttacctcgctaagcttcagaattttgccaacctctgaatttgcacattttgtataannnnnnnnnnctttgagcagtgttgatcaagccagggttggaatatttgccatggaaattccagtggaatgtgtaggctcaaatggcaaaccctaaggttttgctggttcaggtta

SEQ ID NO: 263799 - DNA, 606 bp, Homo Sapiens
  misc_feature (50)..(51): n is a, c, g, or t
  misc_feature (87)..(88): n is a, c, g, or t
  misc_feature (102)..(108): n is a, c, g, or t
  misc_feature (110)..(122): n is a, c, g, or t
ccatgttccactttaccctactggggccccgcggcgcccaaaccgaatgnngttctagaaaagctttcttcgaaggggccgaggcgnngccgacccatgttnnnnnnncnnnnnnnnnnnnnagggtcttacaacttctattgtaaactatactagactatagagggacttctacatctttcaagatgtgtttaataaaggtctgtttataataacttttgaggcatgaatctagcaaatagtactttatacaatgtcccttgtcattaccaactcataaatattaagtgtttttcagtgacttatgtttggatgtggtagtgctgatcagggccatgtgctgatgtcctggagagcaaaatcaatccaaagtggtgctgctatttgtgacagaacatgtttatttactcagccccggagacaaaaggaaaattgatatgggggagcgggaaataggagaactattaaatgtagtgaagaaatttcacaggtctaaaggaactattcaaaaggaaggataaagtagattctatacctataaaacagaatcctacctctgataaaagacaaatcagcctgaatttttgaataatcaataggattccc

SEQ ID NO: 263800 - DNA, 913 bp, Homo Sapiens
  misc_feature (42)..(42): n is a, c, g, or t
  misc_feature (119)..(119): n is a, c, g, or t
  misc_feature (191)..(191): n is a, c, g, or t
tggaggctgcagccagctcgtctcggcgcccgcgtcgcctgngcgaaccccccgccccgcttccgccgcgtcgaatgagctcccggaaagtgctggccattcaggcccgaaagcggagnccgaaaagagagaaacatccgaaaaagccggagcctcaacagaaagctcctttagttcctcctcctccaccnccaccaccaccacaaccgccacctttgccaagaccccacacccccggagccagaggaggagatccggggatcagatgatgaggagcaagaggaccctgcggactactgcaaaggtggatatcatccagtgaaaattggagacctcttcaatggccggtatcatgttattagaaagcttggatgggggcacttctctactgtctggctgtgctgggatatgcaggggaaaagatttgttgcaatgaaagttgtaaaaagtgcccagcattatacggagacagccttggatgaaataaaattgcctcaaatgtgttcgagaaagtgatcccagtgacccaaacaaagacatggtggtccagctcattgacgacttcaagatttcaggcatgaatgggatacatgtctgcatggtcttcgaagtacttggccaccatctcctcaagtggatcatcaaatccaactatcaaggcctcccagtacgttgtgtgaagagtatcattcgacaggtccttcaagggttagattacttacacagtaagtgcaagatcattcatactgacataaagccggaaaatatcttgatgtgtgtggatgatgcatatgtgagaagaatggcagctgaggccactgagtggcagaaagcaggtgctcctcctccttcagggtctgcagtgagtacggctccacagcagaaacctataggaaaaatatctaaaaacaaa

SEQ ID NO: 263801 - DNA, 426 bp, Homo Sapiens
  misc_feature (156)..(156): n is a, c, g, or t
ggtaaaaacttaaggtttattttagactttcaaggaaacaaaagactttagagtcctctctctgtaattctgccccactcatttgtttaccctgggttttatacagttctcttccttctcccctccccacctttcccctggctttttgcctcccantcccatgaggcatacagtaaggctgcctgctagtaagcagtcacataagtgggtacctatccagccattctcttttcagagcatataatactatcttagccaaacttgcctttgcttcactcatcatgcagccttctgggttggttgctatatatatcttttttccttgatgtcccattctcttccacagccctgaggtcttacgaatttttctactttctttttgctgttgatgaattgtttcattattaaatatatgcatgtatcaaa

SEQ ID NO: 263802 - DNA, 252 bp, Homo Sapiens
aataagtccctaggagctgggcttcattccctcccagcgggagtcccagtcagggtccctgaagtttgctggttcaggaaagaacaggaaagagaaaagccttctgtgcccaggctaaagctgttacatttccacagtgtggatgcagtcagaatccctgcacattctggtcataaggattagagtcaccagatgaggctctaaacagatcgcatcccttggaattagaaagcagtggagaccgggcgcagt

SEQ ID NO: 263803 - DNA, 348 bp, Homo Sapiens; identical to SEQ ID NO: 4574

SEQ ID NO: 263804 - DNA, 430 bp, Homo Sapiens
ggcgcatctgaaaattttcagagaggaattctctttgtagtcggcttgtcagggttttcaagtttttctatggttatttttaaatctctttttttaaatgctaaaattaatgtcctcattaatgcaagtaattttagagcacagtgtagccatgtacagtttccattatttaaaataaataaatgtgttggttcatttggtgtatggggggacatcatggtaactggaaatgaaagtttaatctttcacaaatgtgcttgataaagctgttaagaattgtctttcctaagtatgttaactgttgtatctaactcaactgtgagctaagtttaaaaactgcaatcatgaatgtttgtgatattttaaatatctactacagcacattcagccaataaagaatctgcctttaatgtaagttgtaatttacccc

SEQ ID NO: 263805 - DNA, 1064 bp, Homo Sapiens
  misc_feature (53)..(67): n is a, c, g, or t
  misc_feature (104)..(153): n is a, c, g, or t
gggataaaggcctccaagagaaaaaagaaacaaaccaaagatttaaccacttnnnnnnnnnnnnnnncccacagacaactccgctacctttttatatgttgggnnnnnnnnnnnnnnnnnnnnnnnnnnnnnnnnnnnnnnnnnnnnnnnnnnctccaagccgcaagtccttcatgcggtttaaactttgacctcagcagtctccaaagcaagacgacgatgacaaaggcggaaacaaagaaaaaataatgtatatttttaagtatttgtccttgaattgttagctccttgttaaacaaacaaaaggagagaaaaatccagagagaagtgttgctgggatggagacaactatttactatgtctgtgacccctcccttctgcctccctccccttcctctctttcctgtcctctatccttgctgcccctcccccaatatgtcccccaaacccaggggctcagtatttatttatttatataattgcagggtgactgggggcctctctcggcaactcgtagagagcctttggataatggcagggtggggaatgggcgaggaagtctttgggaagagcaggggcctgaactttcaactcctttctgccctcttgtcccactggcttccaccatcacccttccaaatccagggctgcactagggcaaggtgacccaccctacttggtaaagacctgattggcgcagcccattctggtgtggggtgtctttcaccacccagaatgaccaggttggaatgggggtgggtgaagttggagggggtggcaagtacaaggcaagggtgcccaggaaccggcatccagaaatcagccctggagtagacctgcctttcctccatccttaccaagttagcctccctttcagttccgtctgacccctgtgttggtagccccttccttcccttcctgtaccccctccgtctcttctcgtggtagcgggttagtgtttcagtgttcttaactccaatctgcttgttcattgtacaatgtgcttcttttaaggccccatttttgtaacttgagtgtgtcattcatcttgaacaacaaacatc

SEQ ID NO: 263806 - DNA, 887 bp, Homo Sapiens
  misc_feature (850)..(850): n is a, c, g, or t
gggctttcccatctggcggccgcggctcctgtccagaccctgaccctccctcccaaggctcaaccgtcccccaacaacccccagccttgtactgatgtcggatgcgagagcctcgtgcttaagtaagaatcaggccttattggagacattcaagcaaaggttggacaactacttttccagaacagaaaggaaactcatgcatcagaaaaggtgactaataaaggtaccagaagaatatggctgcacaaataccagaatctgatcagataaaacagtttaaggaatttctggggacctacaataaacttacagagacctgctttttggactgtgttaaagacttcacaacaagagaagtaaaacctgaagagaccacctgttcagaacattgcttacagaaatatttaaaaatgacacaaagaatatccatgagatttcaggaatatcatattcagcagaatgaagccctggcagccaaagcaggactccttggccaaccacgatagagaagtcctgatggatgaacttttgatgaaagattgccaacagctgctttattggaaatgaggactcatctgatagaatccccctgaaagcagtagccaccatgttcaaccatctgtcatgactgtttggcaaatggaaaccgctggagaaacaaaattgctatttaccaggaataatcacaatagaaggtccttattgttcagtgaaataataagatgcaacatttgttgaggccttatgattcagcagcttggtcacttgattagaaaaataaaccattgtttcttcaattgtgactgttaattttaaagcaacttatgtgttcgatcatgtatgagatagnaaaatttttattactcaaagtaaaataaatggaaata

SEQ ID NO: 263807 - DNA, 409 bp, Homo Sapiens
taaagcaatgttcctgaaacaggtggtctccttcaggtttttacttctcttgttgtgaaagtctttaacacagtcccaaaaagcaggtctctgtaagtttattgtaggtccccagaaattccttaaactgttttatctgatcagattctggtatttgtgcagccatattcttctggtacctttattagtcaccttctgattatatccctgaaaccttttctgatgcatgagtttcctttctgttctggaaaagtagttgtccaacctttgcttgaatgtctccaataaggcctgattcttacttaagcacagctctcgcatccgacatcagtacaaggctgggggttgttgggggacggttgagccttgggagggagggtcagggtctggacaggagccgcggccgcca

SEQ ID NO: 263808 - DNA, 540 bp, Homo Sapiens
  misc_feature (27)..(27): n is a, c, g, or t
  misc_feature (96)..(96): n is a, c, g, or t
  misc_feature (362)..(362): n is a, c, g, or t
cgccgaaaaagaaaatccccgaaaacnccagggaaaacccttgtgtccatttttaaaaaatgtcctgtaaaccaatgttcctgaaacaggtggtcncctacaggttttacttctcttgttgtgaaagcctttaacacagtcccaaaaagcaggtctctgtaagtttattgtaggtcccccagaaattcccttaaactgttttatctgatcagattctggtatttgtgcagccatatccttctggtacctttaattagtcaccttttctgatgccatgagtttcctttctgttctggaaaagtagttgtcccaacctttgcttgaatgtctccaataaggcctgattcttacttaagcacagntctcgcatccgacatcagtacaaggctgggggttgttgggggacggttgagccttgggagggagggtcagggtctggacaggagccgcggccgccagatgggaaagaacacgtgggagcagtaatgtcaagtgacacttaaacccttagacgccgattcgttataacgcgaggaaatc

SEQ ID NO: 263809 - DNA, 628 bp, Homo Sapiens
agcaagcccacgaacagcagcccccgcagcaggaagagtactgacccaccccggctgctcttgacacttccattgtgtgtgggaacgtttcttctggagaattggaacatgtgtggccccaagctcaacagaaaccagttgttcccaatctgccgttaccatcaacgcactgttgcatatgccagccactgcgcttggttcccattttctttgccaaggtgtattagcggacggccctctggcaacctacccgagagatcgtagggtcacatacatccaacttcaccacttgggctgcttgagattgggttctgctcttttcttcatttctttccaggaacaactctttcccaccccaacaccactgccaccacccctctttttatcctggtgtgaaacaatggtaatttgatatatggtatttatattggcatttttcaacccagtgtcactagatgtcacacacatttgtggtgctttgatgtttgcaagtctaacctctgaacataaatttggtcaaataattggaacaaagggaaacagatacttgatatgaaagccataatgacggtgacttgtgtcgtgggggaaaacataaggtcattttctccctctactcacaatacta

SEQ ID NO: 263810 - DNA, 885 bp, Homo Sapiens
  misc_feature (421)..(421): n is a, c, g, or t
  misc_feature (656)..(674): n is a, c, g, or t
gcatgctgaatgacaagtctctgtggacagacatccctgtgaattttccaaagaatggctgggctgcaattggaactcactcctttgaatttgcacagtttgacaactttcttgtggaagccacacgctaatacttaacagggcatcatagaatactctggattttcttcccttctttttggttttggttcagagccaattcttgtttcattggaacagtatatgaggcttttgagactaaaaataatgaagagtaaaaggggagagaaatttatttttaatttaccctgtggaagattttattagaattaattccaaggggaaaactggtgaatctttaacattacctgggtgtgttccctaacattcaaactgtgcattggccatacccttagggagtggttttgagtagtacagaccntcgaagcctttgcttgctaacactgaggtagctctcttcatcttatttgcaagcggtcctgtagatggcagtaacttgatcatcactgagatgtatttatgcatgctgaccgtgtgtccaagtgagccagtgtcttcatcacaagatgatgctgccataatagaaagctgaagaacactagaagtagcttttttgaaaccacttcaacctgttatgctttatgctctaaaaagannnnnnnnnnnnnnnnnnnaagatgatacttttgaaatgccagatatgatgagtgggatgattttaaaaaagccctctttataaactaccccctacactatttctgcgggaatagatattaaccgaattaattgggttattggcattaatttaatttttttgaattccaagttttgggccttggtaacccctatcctttcctgtggaacggtttttccagggggcctggg

SEQ ID NO: 263811 - DNA, 1151 bp, Homo Sapiens; identical to SEQ ID NO: 178585
  misc_feature (1098)..(1098): n is a, c, g, or t

SEQ ID NO: 263812 - DNA, 1474 bp, Homo Sapiens
  misc_feature (20)..(20): n is a, c, g, or t
atgtggtcgttgggtgtttngcaaacccccccgagggaattttatggaaaggttacctgcaaggcaaattatgtcttccgggaaatttaataaattatgggttccagttagaatatcttaaccctcaaaaaaacctggattaaagataaaggttaaaaatgtattaataaaaaaacccctttaaattcttaagaaagtattaaaatacaaacctttaatttctctacagtcaaagttttcattcacagggaactgtaggtcagtgggttgtgaaaaacttatttgagaaaagtcaaaaaataattgctttatttctcggtttcattagtactaattcacaggatcttggtagttttatctgaaagaaggatataaaaacttaaaagtcagagcagggaaagggaagtaataaattattaagaacaaactcagtgagacttgacttcacttatgatacatgggtagaaagagcaaaccagccttcttcattctgtttctcaatctttgctcttggattaagaggtgtgaatctcccacttcctgaggtggcatttagtggagaacaagaattaccagtagccccggaagatcttcttgtatttatcccgctgacgggagagacagtactacattttgagctttctggggcttcctgctgcctggaatagatacctcaagttgtcctctttgctccttcaagtccatgctctgagaggtaactgaacaggtgacatttggtggagaaagattcaaaccaacaagtttctgctgctctatcaactgcagtagttttccacgagcctccatactttgtcgattcaattctgcaatccgttcctccatactacctggtgttagagactgtgctactggaaaagtagaagtcatgtcacttgcactttcttgtttgttcaactcccggagtccatccccttgctctcctctgggctcaataagattagtcatatgtgccttgatagctgaattctgctatgtcaaatcagcaattcgtgtcatatatgtccgttcgttgtactaatgacatcacttgttctcagcagcatgcccatctcgcacagtactgggagctcttgcgtgagaatgtggggcttcgtcgactcgcttcgagtagttggaattgggaacttcggcagagtggcgctgtgagacggtttacacaaggagcctgagttttgttctccggatcttgctcccatgtgagagactgctccatctctgaggtgaagagacgattcatcttcactgtggaattgctgaatgtctgtgatcaataggtgaaggtcttctgcttcgcccaatccttgttccttctctaattatttcactacagactggaggaagtgggtggtacgcaggatcgtagtgacgaacagtctcgttctcaatacgtcctgatagaggagagatagtatttaagttgattttctacctgggtggcgctacacgacacaag

SEQ ID NO: 263813 - DNA, 1053 bp, Homo Sapiens
  misc_feature (33)..(33): n is a, c, g, or t
  misc_feature (58)..(58): n is a, c, g, or t
  misc_feature (634)..(634): n is a, c, g, or t
  misc_feature (907)..(915): n is a, c, g, or t
tgctttagtatgccacacttttagctgatattntgatatatagaataattaatatacnccagtggagaatattcaaagagtggctgaagggagaatacagagcccagtagggcccaaaatgaaacttctaggatgtcttctgaattttcagcacatggggggaataaagtgaacaaatttcccaacatcgtgcaatgctttatagcacaatgatctagatttcagactgtgttaaggttttttctttgttgatgttgttgttttaattctaatgtgcacggtgtgactggcagagtgagtttaaaagctttacgagtgattaattgcttggcaggcacccacgctatctgcatttccagaactttactgatgcatccatgtacatttccactgaggaattttggtgggtggggggaggttgtgctgcctcacaatgtcacgtgtattaaagtctaagcagtcacttctgattcacttgcactgtttgggaaatgtcaggtttacaaaaacatacatgtttggaataaaaaatggctgcaaacaattcagaagttcaatctgtaatttacttgctaataagaactttttaaagtgttgaagctagggtttcaatgtaatacaacatgagcattanagagaactcaaggtccatctaattcacatgaacaacccacctgatgtggctgaactgtctgcagtccttggcctccacacaagaggtaccaccctcctctctgcatcaccctgactcccctggccccggggctacaccctagggttcttgattcttgagaataaattgtgccccaaaattaaaatgggaatgggaatttccctttatttattcaggtaagaaactttcctttttccccatggtggcccttggcccagtttaacctaaagccannnnnnnnncccagaaagccattttttgaataaacaattttctttaaccccattttttaacaaaaaaatatgggaatttcccccccttaaagggtttttttcaactcctccccttttcaattctgggggccaaattaaaaaaagatt

SEQ ID NO: 263814 - DNA, 735 bp, Homo Sapiens
  misc_feature (443)..(474): n is a, c, g, or t
  misc_feature (534)..(534): n is a, c, g, or t
ggtgtctgtctattattcattcaactctttttacagacctcagtattagtctgtgactacaaaatattttatttgctttaaatttgctggctaccctagatgtgtttttattcctggtaaagacatttgtgattacattttcacacttaagattcaaaatttttcccaaatataaagaaaactaagacagactgtagatgcattttaaatatttaaatatgatcctcagacatgcagctgtgtgtggcagtattttagtaccgggttaagaaaactggcaactgggaagaagtggcctcaaaggcacttaatttgatttttattttttaaatgctgttcaaagttacagtttacgcagggacattcttgccgtattctcatggatcccaggataagtgtgtgttttatactgcaacaatatgcagcaatggtaagcgtaaagnnnnnnnnnnnnnnnnnnnnnnnnnnnnnnnnatattatgaagtcttttaacagtctctctttatataaatacacagaagtttggtatgatnatttaaatacatcatctggccagggcatgggtggcttacgccttgtaatcctagccacttttggggaggcccagaacggggcggaatcccctggaagggggagggaggttcaaagaaccaagccctggccccaaaaattaattggaaaaattccccgttcttctctacccaatttatatccccaaaaattttaagcccggg

SEQ ID NO: 263815 - DNA, 584 bp, Homo Sapiens
  misc_feature (40)..(40): n is a, c, g, or t
  misc_feature (48)..(48): n is a, c, g, or t
  misc_feature (538)..(538): n is a, c, g, or t
  misc_feature (540)..(540): n is a, c, g, or t
  misc_feature (543)..(544): n is a, c, g, or t
ccatccagggaaaaataaatttatttggcccaagatatanaaccaccnatccctggggccagagacccttaaatagaaaaacctaaagcctcgggccccttgttgaatcaacaaaagcatttaagcaaggattgccccaggaactaaagtaaggagacagactcatgtgaccaagacaggcaatggtccctaaacagcctgaggcaacacaacttcatgaggaaaggacttggtactggggagaccctggccctttatgaggcaggaagtaaagactgtggattcactgacactgattagcatgctggtccttcccagggtctcactgaattcctaggatctaggaattttcctgaggcagccccttcctgatctacttcagttacttctgctgagaaccagaaagaggttcagaaaccttcagaccaatagatttctcttaactgagacagagacttgtttagtttttttccacagacattaaaaacccagacagaatatgttccagaggattggaaaggctgtgtttctattagtnanacnnttcaggcctgccttaagaatcagttctaccacaaaagtgc

SEQ ID NO: 263816 - DNA, 1526 bp, Homo Sapiens
  misc_feature (271)..(271): n is a, c, g, or t
  misc_feature (273)..(274): n is a, c, g, or t
  misc_feature (507)..(593): n is a, c, g, or t
  misc_feature (1167)..(1284): n is a, c, g, or t
tcttcgaggaaacttccccattctggagatttggtttcagaaaagcgcttgcgggttaccccgcccggggggtttttttaattgggggagaattcccaggccactatgtccatggcccgggattttccctaggggaagcaggtattggcccaatgttccagtttaccttaacggggcccggcgcggccaaacgaaatggttctagaaaggttttttcgagggcccgaggcgggccggacaaggtttaatggggggggttggtcgtgtgatntnngtatgttaatgtaaaacttttatttgtaaaaaaaattaaaatatgtatttgaacagatttgtttaaccattattctcctgggcaatgtttataaaaagcacaaggtttctctttctccactttccatgtgggtattacaaaatgtttcaggaaatattagatgtaatataaagcaaaatgatgaatggttatttttaacattccaagtcctttacatattattttacagtgcnnnnnnnnnnnnnnnnnnnnnnnnnnnnnnnnnnnnnnnnnnnnnnnnnnnnnnnnnnnnnnnnnnnnnnnnnnnnnnnnnnnnnnntatttgcaaagaataaatgtatattaatgaatactaatatatttgcatgaaaatacagacttcatttaacttaatttgttcattatatcttaattaaaagaaatctggaaatataaaagaatgggggtattgaagttgcattctgagctatgatagagataagcatctaagaatttaaattttttaattcatttattttagaaatatgaagacaacagtgatccaacatatactatgaaaatggtttttactctgtcacaaacaattgtgtaaataggaaatgtaatattctcataacagatggttcaatcatcatgtattccaatttacaggggcaaaatgtgcagggaagccaggatttatgtaaatctagagttcaaagatacagatttttaatctgtaattaggaactaataagggcagcacaatgttgttcttaattccctggagaaagaaaacagactttatttacattttagaaaacttatttgtataaaattgatcttttagaaagagaactagttgagaagctaatcagtgtccttagatcattaaaagcacaatgcagctcatnnnnnnnnnnnnnnnnnnnnnnnnnnnnnnnnnnnnnnnnnnnnnnnnnnnnnnnnnnnnnnnnnnnnnnnnnnnnnnnnnnnnnnnnnnnnnnnnnnnnnnnnnnnnnnnnnnnnnngatacattgcagatgtagaaagaaaaatttaaccatgtaagcaagctagccaagaaataaattatatatgtccataaatgaagaaatgaataattagaagtgtgacagtgaacagaatcaagttcaactgcaagttattcctattattaaaaattttacaaatgagcctcataaaaataatgtagttggaaaatattaggtagttctaacttaccaattcaaaatattactgttacattctt

SEQ ID NO: 263817 - DNA, 1245 bp, Homo Sapiens; identical to SEQ ID NO: 4883
  misc_feature (494)..(494): n is a, c, g, or t
  misc_feature (505)..(513): n is a, c, g, or t
  misc_feature (526)..(526): n is a, c, g, or t
  misc_feature (529)..(530): n is a, c, g, or t
  misc_feature (532)..(532): n is a, c, g, or t
  misc_feature (534)..(534): n is a, c, g, or t
  misc_feature (537)..(555): n is a, c, g, or t
  misc_feature (647)..(659): n is a, c, g, or t
  misc_feature (729)..(743): n is a, c, g, or t
  misc_feature (794)..(802): n is a, c, g, or t
  misc_feature (853)..(865): n is a, c, g, or t
  misc_feature (1228)..(1228): n is a, c, g, or t

SEQ ID NO: 263818 - DNA, 972 bp, Homo Sapiens
  misc_feature (358)..(505): n is a, c, g, or t
  misc_feature (823)..(823): n is a, c, g, or t
  misc_feature (826)..(857): n is a, c, g, or t
  misc_feature (861)..(863): n is a, c, g, or t
  misc_feature (870)..(870): n is a, c, g, or t
  misc_feature (874)..(874): n is a, c, g, or t
  misc_feature (879)..(880): n is a, c, g, or t
  misc_feature (883)..(886): n is a, c, g, or t
actcgccgaaagtcgcaccgccaggtctgcgtgacaccctaaagcagtgttcagttaccccggggagagcgcgatgaacttgaaccacttgttggctggttcctgctcttgctcgttttttgcggatcgacacatagtgggcgctcaggaaaataaatgttggaagcttgagattgaacttgacagctcgaccctaggtacccgccacgaatccagcccagcccgcggggaaccgggtttctccagaccttcgcagggaacattttgcggatgggctggtagaggaggctcggacatcccagttccgcacccgcactcgaccaacgcgtggtagcggaacccctgtcgtagcgaggcnnnnnnnnnnnnnnnnnnnnnnnnnnnnnnnnnnnnnnnnnnnnnnnnnnnnnnnnnnnnnnnnnnnnnnnnnnnnnnnnnnnnnnnnnnnnnnnnnnnnnnnnnnnnnnnnnnnnnnnnnnnnnnnnnnnnnnnnnnnnnnnnnnnnaacaacgttcccaaaactctaaacttacaaatgttgtctcccgtccatcccataaacttaggcgacaaacctggcgcagggtgacctgagacaaaggcttcccggcccctgtctccaagtcgtccatccctggggcgtaggcacgttttagtgagccctgtccggcgaaacccgaaactgcggccaccttggcagcggtgggccccaaaaggaaatattcaaatattctgaaactcgtgcatgatttaggactgacatttttacgtttaattttcttgcagttttattcttgctagtaaaggtaattcgttagaaaanaannnnnnnnnnnnnnnnnnnnnnnnnnnnnnnntttnnnaaaaaanaaanaaaannaannnnaaaaatgtcgggccgcctcggccccccaaaacctttttaaaaccatccgtttggcccggcgggccccccttagtaaagggaactta

SEQ ID NO: 263819 - DNA, 829 bp, Homo Sapiens; identical to SEQ ID NO: 178589
  misc_feature (781)..(781): n is a, c, g, or t
  misc_feature (797)..(798): n is a, c, g, or t

SEQ ID NO: 263820 - DNA, 1075 bp, Homo Sapiens
aggtctattcttcagcagatcactgtggcccctcttggagctgggtgttttcaaattttcttgaaaagtgagttgtgtcacagaatgtggatagtgagatttgcttctgggcctgtggttggacgcccacagcttcctttggaggggcaagaagttggcctctcggttgacattccagagaaatggccagacttgcccctacccttttgcccctggtgtagctgcctcacatgaggttattgcaagagttccccttgcaataccctttgtgccctcaagaattaaaagcctctatgatccagagttgctatgcaccaaattttgatgccttctaaataccttgatgcctgtagcactagaaatgctttcctatttaaaataaacattaaattttaaaatagagctttgtatactatgtaaggcagttttatatcagctttgtaaaagctttgggtgttaagagtcaatattttttggctttgtagataaagacttaaatttttgtgcaacatagtggtgttaaagcacacatccattggactatgcaaatcaatttctactagcagcactgagcaactgggcacgtgctagtacgcaccccctcctactctaactgtgctagctcttgggttgaggaatggaatgggtagccttctgcttactggagatgcacagagaaaacatggctgaaaacagctttaaaaagaacatgtctttggggttcatgtgtggtgctgctgcccgggtgtaaactatccccacccagggccagccattatcaccagacctcttctggccctggctgtgaagccctgtttttggtattcagaatggatctttaaggctcagatgggctcaaattgaaaccttgtgttttataaaatggatgtttagtaaaggaactggttctcagttatgtttacagcacttggaattgtgtgttcttgtacattttgtattttaaaaccttttatgggagtgcagtgctccttacacaaatacaaagggaagaagagccagcatgttgaggctcctcagttttagtgctgaaataataaacagtgacaggtcaaca

SEQ ID NO: 263821 - DNA, 849 bp, Homo Sapiens; identical to SEQ ID NO: 97783
  misc_feature (526)..(526): n is a, c, g, or t
  misc_feature (779)..(779): n is a, c, g, or t

SEQ ID NO: 263822 - DNA, 992 bp, Homo Sapiens
tgtaccggtccggaattcccgggatatcgtcgacccacgcgtccgcgctccactggtcagctggggtcgctctcgggtggttgggtgttgcttgttcccgctgttccagcgtcgaagaaccattgggtctgccggtttgaacttgttctggaagctgtgcgtcaccgtaatgaggcttgtaattcttgataactatgacttggctagtgaatgggcagccaaatacatctgtaatcgcatcattcagttcaaacctggacaggacagatattttacactgggtttaccaacagggagtacacctttaggatgctataaaaaactaatagaatatcataagaatggacacctttcttttaaatatgtgaagacctttaatatggatgaatatgtaggacttccaagaaatcatcctgaaagctaccattcttatatgtggaataatttttttaagcatatcgatatagatcctaataatgcacatatccttgacgggaatgctgcagatttacaagcagaatgtgatgcttttgaaaacaaaataaaagaagctggaggaatagatctttttgtcggaggaattggtccagatggtcatatcgctttcaatgagcctggatccagtttagtgtcaaggacaagattaaagactctagcaatggatacatctggaaatgccaatatttgatggcgattattccagtgccactatggtctaactgtggtggtggcgcacgcgatggagcttaaaagtaatgatccctatacggggcccacaaggattgcctgttcagcatgaaaaggggtcaccctttgacggtccgttcagagatccggacattttgatgggagagccctaacaggaacgcgaacttcaaggcagcggtcccaccggtgcatatgtgtcgcgcggggaggcaacactctaagcgttaaaaattcggaaagcgcacaggggattacaccacaggctcctcctcctttcactctca

SEQ ID NO: 263823 - DNA, 596 bp, Homo Sapiens
gccttggaaagtaaacaagcgtgagccactaagcagcggccttgggtcacaatactaaaatacctactgctgagagggctgctgaccatttggtcaggattcctgttgcctttatatccaaaataaactcccctttcttgaaggttgtctgagtcttgggtctatgccttgaaaaaaagctgaattaattggacagtctcacctcctgccatagggtcctgaatgtttcagaccacaaggggctccacacctttgctgtgtgttctggggcaacctactaatcctctctgcaagtcggtctccttatccccccaaatggaaattgtatttgccttctccactttgggaggctcccacttcttgggagggttacattttttaagtcttaatcatttgtgacatatgtatctatacatccgtatcttttaatgatccgtgtgtaccatctttgtgattatttccttaatattttttctttaagtcagttcattttcgttgaaatacatttatttaaagaaaaatctttgttactctgtaaatgaaaaaacccattttcgctataaataaaaggtaactgtacaaaataagtacaatgc

SEQ ID NO: 263824 - DNA, 898 bp, Homo Sapiens; identical to SEQ ID NO: 4953
  misc_feature (361)..(369): n is a, c, g, or t
  misc_feature (411)..(426): n is a, c, g, or t
  misc_feature (571)..(737): n is a, c, g, or t

SEQ ID NO: 263825 - DNA, 921 bp, Homo Sapiens
gaggaggcttgcagtcgtggacctgagacctcgggaggtcatgctgtcttgcttttaagtggcttggggaaagtgaagaaaccccaaaatggaggactttgctaccaggacctacggcaccagtggcctggacaacagacctctgtttggggagacgtccgccaaggatcgaatcatcaatttagttgttggcagcttaacatccttattgattctagtaacgctgataagtgcttttgttttccctcaactacctccaaaaccgttgaatatattctttgctgtctgcatctctttgagtagtattactgcctgcatacttatctactggtatcgacaaggagacttagaaccgaaatttagaaagctaatttactatatcatattttctatcatcatgttgtgtatatgtgcaaacctgtacttccatgatgtgggaaggtgaggctgccaaggagaagtacttaccaggactcttcaaaatgatacattaggacagtgagtaatttttggataaggtatgctgaagaatctcctgcagaagtctgatacatgattttcatgttaattgtaaatgttaattccctcttgcaagggagacatatcctagatcactttgctttttctttaaggagctgatgttgcacctaaacattccaacccttaaagctaaaacagcacaaaaaaatttcacttttgaaatgaaatttttataattgtatggcaaaaggctatgtaaaaacaaatcttgcatcttaagacaaatattcttttatttctgttaaactgaatatacaattgttccctaggcaaccaacttttgcttataactacaatttaatttcacgttgacaaaacacagtgaaaagacaactttgtgaagatctaattacaataataaataaaataatttatacaagg

SEQ ID NO: 263826 - DNA, 866 bp, Homo Sapiens
  misc_feature (31)..(31): n is a, c, g, or t
  misc_feature (323)..(386): n is a, c, g, or t
  misc_feature (396)..(503): n is a, c, g, or t
cctccagatcgacaggcagtcccctggaagnccaggcccctttccctccaagcagcaagtagctgatgaagatgaaatatggaagcaaagacgaagacaacaatcagaaatttctgcagcagtagaacgtgctcgtaaacggcgtgaagaggaagagcgaagaatggaagaacaaaggaaggcagcttgtgcggagaaactgaaacgattggatgagaagcttggcatcctggaaaaacaaccatctccagaggaaattagggaaagggagcgagaaaaagaacgggagcgtgagaaagaacttgaaaaagaacaagaacagnnnnnnnnnnnnnnnnnnnnnnnnnnnnnnnnnnnnnnnnnnnnnnnnnnnnnnnnnnnnnnnnaaggagcagnnnnnnnnnnnnnnnnnnnnnnnnnnnnnnnnnnnnnnnnnnnnnnnnnnnnnnnnnnnnnnnnnnnnnnnnnnnnnnnnnnnnnnnnnnnnnnnnnnnnnnnnnnnngaatgtgagctggagaaggaaagggaaaaattagaggagaaaattgaacccagagaacctatttagagcccatggtagaaaaacaagaaagtgaaaacagctgtaataaagaggaggaacccgttttcactagacaagacagcaatcgcagtgaaaaggaagccacaccagtggtgcatgaaaccgaaccagaatcagggtctcaacctcggccggctgtattatctggctatttcaaacagtttcagaagtcttttactccaacgattccagcggcagcaggaaacagatgaaaccgccagcagtgggcagccacagccaacagcaaggttgtactttcccccgaactgttcccttccccaa

SEQ ID NO: 263827 - DNA, 920 bp, Homo Sapiens
ttaaatatctgtaatagtttattttaaagactttacatttacaagtagaaacaacatgtgttatctgtgggtaaggtagagcaggaactctaatccaagggtgggggagatcagttggttccttcacagaaaataagcctgttgtgtgggcatcttgcttgcctgtagatctttgttcccagttcaggaggtttttattcagtgcttgcttcatttactggaaaagttcactgggcccacctgtcaactccttcccccacagcttccagctcagcagcaaactgtagggaacagatttactccccagttcctactgtaaataatgctttaagaacagcattccttttggacagtatgtcatagacccaatttttaatactcccaagtcagatatctaactagagagtttaggaaatgtttggtatgatcaaacttttcccttcagtacacaatttaatttacgcagaagagcatcggagacatttgtctcatagatatgattgacatgagtgataggctaaaactaaaattttagtggtttgtggagtggctagaaaacatgaattgtaagcagtttttcagaatttaaaaatctcttagtttgaacagtagaagatgtaaataagcatagagactgttggcaagttatgtttatcacaaaacaaagaagaaggcacagagggtccctttgacccttgaacttgtggttactaatagtattaaggttggaaatcatgaggaaggacacagaacataaactgggatcttgaagacaggcatgttgataaaagtagccctgaagccttaatattagcaacatcgaagatgggaaagacaggattgatttatttgggaactaagtttacacattatatgtctcaatataaaacaaaagctatggctttagagtttaacaggtt

SEQ ID NO: 263828 - DNA, 448 bp, Homo Sapiens
  misc_feature (28)..(28): n is a, c, g, or t
accccaaacattcccccaaactcccccnagttagatatcctgacctgggaagtattaaaaaaattgggtcctatgaccatactgtccccaaaaggaatgcctgttccttaaaagcattatttaccagtagggaactggggagtaaatcctgttccccctacagtttgcctgctgagctggaagctgtgggggaaggagttgacaggtgggccccagtgaacttttcccagtaaatgaagcaagcactgaataaaaacctcctgaactgggaacaaagatctacaggcaagcaagatgcccacacaacaggcttattttctgtgaaggaaccaactgatctcccccacccttggattagagttcctgctctaccttacccacagataacacatgttgtttctacttgtaaatgtaaagtctttaaaataaactattacagatacttaaa

SEQ ID NO: 263829 - DNA, 838 bp, Homo Sapiens; identical to SEQ ID NO: 173883
  misc_feature (516)..(516): n is a, c, g, or t

SEQ ID NO: 263830 - DNA, 1229 bp, Homo Sapiens; identical to SEQ ID NO: 178595

SEQ ID NO: 263831 - DNA, 741 bp, Homo Sapiens
ggagggaggttaaacatgacaagttaacttagtttagacgtagcaccttagcagactttcctcggtccttaacatgtgttcttacagtataacttgcagtttcttgtatgtcaggtagctgttagggtcttgttctgtgaagatggcatggtgccctcagcctttgcatatactctctcagtattaactcccggtaaataataaccaaccaaccaaccaaacttccctctcccagcccccgaggctagaaaatcttgctgctccgtcttagcattccaagaaagtgcttccaggtatttagatagccctcagtcctcaaatattagactacgtgtaaaaccttgggtacctttagatccttgtaacactagtctgtactcccttttccttcccccaagactgataggatgcaagctgaggtcatggcacaggaatgacagacaccatttggggagtatccacagagtcaaaggaacactagaatccccacctcagcgtgaggataattgatttccagctgcaataagccgtgcctcattatagccacactgtggctagattatacttctttgggtgctgtgctaagaatgtcaatggaaaaaagccgatctcagattttggttggaagttaacatgcctgaaacagacatccctttcctctcacaagctgtgggacttagtagataaaatactgccttctgcctttgggaccatgattaaaaacaaagacaaaaaccaaaa

SEQ ID NO: 263832 - DNA, 523 bp, Homo Sapiens
  misc_feature (27)..(27): n is a, c, g, or t
  misc_feature (38)..(38): n is a, c, g, or t
tggctgcccccggccttagcatccccnaagaaagtgcntcccccggtatttagatagccccctcaggtcctcaaaaaattaagcccacgtgtaaaaacctgggggtaccctttaaaattccttgtaaacacctagcctgtactccccttttcccttccccccaagactgataggatgcaagctgagggtcatggcacaggaatgacagacacccatttggggagtatcccacagagtcaaaggaacacctagaatcccccaccctcagccgtgaggataattgatttcccagctgcaataagccgtgcctcattaattacacactgtggctagattatacttctttgggtgctgtgctaagaatgtcaatggaaaaagccgatctcagattttgtttgaagttaacatgcctgacacagacatcctttcctctcacaagctgtgtgacttagtagataaaatactgccttctgcctttgggaccatgattaaaaacaaagacaaaaaccaaaagtttgggata

SEQ ID NO: 263833 - DNA, 425 bp, Homo Sapiens
  misc_feature (361)..(361): n is a, c, g, or t
  misc_feature (381)..(381): n is a, c, g, or t
  misc_feature (405)..(405): n is a, c, g, or t
  misc_feature (414)..(414): n is a, c, g, or t
caaacgcttgcaatgcagttatacagaagccaggcaaaaagctgtcagatctggaaagagttacctccctgaaagtatataattggtttgctaacagaaggaaggagatcaagaggagagccaatattgaagcagcaatcctggagagtcatgggatagatgtgcagagtccaggaggccactcaaacagtgatgatgtcgacgggaatgactactctgagcagactgataggatgcaagctgaggtcgtggcacaggaatgacagacaccatttggggagtatccacagagtcaaaggaacactaggaatccccaccttcagcgtgagggataattgatttccagctgcaataagccgtnctcattatagccacactgtntatgattatctctttgggtctgtntaagaatgncaatggaaaaa

SEQ ID NO: 263834 - DNA, 447 bp, Homo Sapiens
gcagcaatcctggagagtcatgggatagatgtgcagagtccaggaggcccacttcaaacagtgatgatgtcgacgggaatgacctactctgagccagactgataggatgcaagctgaggtccgtggcacaggaatgacagacacccatttggggagtatccacagagtcaaaggaacactagaatccccacctcagcgtgaggataattgatttccagctgcaataagccgtgcctccattaataacacactgtggctagattatacttctttgggtgctgtgctaagaatgtcaatggaaaaagccgatctcagattttgtttgaagttaacatgcctgacacagacatcctttcctctcacaagctgtgtgaccttagtagataaaatactgccttctgcctttgggaccatgattaaaaacaaagacaaaaaccaaaagtcatt

SEQ ID NO: 263835 - DNA, 1046 bp, Homo Sapiens
  misc_feature (615)..(615): n is a, c, g, or t
  misc_feature (903)..(903): n is a, c, g, or t
ccactcaaacagtgatgatgtcgacgggaatgactactctgagcaggatgacagtacgagccatagtgaccaccaagaccccatctcattagctgtggaaatggcagcagtcaaccacactatcttggcattggcccgacaaggagccaacgaaatcaagacagaggccctggatgatgactgatcagggaggttaaacatgacaagttaacttagtttagacgtagcaccttagcagactttcctcggtccttaacatgtgttcttacagtataacttgcagtttcttgtatgtcaggtagctgttagggtcttgttctgtgaagatggcatggtgccctcagcctttgcatatactctctcagtattaactcccagtaaataataaaccaaccaaccaaccaaacttccctctcccagcccccgaggctagaaaatcttgctgctccgtcttagcattccaagaaagtgcttccaggtatttagatagccctcagttctcaaatattaggactacgtgttaaaatcttggggtacctttagattcttgttaacattagtctgtaattcctttttccttccccaagactggataggatgcaagctgaggtcatnggcacaggaatgacagacaccatttggggagtatccacagagtcaaaggaacactagaatccccacctcagcgtgaggattcctagtgttccctttagattcttgtaacactagtctgtactccccttttcccttcccccaagactgataggatgcaagctgaggtcatggcacaggaatgacagacacccatttggggagtatcccacagagtcaaaggaacactagaatcccccacctcagcgtgaggataattgatttccagctgcaataagccgtgcctcattnaatacgacactgtggctagattatacttctttgggtgctgtgctaagaatgtcaatggaaaaagccgatctcagattttgtttgaagttaacatgcctgacacagacatcctttcctctcacaagctgtgtgacttagtagat

SEQ ID NO: 263836 - DNA, 626 bp, Homo Sapiens
  misc_feature (355)..(468): n is a, c, g, or t
  misc_feature (514)..(522): n is a, c, g, or t
ggtgccttgaaacagcacaatgaagtgtatcagtatattctgtgattatgaaacttatatgttgtgttgttttgtgtcttctgttgcctgtcctttgggccagatgtggcccagttaaatgcagttatcatctcattaaatacagatgcagataaaatatctttagtgctgcaacattttacctaactttttgtatgttttcatgactgtgtgttattttccaaagctgttcctacctcaccatgaggctttatggattgttatgtattataaatgttctatatgagacagactactgtgtttcttctcatttattaaaagttaagtagaaaaataaactaattttaatatctannnnnnnnnnnnnnnnnnnnnnnnnnnnnnnnnnnnnnnnnnnnnnnnnnnnnnnnnnnnnnnnnnnnnnnnnnnnnnnnnnnnnnnnnnnnnnnnnnnnnnnnnnnnnnnnnnttgggggggcccccctcgccccccaaaaaaattttttataaacccnnnnnnnnngggcggggggccgcccctgggggaaagggaaactggggccaaaggctgtttcccccagagaaaaccccggggacataaaaaagggggctgggattcccccccac

SEQ ID NO: 263837 - DNA, 479 bp, Homo Sapiens
tttagagatccctttataaaagctctgggggctgagcccctgagaattcagtgacaacaggacccaacctgcgctgcctttgactacaagtgggccgtgcagctggttcctctcgagcgagtgtccctaaataggagtttacaagatgtctgggggtaaaagcactgtgcttttcagtggtggctgcgtgaaagggagcgacactcagctgtgtgttcctgggcttgtgtggtacttagaacctcagttctattacgttatagtcagacatttttttgacagtatgagacagactgcaggatgaaaatatttgtcaaaatcttaactgaatgtttactggaagtacttgagattccatttgagagttgtattgttaataatttcatgtcagtgaactgatatctgatgtttatgatatggtgtctttttcttgaaacaagcttccaagggctagaaataaaatagccaaaaaatgctgg

SEQ ID NO: 263838 - DNA, 553 bp, Homo Sapiens
  misc_feature (198)..(492): n is a, c, g, or t
gtgtgcccgggcagatttcacataattttaatgatcaaattacccaatcagtaaaccacaaaatcctacttaggaaaagggtctataatatttattttgaatatggaaccatagttctttttccctaggttgagaaaacttgagcaaaattagttttatttaggcctgtggtttaaaaatattgagatacaagagtannnnnnnnnnnnnnnnnnnnnnnnnnnnnnnnnnnnnnnnnnnnnnnnnnnnnnnnnnnnnnnnnnnnnnnnnnnnnnnnnnnnnnnnnnnnnnnnnnnnnnnnnnnnnnnnnnnnnnnnnnnnnnnnnnnnnnnnnnnnnnnnnnnnnnnnnnnnnnnnnnnnnnnnnnnnnnnnnnnnnnnnnnnnnnnnnnnnnnnnnnnnnnnnnnnnnnnnnnnnnnnnnnnnnnnnnnnnnnnnnnnnnnnnnnnnnnnnnnnnnnnnnnnnnnnnnnnnnnnnnnnnnnnnnnnnnnnaatacaagagatttttaaagaagttttcaaactattcaggttacagacacaaatttatacc

SEQ ID NO: 263839 - DNA, 951 bp, Homo Sapiens
  misc_feature (609)..(609): n is a, c, g, or t
  misc_feature (660)..(660): n is a, c, g, or t
  misc_feature (678)..(678): n is a, c, g, or t
  misc_feature (733)..(733): n is a, c, g, or t
  misc_feature (845)..(845): n is a, c, g, or t
ttgttttagcgctgggtttcccaaggtgggagagacagacccagcctggagctggcccctggcctgtgtgctgacttcttggggtcctcaaaccactgtatttttctgttgagcctgtacttggggagagatcagtagcatttgaggaagtaagagaaaagaatcatggtacctcagggtttctttccctttactcgctggcagccattgtctgtgggcacctcatgtttttccacactctactgggccgtggaggtaacgataacccaggccagtctcctctgcctggggatgcgccctcttgagagggaggccttagcagggcaggctccctctgggcatccctggatgcagcctctggacacatgcctcctttaaagtgtccgggtgcagctcaggttgagtggaggtagaaggagaaacagacatgtttaccacgcgttttccaaagctcctgatctttccaaggatgtaaactgaaactgctgtctcttgttttgttcgttttgggggtagttgtgctggctggccatgcttgtgaagtgatgtgtgtctctgatttacggattcactgtttctctgctaattgagagagcgtatttacgatanttattggtttgaccaagtgcttcagtgtgtatcctagctaatgctctaaangtataaccgtcaacgtantggccgataaacttttttttaagctagtatgcatatgagcgtttaccaaaaaaanagaaaaaggtctaatagggcggaattatccttgtgggtattacctgcagcgcggttaacggcgggaacacgggcgactattgtgggacctctccgcggttagaaggccggtngcctcgggaccctcggagagccgcggcggtgtcggaaccaccctttttttcttccggcagaaggtttaccacagaggggcgcgtgtacccactgttagaaacggct

SEQ ID NO: 263840 - DNA, 943 bp, Homo Sapiens
ggaaaaatggggggtttttttcctaaagccctttttccattcccctgaaaacctttgtggaaagggggttccccccgggtttttttgaaggaaccaccccccactacccaggggttccaactggcaatttctttgccaaacactttggaatcaacacaaagggcttcaagggctgcctgcagaaatgggtagactgatgtaaaaagaaatcacaggacaatctgaattctggaacgtgaaagaaacctctttgaaaggatgggaggtagggcaggtgcgaagacgtgaagtgtaaagcaaaaaagaatgtgaaaggaggaaaagccgaaatgcaatctacagtgcgaatgttatttcagaggaggcagaactctctggcaatgtataaaactcgtcatactacgaccatatttggtcgtgcaaagtatataaaatcattagcttcctctaggttttcactttagcataaccataatttacattttaaaacaattaaaaaacacagcttgcatatcactcatattctacaaggtatcacagttgctgtcgtatccccacatacacaactgaataggctttgaaatctttccagcacttctccaaaccagaaatctggtagctgaggaagttccaatatggagaaattgaaatggattaattttaatcagctccattgcatgtaagggaatattacttatgaaatataccatcataaaataagatgaacaggtctgaaacacatggagacatggccgactcactgacacacctttcaaacactaagaaatgggactacaatgttttatttattaaaatataaaaggttaaaaagtttccgccatagttaaggctttctagaggggaaaaatttaatttattaatggcagagtgcacaagttgctgaagaagcctcatgttctagaatagtagttttcgagtgcat

SEQ ID NO: 263841 - DNA, 544 bp, Homo Sapiens
ggggcgtgcgcagatcagggatcgcgattgcgaatcctccgctgaggtgatttggatatccctagaacgttgagggcacgagtcgggtcctgagaccaggtcctcagccagcagagccacgttccttatgagcaccgtgggtttatttcattttcctacaccactgacccgaatatgcccggcgccatggggactccggctttgggagaagctgacgttgttatccccaggaatagctgtcactccggtccagatggcaggcaagaaggactaccctgcactgctttccttggatgagaatgaactcgaagagcagtttgtgaaaggacacggtccagggggccaggcaaccaacaaaaccagcaactgcgtggtgctgaagcacatcccctcaggcatcgttgtaaagtgccatcagacaagatcagttgatcagaacagaaagctagctcggaaaatcctacaagagaaagtagatgttttctacaatggtgaaaacagtcctgttcacaaagaaaaacgagaagcggcgaagaaaaaacaa

SEQ ID NO: 263842 - DNA, 1342 bp, Homo Sapiens
  misc_feature (21)..(21): n is a, c, g, or t
  misc_feature (159)..(159): n is a, c, g, or t
  misc_feature (204)..(204): n is a, c, g, or t
  misc_feature (648)..(715): n is a, c, g, or t
  misc_feature (719)..(720): n is a, c, g, or t
  misc_feature (724)..(808): n is a, c, g, or t
  misc_feature (833)..(833): n is a, c, g, or t
tgtataccaagcctataaaangtgggattgggtttctaccatccaggtagtaaaaaggttctgcaagagtgtaacccggtaagcattaaaagaagaaaggcaagtctcgttggaaaacccttgggcatcttgagaagagttatgagacagcccaccagnaatattgcaaaggctagcagcaaacaaggccgattgccccacagnaaatgcttcaaatgcagcaagctgcccacaaaggcccagctgctgctgcttcagccagtgcatctaatcagcggggatctttctcagatgaagaagatgatgatgatatctgaaattcaccagctgagtttctatttcttctataaatgtttttccctgcacaacaaaaacagtgaaagaaatgcttatctgtaattttgtatgcatcttggtggacttgtcattggtattctagagatgtctgctattaagtttcatctattgtgtgctatacatgtaaaaactgtctctttgaactattgaaaatttaaggttcagtataatatcaattttgaatttttaatggtgtttatgaaattttagatagcagcaagtccttcgtttgatcaataaacagtgttacagataacttcaagtttataaaaatacagtgaaatttctacnnnnnnnnnnnnnnnnnnnnnnnnnnnnnnnnnnnnnnnnnnnnnnnnnnnnnnnnnnnnnnnnnnnngaannaagnnnnnnnnnnnnnnnnnnnnnnnnnnnnnnnnnnnnnnnnnnnnnnnnnnnnnnnnnnnnnnnnnnnnnnnnnnnnnnnnnnnnncggtgaagagagcaggggcaagagntggaagggtggatcttggtgactttccgtgacccacaagcggccctgctctggaatttttcttttctgcgcccgccgccctcacctcttttctctccgttctccgcggacacgccggctagctaacatatacccataagaaaagaaagcgctcgtttactacgtgccggcgcgcccgcgtcacccccctctccggcgctcctcccaacaccctcccgtcccatcgtgtctccaacatcaatacctcggctcaagacgactaaactacacgatgcgcagatctaccccttctcctccgaggtgataggtgtgagcaaaatcccttcgcatcatccccttctcctcgcgtgctccggcaaaatagcgttactaccacctcccgaggggcgcccgtctctgccccccacgaggccatatcgactaccctacccgtgacaagacctacaacacgcgggttgtgcgtgcacactacctacccggtagaaacgacctttatattaattcaaccac

SEQ ID NO: 263843 - DNA, 474 bp, Homo Sapiens
tcccggagtgatcctggcagccggtggggaagacaaggagggctgagggtaaaaagctgggattggtaggctgggtccagaacactgaccggggcacagtgcaaggacaattgcaaggtcccatctccaaggtgcgtcatatgcaggaatggcttgaaacaagaggaagtcctaaatcacacatcgacaaagcaaacttcaacaatgaaaaagtcatcttgaagttggattactcagacttccaaattgtaaaataatggcctgaatttaagttttctaagataaactcagtggtttggtttttattattaatagagatagaactattgtgtgttaatattagcattagtcaataagttattttaatgtcagatttttgaatgttattatatattacctgtatgatggaaggattaccactgtacacaaatctaatcaataaaaacgttagaaccttctgcttagagtactttt

SEQ ID NO: 263844 - DNA, 223 bp, Homo Sapiens
  misc_feature (88)..(110): n is a, c, g, or t
aaaaacacatcgtgggttttttgaggctccaacctgattagtgcatggtcagccctcaatgaaggctgaggcatctctgactgaggtnnnnnnnnnnnnnnnnnnnnnnnaaaatcatgtatttgctacaaagtattgtacttgtctcaatgggaatggtgtaaaaaacaaaagcccttatgtgatctgtatcatagttaacaaatgaatcttgtaaaaaacc

SEQ ID NO: 263845 - DNA, 1106 bp, Homo Sapiens
  misc_feature (92)..(92): n is a, c, g, or t
agtgattcagggattggatgagtctctatggtttgttttgccctgaagagcagaaggcttctgtcccaactggtgttgccaaagcaacatanttaattccatgccatgatcctgggtcaagatctgcacaatctgattgggcatgtcacctcggatggcaagggagtggaagtggtcaaaatcatggagtcccagctttcggagacgccttgcagctgcccggtaacacttccagggttggggctccacaaggaggtagtggcagagggaggaaagatgggccaggaactcccataggccatggtctccatgattcagatgaatccacatggttattgacatgcagaagccaatgtcaaaaactgaacgtccaaattggcttaagaaagagctcaagagaaccttccgggtcctttgattcatgaagtccagggtgataaaagtcaaggcatcaggaaaaggacattctttttcggctcgcttcaccaggactggatctatgtcgcagcagaggagacggaattctcttgaggcatctgagcaggtttccccgtcaggtagggagaggaagtgtttgtatagagccacactcagatcctagaggaatccaaaacagctttgtcactgcagttctcaatcagtgaatggaagagaaatctgtatcattctcccactgagaatgccacttacctctggctgtataggatgtgaggttcctaaaccataacctaaagaggttgtgcaaaaattttctacagagtaggctctcagtgccctccaggggtcacatgctgtaatgcatcatcccccatattttccctgacactgatgatagattgggttgtatagctgaaagttacagccaaatggatgcagcaaaggaacctacagcagtatttcccagcttaagtaatatgctgataaactcactctttttctgggtatctcaagaccccagggcggaagaaaggggtccagaggcataaccagtgtctcttaccaggaaagtgaggaatacagcaagcacaatcttacaaaaacctgcttctcagacccgcggtgggggaagtctggattccaaagtcctcattcagccttcactaaag

SEQ ID NO: 263846 - DNA, 859 bp, Homo Sapiens
  misc_feature (253)..(449): n is a, c, g, or t
ggacagacaggcttttttattacggtactgatatattgaccttaaacttgctgaggaactgaactaacgtcctccagtgaccgtggaattccatctcagctccaggaacatgcagatacctgcaaagagacacgcatatatgctggcatacatgtgcatttggtgttgggaagttgactatctggtctatcttaataaaatggtaaaaagcacaccaagacaatgatgggggcaggaggatgtttttgaaaannnnnnnnnnnnnnnnnnnnnnnnnnnnnnnnnnnnnnnnnnnnnnnnnnnnnnnnnnnnnnnnnnnnnnnnnnnnnnnnnnnnnnnnnnnnnnnnnnnnnnnnnnnnnnnnnnnnnnnnnnnnnnnnnnnnnnnnnnnnnnnnnnnnnnnnnnnnnnnnnnnnnnnnnnnnnnnnnnnnnnnnnnnnnnnnnnnnntgcagtgtagaaacttgatcgttggttttcttttaatgcaaaactctcataaaaacctttcacttttcctgtcattgattatatgcttgatacgcccaaaagaaaaggggaggggcaccaattcacctacactccagtggctccatcacctttaaaatatttataaaatagttccaaaaatctgatatctgaaaagcaatccaagcctgtgtaaatgggaatcactgataagtatcatcatctgtatcagcttggcttggacatgaaaaattgattctctttatgtcactccttgcacctggacaaattcaatccccggtacttaagtcacactgccaaccctcggccctgactattgtcttgattgctgttcctttctggttcaacataaaatcatttttgtggcacgc

SEQ ID NO: 263847 - DNA, 753 bp, Homo Sapiens
tggctgaattttctgccctgagatctgggcataaagtggatgaaacttgaaagaccttcagtgtagatccagatgcccaacctgtccttgttaagttacttgcttcttgggaatcagtgtcccctgctgagctgaaaaggaaatggattccaatctcttccaacctttaaggtgatagatagtttgagcaagactggagaatggacaacactatgaagctgtggctagaaagggactgtcatgtcccatcctttggccagattgactggggatgtccggacagatgcctgcatgggtggtgagggccacatctgcacacgagccagtggctgcttgcagttcactgctgtgatgccagagtgtgttcaaaggtgactctcctgctcttctggactcttctctcaggcaagaaaggctgcaggctgcctgctatgtgatgcctgagcacaaagccaaggaactgaactaagtctttctgttaagtcctgagtttgtcattggcaggtttacttgtggccagctctctctgcccttgggtgtctgagcaggcagaccagaagaccaggcactggacctgcatgccaaagggactggtcatctcctgaggacctgtacatgaccctgtggactgttccgcacgatccggaacccactttttattcactccccatgtctttggccttcctcttctttctctttccctctgccatcctgacactgatagtttgtcatataaattccccggggttgggg

SEQ ID NO: 263848 - DNA, 877 bp, Homo Sapiens
  misc_feature (41)..(56): n is a, c, g, or t
  misc_feature (69)..(228): n is a, c, g, or t
  misc_feature (511)..(615): n is a, c, g, or t
  misc_feature (865)..(865): n is a, c, g, or t
gggggggcgggcccccaaaaaagggttttaaaaattttttnnnnnnnnnnnnnnnncaaaattaaggannnnnnnnnnnnnnnnnnnnnnnnnnnnnnnnnnnnnnnnnnnnnnnnnnnnnnnnnnnnnnnnnnnnnnnnnnnnnnnnnnnnnnnnnnnnnnnnnnnnnnnnnnnnnnnnnnnnnnnnnnnnnnnnnnnnnnnnnnnnnnnnnnnnnnnnnnnnnnnncaattcccaaccccagaccccaaccttgctttattttctccacgggtttaccagcactgacacactgcatattttcatttattttgtttactatctagtcaatgtaaacttcacaagagcaggaatgattctgtcccttttgttataaagtatccccgggacctcataacagtgcctggcatgtactaggggttcaataagtgtttgctaataaagagatgctgagtgcatgaggccccaagtgggctgcatcacatcccccagggaaacgctgctcacaccnnnnnnnnnnnnnnnnnnnnnnnnnnnnnnnnnnnnnnnnnnnnnnnnnnnnnnnnnnnnnnnnnnnnnnnnnnnnnnnnnnnnnnnnnnnnnnnnnnnnnnnnntgtgtgctttcctctctccaagcacacagcactgggagagtcttgtctccaaggcaggctgcatgagatcagacagggagagagcccttttttttgcatctgtctgtataccacaatatggcttaggaaggtcttggtggttaacaaggctcccaaataggacccagaacacaggtgctcaataaacatctggatggatagatggatggatggatatgaatgaatggatggctgatggatagaaaatagnactgtgccgaag

SEQ ID NO: 263849 - DNA, 525 bp, Homo Sapiens
  misc_feature (11)..(11): n is a, c, g, or t
  misc_feature (32)..(32): n is a, c, g, or t
  misc_feature (49)..(49): n is a, c, g, or t
  misc_feature (59)..(59): n is a, c, g, or t
  misc_feature (73)..(73): n is a, c, g, or t
  misc_feature (102)..(102): n is a, c, g, or t
  misc_feature (108)..(116): n is a, c, g, or t
  misc_feature (235)..(235): n is a, c, g, or t
  misc_feature (374)..(445): n is a, c, g, or t
acccacccagntggttatttgaagacctgtgntctgggccctatttggnaaccttgttncccaccaagacctncctaagccatattgtggtatacaggacangatacnnnnnnnnnggctctcgtccctgtctgatctcatgcagcctgccttggagacaagactctccccagtgctgtgtgcttggagagaggaaagcacacagcccctggagtcagagaccctgggtttcaantctgtctcccacctcttattagctagctatggactcctctctgagcctcgattacctcatctgtgaaatggggtaatggtgtgagcagcgtttccctgggggatgtgatgcaggccacttggggcctcatgcactcagnnnnnnnnnnnnnnnnnnnnnnnnnnnnnnnnnnnnnnnnnnnnnnnnnnnnnnnnnnnnnnnnnnnnnnnntttataacaaaagggacagaagcattcctgctcttgtgaagtttacattgactagatagtaaacaaaataaatgaaatat

SEQ ID NO: 263850 - DNA, 1000 bp, Homo Sapiens
  misc_feature (726)..(727): n is a, c, g, or t
  misc_feature (732)..(734): n is a, c, g, or t
  misc_feature (788)..(797): n is a, c, g, or t
  misc_feature (903)..(903): n is a, c, g, or t
gcctccttccctcagggggggcaagagctcctggagttgctgctgagagttcagggtgggggtcgaatggagaagcaaaggtcccgcccccccacacacacctgctgagacttgagccccaaccagcccttccttgccactggtctcaaagctgggcagcccattgcatgccctcaactcttgcttggcaggggtaccagagactgaaagacacggcacaaatctcaatattcatctcccacatcaccttccctgggaactggacagggtgaaagtcctcaaactctgggaacaggcgagatggaacagggatttaactccccgcccacaggtccatgggagcttgaggcagtaagggggatcccaggcacccatctcaaggagtggctgggagtcttttccctaacttgtggggacaccaccagttgtcaagctactaggcagtagggtctgagggctcaggcctccacctgagaggttataacctgagagacagctctacccttcctcccagtaagaagggaaggtgggtgggcacctgagagattaagactattctcccagtcccactaccagcacccccgatccctgagactgaggggtttacgggctgtgaatggaccttcagccctgcccaccctccctccccactgctgctgagtctgtctgatgttttggttgtgtgaataaatataattcccctctagaaaataaaaaagcaaaganntgggnnncgctgggcgggccgcgctcgggccctcggaaagctttctaacaccgttcgcttnnnnnnnnnncccccaagggggaagcggaacgcggtcctagcgtgcgtcgtcggccggttctgggtccctgacgtggtcgcttcgcatcggtcgccctacggccagtgccggcgcncgggcgcacgcggacttggcgtgggccgcccggcaggtggcgttcgccgggcccgtttccccgagcccctcgccgccgccgggccagcgagcgctgt

SEQ ID NO: 263851 - DNA, 775 bp, Homo Sapiens
ggggaaaaaagcggcggcagcggctctagcggcagtagcagcagcgccgggtcccgtgcggaggtgctcctcgcagagttgtttctcgagcagcggcagttctcactacagcgccaggacgagtccggttcgtgttcgtccgcggagatctctctcatctcgctcggctgcgggaaatcgggctgaagcgactgagtccgcgatggagagagaaaaggaacagttccgtaagctctttattggtggcttaagctttgaaaccacagaagaaagtttgaggaactactacgaacaatggggaaagcttacagactgtgtggtaatgagggatcctgcaagcaaaagatcaagaggatttggttttgtaactttttcatccatggctgaggttgatgctgccatggctgcaagacctcattcaattgatgggagagtagttgagccaaaacgtgctgtagcaagagaggaatctggaaaaccaggggctcatgtaactgtgaagaagctgtttgttggcggaattaaagaagatactgaaggacatcaccttagagattactttgaggaatatggaaaaattgataccattgagataattactgataggcagtctggaaagaaaagaggctttggctttgttaccttttgatgaccagtgatcctgtgggataaaatccgtattggcagaaatacccataaccatcaatgggtccttaatggcagaaagtaagaaaaggcgtttgtcctagaacaagaaatggcagggaaggttcct

SEQ ID NO: 263852 - DNA, 902 bp, Homo Sapiens
  misc_feature (792)..(792): n is a, c, g, or t
  misc_feature (837)..(837): n is a, c, g, or t
  misc_feature (859)..(859): n is a, c, g, or t
  misc_feature (870)..(870): n is a, c, g, or t
  misc_feature (878)..(878): n is a, c, g, or t
ggggtcctcctctgagaggtagaggaaaaggcagggggcgaataagatctgaagatgaagaggacctgggaaatgcaaggccatcagcaccaagcacattatttgatttcttggaatctaaaatgggaactttgaatgtggaagaacctaaatcacagccacagcagcttcatcagggacaatacagatcatcaaatactgagcaaaatggagtaaaagataatcatctgagacatcctcctcgaaatgataccaggcagccaagaaatgaaaaaccgcctcgttttcaaagagactcccaaaattcaaagtcagttttagaaggcagtggattacctagaaatagaggttctgaaagaccaagtacttcttcagtatctgaagtatgggctgaagacagaatcaaatgtgatagaccgtattctagatatgacagaactaaagatacttcatatcctttaggttctcagcatagtgatggtgcttttaaaaaaagagataactctatgcaaagcagatcaggaaaaggtccctcctttgcagaggcaaaagaaaatccacttcctcaaggatctgtagattataataatcaaaaacgtggaaaaagagaaagccaaacatctattccctgattatttttatgacaggaaatcacaaacaataaataatgaagcctttcagtggtataaaaattgaaaaacatttctaatgtaaatactggattatcagaaatccagttccgaagtaatagtttcattggtgttccaatggagaagtagaaatgccactganaggaagaccgaataggacctattaagccagcaggacctgtcaccngctgtaccctgtgatgataagntattttaccantagtgggncccaacgaagatctggggccattt

SEQ ID NO: 263853 - DNA, 507 bp, Homo Sapiens
ctccaacgtgacatcatgctttctggaaacttccccgtatgtcccactttcccacacttggtgccctggagcaccttccggcctctacatgctgtacgttcccctgtgagcaccctcctctcggcctctggccaacacagtcccacccatctgtgggtaacaagggggtgtgggtgttcttttcagccttgctaaactgtctgaatcaaggatcacaaactacagcctgcaggccaaagccagcccacagcctgtgtttgtaaataaagctttattggaacaaagccacaccccttaatctacagatgatctgtggctactttcacaccacaacagagtaccatggttctgacagagactgggggaccctgtctaaatgacttctgacctggacctttactgaaaatcctcccaatcattctgttggcaagaatgatgtattacttttagcaataagaaacaagtaacctttgatctgaggacattactggatctaaaaaaacttgt

SEQ ID NO: 263854 - DNA, 502 bp, Homo Sapiens
gggagcctcagcttccagggcactgtgggcctgttggtctactagggccctgatgtccacctggccttcctgttcttcactcccttcagccacacgcttcatggccttgagttcaccttggctgtcctaacagggccaatcaccagtgaccagctagactgtgattttgaatagccgtcattccagaagaagccgtcccaaggagctgaagggtggtgaaatttgtccctgcaggtccctcgggagatccctggagctggagcatgagtgtctgacaatcagaagcatcatgtccaatgtccagatggccagaatgaatgtgatagttcagaccaatgccttccactgctcctttatgactgcacttctagccagtactctgcacaagttagctctgtagaagtaagaacttgggcttaaatcatgggctatctctccacagccaagtggagctctgagaatacaacaagtgctcaataaatgcttgctgattgactgatgg

SEQ ID NO: 263855 - DNA, 1007 bp, Homo Sapiens
atggtatctccatgcagtagctaatccagggttgatttctttgactggtccttacttagatgttggaggagctggttatgttgtgacaatcagtcacacaattcattcatccagtacacagctgtcttctgggcacactgtggctgtgatgggcattgacttcacactcagatacttctacaaagttctgatggacctattacctgtctgtaaccaagatggtggcaacaaaataaggtgcttcataatggaggacaggggttatctggtggcgcacccgactctcatcgaccccaaaggacatgcacctgtggagcagcagcacatcacccacaaggagcccctggtagcaaatgatatcctcaaccaccccaactttgtaaagaaaaacctgtgcaacagcttcagtgacagaacggtccagaggttttataaattcaacaccagccttgcgggggatttgacgaaccttgtgcatggcagccactgttccaaatacagattagcaaggatcccaggaaccaacgcgtttgttggcattgtcaacgaaacctgcgactctcttgccttctgtgcctgcagcatggtggaccgactctgtctcaactgtcaccgaatggaacaaaatgaatgtgaatgtccttgtgagtgccctctagaggtcaatgagtgcactggcaacctcaccaatgcagagaaccgaaaccccagctgcgaggtccaccaggagccggtgacatacacagctattgaccctggcctgcaagatgctcttcaccagtgtgtcaacagcaggtgcagtcagaggctggaaagtggggactgttttggggtgctggattgtgaatggtgcatggtggacagtgatggaaagactcacctggacaaaacctactgtgccccccagaaagaatgcttccgggggggattgtggggagccaaaagtcccctaccgttggatgacatggggagccaataagggggattgaaggggaatccccttttaa

SEQ ID NO: 263856 - DNA, 1286 bp, Homo Sapiens
  misc_feature (1176)..(1235): n is a, c, g, or t
ggggctttggtcttcaagtagccaaaggcatgaaatatcttgcaagcaaaaagtttgtccacagagacttggctgcaagaaactgtatgctggatgaaaaattcacagtcaaggttgctgattttggtcttgccagagacatgtatgataaagaatactatagtgtacacaacaaaacaggtgcaaagctgccagtgaagtggatggctttggaaagtctgcaaactcaaaagtttaccaccaagtcagatgtgtggtcctttggcgtgctcctctgggagctgatgacaagaggagccccaccttatcctgacgtaaacacctttgatataactgtttacttgttgcaagggagaagactcctacaacccgaatactgcccagaccccttatatgaagtaatgctaaaatgctggcaccctaaagccgaaatgcgcccatccttttctgaactggtgtcccggatatcagcgatcttctctactttcattggggagcactatgtccatgtgaacgctacttatgtgaacgtaaaatgtgtcgctccgtatccttctctgttgtcatcagaagataacgctgatgatgaggtggacacacgaccagcctccttctgggagacatcatagtgctagtactatgtcaaagcaacagtccacactttgtccaatggttttttcactgcctgacctttaaaaggccatcgatattctttgctcttgccaaaattgcactattataggacttgtattgttatttaaattactggattctaaggaatttcttatctgacagagcatcagaaccagaggcttggtcccacaggccacggaccaatggcctgcagccgtgacaacactcctgtcatactggagtccaaaacttgaattctgggttgaattttttaaaaatcaggtaccacttgatttcatatgggaaattgaagcaggaaatattgagggcttcttgatcacagaaaactcagaagagatagtaatgctcaggacaggagcggcagccccagaacaggccactcatttagaattctagtgtttcaaaacacttttgtgtgttgtatggtcaataacatttttcattactgatggtgtcattcacccattaggtaaacattcccttttaaatgtctgtatgttctttgagacaggatctcactcnnnnnnnnnnnnnnnnnnnnnnnnnnnnnnnnnnnnnnnnnnnnnnnnnnnnnnnnnnnngctcaagcctcccgaatagctgggactacaggcgcacaccaccatccccgg

SEQ ID NO: 263857 - DNA, 488 bp, Homo Sapiens; identical to SEQ ID NO: 178608

SEQ ID NO: 263858 - DNA, 779 bp, Homo Sapiens; identical to SEQ ID NO: 169787
  misc_feature (645)..(645): n is a, c, g, or t

SEQ ID NO: 263859 - DNA, 1466 bp, Homo Sapiens; identical to SEQ ID NO: 178610
  misc_feature (654)..(654): n is a, c, g, or t
  misc_feature (915)..(927): n is a, c, g, or t
  misc_feature (1242)..(1242): n is a, c, g, or t
  misc_feature (1282)..(1285): n is a, c, g, or t
  misc_feature (1289)..(1292): n is a, c, g, or t
  misc_feature (1297)..(1300): n is a, c, g, or t
  misc_feature (1302)..(1309): n is a, c, g, or t

SEQ ID NO: 263860 - DNA, 977 bp, Homo Sapiens; identical to SEQ ID NO: 178611
  misc_feature (369)..(449): n is a, c, g, or t
  misc_feature (553)..(672): n is a, c, g, or t
  misc_feature (715)..(731): n is a, c, g, or t

SEQ ID NO: 263861 - DNA, 1008 bp, Homo Sapiens
  misc_feature (536)..(536): n is a, c, g, or t
tctgctgtaggcaaggttcgcgatgtacgtatcatctcagatcggaactcacgtcgttctaagggcattgctacgtggaattctgtgaaatccagtctgtgccactggccattgggctgactgggcagcggttgctgggagtgcctatcattgtacaggcttcacaggcagagaaaaaccgactggcagccatggccaacaacctgcaaaagggcaatggtggaccaatgcgcctctatgtgggttccctgcacttcaatatcactgaagacatgctccggggcatctttgagccctttggtaaaattgataatattgtcctgatgaaggactcagatacaggccgctctaaaggttatggtttcatcacgttctctgattctgagtgttgcccggcgggccttgggaacagttgaatgggtttgagcttgctgggtcgacctatgaggggtcgccatgttgactgagcgactggatgggtggaacagacatcacttttcccgatggggaccaggagctggatctgggatcagcangtggacgttttcagctcatggcaaaactggcagaaggcgctggaatccaactgccaagcactgctgctgctgctgccgcccgccgccgcccaggctgctgccttgcaactgaatggagcagttccccttggggggccctgaaatccagcagctctgactgctctgagtccagccctgaacccttgcctcccagtggtttccagctctccagccctctttacccccccagacgatggtaaatccaggggcacaggaatacctgcctcccttgtggcctctgggatcctgccaccttcacatctacctctttcaagggccccattttctcccattttgggggaaccaagccatccctgaagggcatggaacattgtcctcctgaggaaaattgggggcccccccttaaaaatccccagaaaacgcttcctgccccatggtccccaccgggaaaaaggaattccggctgagccaa

SEQ ID NO: 263862 - DNA, 713 bp, Homo Sapiens
gggagttactgagaactcataagacgaagctaaaatccctcttcggatccacagtcaaccgccctgaacacatcctgcaaaaagcccagagaaaggagcgccatggattactacagaaaatatgcagctatctttctggtcacattgtcggtgtttctgcatgttctccattccgctcctgatgtgcaggattgcccagaatgcacgctacaggaaaacccattcttctcccagccgggtgccccaatacttcagtgcatgggctgctgcttctctagagcatatcccactccactaaggtccaagaagacgatgttggtccaaaagaacgtcacctcagagtccacttgctgtgtagctaaatcatataacagggtcacagtaatggggggtttcaaagtggagaaccacacggcgtgccactgcagtacttgttattatcacaaatcttaaatgttttaccaagtgctgtcttgatgactgctgattttctggaatggaaaattaagttgtttagtgtttatggctttgtgagataaaactctccttttccttaccataccactttgacacgcttcaaggatatactgcagctttactgccttcctccttatcctacagtacaatcagcagtctagttcttttcatttggaatgaatacagcattaagcttgttccactgcaaataaagccttttaaatcatcattcaaaa

SEQ ID NO: 263863 - DNA, 439 bp, Homo Sapiens
  misc_feature (14)..(14): n is a, c, g, or t
  misc_feature (54)..(54): n is a, c, g, or t
  misc_feature (106)..(106): n is a, c, g, or t
tgctgcttttggtnaaaaggcaacctgtgggtctcccaacgtggaaaaaaagcnaagtagggtaaaacccctgggttgtcatcccaaccttcccaggatgggaaanccctggctttctctgcaccctgctggcttctcttcccccgcaggccacctcatgtcgaaagccccccccagggttctgtccttggcccctccccctctctctgctgacttccctggtgatctcatccgataccagctgtacactgggcaccttgggcttctctctggaactgcatcacctgtccagctgcttccctgccactcagcccaccagcctctgtcagccttcctccttatcctacagtacaatcagcagtctagttcttttcatttggaatgaatacagcattaagcttgttccactgcaaataaagccttttaaatcatcattcaa

SEQ ID NO: 263864 - DNA, 387 bp, Homo Sapiens
cattagaaaaccagtctgaattgggtctgtctttgagatgcccaggccagcagaaagcagctcagaagtattgttgctcatggtgtggcaatggactgaactgtaatgaaaatgttatttaatctttgtctctgtattttgatacttgaatgactttcccttttgttttactgtatataaaattgttaatctgtctgattttgtctgaattataaacactttgaggtaccaaacataaccaatctgtgcaacaacatagactgacctcagtacccaagagagtgtaaatatttctgggcttccagctttggttttgttattttcataactgtacacaacttagaacagactgaattaataaatgagaagcgacatgaacgcagcctt

SEQ ID NO: 263865 - DNA, 1129 bp, Homo Sapiens
  misc_feature (279)..(279): n is a, c, g, or t
ggatgtcacggggtgtcatgtgtctgatgcagcctcctctgctgtgtattaaatgtcaaaatctgaatatatctggatatgtactaatcaaataataatcaatcaatcagcatatacatttcagccaaagccatagaagaaaaagcaatagttgcttgaattatgatcatctaccaccaactctgctcagccctgtaacagggtagggagagggtataacaggaagagctttgacttgtccctgtctatacattctctgtatcttttgggggtaacttnctgggaagtttttcagtgttcagccatgtcagttgaaactagatttttctgtagattttttacttacccatgtgagcctaacactatcctgtaattcattttctcaggctatgtgtaaatgtagaaccctaatttttctataaaaaaacaaactaactaactgtgtaaagaaagaaaaagggaagtaccaatgggtttttccaccttatttttacctttgatctacccttgcagatttaacctgtcttcttccctcccattattctcattttccttttacctttctccaccatccagagccacaaaagcaaaccttctacctcctacctacttttctctgggacaaggataaaggaatatgattttccagagccccagagccagctcatcttccaggtgctgaaaccactttccaaataaactaaagcctggatttgatattacaaattttgggaaatcttagaataaagaacgagaacaaggaagtcattggctagtataattaagaaaggtaggattcagtgcttaccgatgatgcagtacttgatagaagaaaacagtctgggaggatagcgctcatttttcagttacccttttaggagtccctttgtctttgggaaagtagcagaatggtccgcttctttcccatgagtggaaaatgtggcttgtccaactctcctccaggttgcatttcagtttcttttcaaaacttattacctcccctaatcctgagacttttggaaaggtggaaggaagaactgttggctttatcctccccctccctgcatgtgtcaacattggggatgccagaattttactaatccgcattcaatgggctggaacaaatacc

SEQ ID NO: 263866 - DNA, 902 bp, Homo Sapiens
  misc_feature (243)..(415): n is a, c, g, or t
  misc_feature (848)..(848): n is a, c, g, or t
ccagccccttattgcctgggcccaaggttcttccttagggaaacaccggttagtgacccagttccaccttacccttacgggggacccgcgggcgcccaaaagcgaaagggttctaaaaaagtctttttcgaagggcccgaagggcggcccgaccaaggatgacaggatttacccgggccatgtttgtttaggaagagaatgggttttcccccatgttggtccagggcttggtcttgaacctgnnnnnnnnnnnnnnnnnnnnnnnnnnnnnnnnnnnnnnnnnnnnnnnnnnnnnnnnnnnnnnnnnnnnnnnnnnnnnnnnnnnnnnnnnnnnnnnnnnnnnnnnnnnnnnnnnnnnnnnnnnnnnnnnnnnnnnnnnnnnnnnnnnnnnnnnnnnnnnnnnnnnnnnnnnnnncccctattctctggaccacagtttgaaaatcacagacaggtcaacctagatccttccagctctagttttctactgtgttctttcctcttgagaagttacagctcatcatgggcccttaataacagaattcaacagaaggcatcatctgaaaacaaagtcaattcagaaactgttgttgcaagaaggcaaacagaaaaacggcaccatgtcccactggaatctctttcagcgatggagagttttgttttctggtaaaaaatatagaaatagtggttgtccttgaggggacttgtggtttggttctaaacctccccatggagccgagtggtgtccctgagggtgatggatgggcagaggtctctgctcagagctgctctgagcccatccgcaagtttttggatctccagttccaactggttttggcctgggaccnctcgcttgggtcaacagctcccggagccttcggatctcctcctggttgccggta

SEQ ID NO: 263867 - DNA, 925 bp, Homo Sapiens
gggtatctttgagctggcatctgctgcaggtgtgggctgtgacattgacccagccttggtggctgccattgctaatctgaaagctgatacttcatctcctgaggaggaatataaggtggcctgcctgctcttgatctttctggcagtttccctcccactccttgccactgacccttcttccttttatagcattgagaaggatggttacaacaacaatattcattgcttgaccaaagccatcatccaggtgtctgctgccctcttcacgctctacaacaagaacattgaaactcacctcaaggaatttctggtggtggcctctgtcagcctcttgcagctgggccaggagactgacaagcttaaaaccagaaatcgagaatccatttctctgctcatgcgcttggtggtggaggagtcatccttcctgaccctggacatgctggagtcctgtttcccttatgtcctgcttcgaaatgcctatcgggaggtgtctcgggccttccacctaaactgaatgcctgccagtaccccactgaagagccctttggaccttcctaaaaccttgccatagtggaagctggggtcactttcgcagggggtgggaatggggtggggtcactaaggagagagggtcaggagccagagttgatgagcagatctgtggaagaacaatccagggctgagaaatcgtagagcagtgaggcaggctggagcatggaggacagcttatggaaaagttagggcgtggggccacatgtgtgaattttacaatgaaaaaaggagtaacgtacaagtatattttctatcttctggtgacttgagcttgagctctgacaggcatgggcctctccgaccttcatcactattcttaggataatgctggcggggcagagatgatcaatcatcatattaaatcataatgagc

SEQ ID NO: 263868 - DNA, 1059 bp, Homo Sapiens
  misc_feature (56)..(77): n is a, c, g, or t
taccggtcccgaatcgctcgggatatcgtcgacccacgcgtcgcggacgcgtgggnnnnnnnnnnnnnnnnnnnnnnaaattagaaacctttatttacaatgacatccaaaagggtcagcaaagcagtcacaagtctcaccattcccccattaagttctatttcagtgtgtggtttcaattcttgtgcaagataaagaataatttctatttttttaagcaacataagtgtaaacttgattgaaactgaattcattctcaagaagtataagtcaattccgtggagaattttaacattatgtgtgcctcctcatattttatatctttctcgaaacctccactatttttagaaaggaagagagaaaacacccgtggctcggtttattaaccaggtggtgccttggacgtttgaacaaccaattaaattcaattccttaagggtttggctcctaggaacctaattgtggtgaaccacaaactcaacaggcttcgtggcaaattaaaaagggaaccgtgggcaggcattacatgtgttaacgtgggcaatccattcgtggtttactttcaggcgtggacccacctcgtgggatcaaagaacttctaggacatcaagccaattatcttctgtaatacccttacccctaatatagatacccccaactcacctcagaattttaacatacgggtaactaaagtagcccgtgttctggcatatttacacctttcaatccagatgccggttagaaaagggggatcctaattgtgaccttttacactggtacactcgcgggtatattttcaaaggggagaaacatgtgtctccgttatatccattcgagactttataaccctctctcttccagctaaatattcttgggatccccgcaaacaaacaccagcgggtctcggaaaattcccccatttttaaagagatataacataaacttttggtccccccaaaatccacgtgtaaaaagggggcgcaagtctagcaagttaaaagagataaaacaccagaatacatctaggaaataatctcaaggatataaatttttccgact

SEQ ID NO: 263869 - DNA, 166 bp, Homo Sapiens
ggaacctgggtgttagcattttaaagagaccccacaggagttctggcctgtgactaactaactgccccaccccagccgagacctcggcgagactgtaactagtgatgtttgtacaaccaaagactctattttgtggtttaaggagaataaagttgactacatttta

SEQ ID NO: 263870 - DNA, 822 bp, Homo Sapiens; identical to SEQ ID NO: 5530

SEQ ID NO: 263871 - DNA, 1278 bp, Homo Sapiens
ggaaggccttggctggaagggcctgcccacccgggttacatgggtactttttccctggaagtttaaaaggggaggttcaaggcccaccgggctgcttcccaggaccctcttgaaggaaaaattccctttccaatcttctttttgaaacatgggagctcctccctgaattaattttctgggggatgaaaagtgatgatagccattgtgtgcccttggctatgggtgcgacttgggagctcacgccagtatccaccttcatgaaatacaaggcagggctccaatggagactgtcgaaggaatacttcatagtactgcgccacttgactgtgtttctcagggatgtttttcagatgattagactgcacacagacaacgttcccatctcgccaagttcccaggtagaacccccacagtctctggaatggccatctggaccttcggttcacagagaagctggacttatttcggtaaccattgatgacaggagagggtataataggatggagaagacacagagagcctctcagatttgggtacagccgtcgtcacactgactccattgagcatttggatgtaagactctagtctttgtaaaattttcttctgagctgcaaatttcaccttgagctgttcttcatagctcaacctccagagtggtgtcacaacatcagccagcctttcctgccaggaaccatctagtggtccaagatggcttggtttcttctgacttttttgtcctttctgacatttcgtggctatcacacgggtgaaatctcccttacatactgtgcccagaaagagctgtgaccatcctggtggatttctggcataccagggaagcagtcctgctttggagaagagacccaccatggagatgaagtatctgagcctgtgcagtgggactcttctcttaaggcctgacatccaaagaacacactgaaatccaccttccttcgtaaccaataaatcctcttacaaacctgaggcggcaaactaaaaggccagcggatggcctggtttgctgcggcggggaaacagtcacttcctggtgcgcaaggcgcctctactcccgccgcacgcgcagccaacccttggcaagcgcggcgggacacggggctcctcccagcgtcggcgaggcagcaggctccggcacctcgactcctctcggggagtacccctccctactttgctgggggaaccttctatggagaccttccttaaaagcactcatagccctgacacccgccgccttccttctctaagttctcctctcctccc

SEQ ID NO: 263872 - DNA, 873 bp, Homo Sapiens
ggtaactggcaacccatctcttaatccgtcagtatctctcccagggtcattaatagccacctcatctaccgctgccacctccacatctctccctcatcccagctcaacggcagctgttctctcagggctttctgcttcagcaccagtctcagcagcacctttccccctcaacctgtccactgctgttccctcacttttctctgttactcaaggacctctgtcatcttcaaatccctcctatccaggcttttctgtctctaataccccaagcgttacccctgctcttccctcattcccggggctgcaggcgccctctacagtcgcagctgtcacaccactacctgtggctgccacagccccatccccagctccagtcctcccaggattcgcctcagcattcagttccaatttcaactccgctcttgttgcacaagccggtttatcatctggacttcaagctgcagggagttctgtttttccaggccttttgtccctcccgggtatccctgggtttcctcagaatccttcacaatcatccttgcaagaattacagcataatgcggctgcgcagtcagcattgttacagctggtccattcagcttcggctctggaaagctatccagctcagccctgatgggtttcctagttatccttcagcgccaggaacaccattttctttgcaaccaagcctgtcccaaaagtggggtggcagtgaatactttttaacttttattcttccttcagagcaacatcagaattgcctgagaactgcaatgaacaatctgacaaatgtgaagctggccaaaagtcggaaaatgagaatgagggtaatcctggagaaattgtgacaacaatttcaaaattgtggttgca

SEQ ID NO: 263873 - DNA, 941 bp, Homo Sapiens; identical to SEQ ID NO: 5922
  misc_feature (840)..(840): n is a, c, g, or t
  misc_feature (880)..(880): n is a, c, g, or t

SEQ ID NO: 263874 - DNA, 974 bp, Homo Sapiens
cggcggctgcctgcggaagtgtcgagcaatcgaacgacagtaggcgcggcggtagtgggcgcgtgatcagtctcggcgatagtcggaccggtgcacacgcgggatacgtcccttgtcaatccaagggggagtttgggggcggcctagtcaccgctttcaaagcgccccggagagttatcctaaaatgtttaagggtttaaacatgcaagaataagagcggatgataatgaacatgtaaaagatgatgctggatgaaaaggtgaaacttcaccgttagactcctcttcatgtcaggcaatttgagatatacaccatgttgttttctactgctcaaactgtgctttggcaattaaagcctgcctcttacatctctgtgtgtggcagcaaaatggagtctcagcaaccaggcaggaaaatgacacaaatcctgcagcagggtcaatggcagtagcaaagaattaaacagaaaaagagaggttagataaaacagttcaaggtagtagcaagggaccaggctaaaggaagtcaggcagtcccaggttagcacaaagcttccaggggacatcagaggtgtcactgggctgaagacaactcttgtgttgtccgttgctttgagtcctttgagttgctttctgaggcttttcatccattggcagcttcacatcagctccatcctctagagggacctttttcattacgtggattctgatccttttgaagtggttaccatcaagtaatgtggagctcactaaggaagtccacatcctcaagacagtgtccacagccctaattcctcttcttcaaagatgtcccccttccaggcataggagtgtgaatctgggtgctaaatcatttctcctctctccacacatcctaatgctacagtctaatgaggggactgaagatgaaatgcccagatgcatatggaggcagacacatggatagattcttccaaaacgtcagctggtgctttt

SEQ ID NO: 263875 - DNA, 1168 bp, Homo Sapiens; identical to SEQ ID NO: 5953
  misc_feature (733)..(741): n is a, c, g, or t
  misc_feature (757)..(820): n is a, c, g, or t
  misc_feature (834)..(834): n is a, c, g, or t
  misc_feature (859)..(859): n is a, c, g, or t
  misc_feature (1049)..(1049): n is a, c, g, or t
  misc_feature (1074)..(1086): n is a, c, g, or t

SEQ ID NO: 263876 - DNA, 1180 bp, Homo Sapiens
  misc_feature (1012)..(1020): n is a, c, g, or t
tctaaatttgtgtgtgaaatataacattgattgaattgcagttacatttggttagtaatatttcattattttaataactgtgatgtcatgtatggatttactttggggttcaaatcaaaatgtcactgccagaaagagctgttccagctgatctagagcatactgccctagagtgtccctggggatcatctgaacagaagtgcacaggctacttgtacagagaaaaaattaatactcaaaggaaatcttcattttttagattgactttgggaatttgaattttcatcagtgcaaatataaatttctctatcctgctctgaggctaattggtaccatattttccctttgtgtcttgtgactctgccacatcccatctcatcctggcctctgagtcaagaacccagtgaactgactttctagttctagaagttccgctgcaaggccaggaaagcttgagaaaggtattgtgggaagaagcaaaggtagacccccatcactcacctttgtctgcatccctgggcctgtgaatgatgacagcacctgacattctgcaccagctaacctctgcctccatggcagagaaaaggccataagaacagtggaagaggagcatggactcagacttcaaggaagaagccatttccccaggtccttccttctgcatctcaccacccctagttacaaataactccattgaacagcatctattcagaaactatgccgaataaaaagattggtggaagggctcatgtggttagcaacctatgaaacagaaataggacactcagttacaaacattatctcctttagtttttcagaaaatgcatccctgatttcattcatttccagcttgaaagccagccatattactctagtccctaccaaactgctctagaaggtcatttccattttgtttgtgatatttagacgcgcagacttcaggaagttcacctttaacttcagcattccagatgaagtttcctgactcagtgcttttgcataaggaactagnnnnnnnnngtaaggaaaattggagatgctaacatcctcccccatcccaactgcaccttaaaatatgcatgtcaccttcaaggttttataattgcactgtttgttttatgtatgtacagattaaaattattgctacatttgattaaaataaaactgcccccttctaaaa

SEQ ID NO: 263877 - DNA, 1069 bp, Homo Sapiens
  misc_feature (175)..(175): n is a, c, g, or t
atcaggaaaccagcacttcttacaactgccagttttaaaagaggaaatgattctgagatgtgctcattttattttaatttggtggttggtggttttccaagtagtctgtaaaatcctgcaagattcacagtctctggtgtgaaacctcagaagtgagtcgttgtgagcctgtggnagcaccaccaaggcaggctaaggggagggtgcagtaagtggagtttgtgaggctgagtggctgaggaagggagcaagtgcaacaaaatacgggctagagaagaaccagccaaggacgtggaacccactgctgctctcagagattcacggaacacggcagccttctgcaaggcagttccatgcatgtgcactcacgctgcaatcacagatgtcccagtaattaacctttctaagtcttgtgaatgctgactgcactttcacctcctcgaaaagccattggaagtttttagagcagcagcagccacagtttgtaagacaaatgtagagggggacgcaaaagaaaagacaccaccaggaggaggattcagtgtgcagtcagcacagaccaacatcaaccaaggcaatggctgccctccactcttggggaagatggggggggaggtttcttgaaaacggaaatttggattggcagctagcagttatttcctatccagatgtactgtgcactttaacctaacttaaaatgtattttaatattttgtctgtactgcacaaataccctgtttttgtcaaatagcataattgatggtaaagaaaccatttttggaacaacgagcggaataccattttaaaccaacattccaaagggtggacctatataaagaaaggaggttgagtccctggcggcacccttcccgggtccattcagaaatggcggggtccccgcaaatattttcctttacggggaatatatggtgcaacagtaaagctctttgaaaatccccgggttttacacccaattctcctttctccaaaatttcaccgcaatttgcctcgctcacatacaaagttcaccccgcaatctgccacccggaaaacgcgcggccagggtgca

SEQ ID NO: 263878 - DNA, 830 bp, Homo Sapiens; identical to SEQ ID NO: 5980

SEQ ID NO: 263879 - DNA, 819 bp, Homo Sapiens
  misc_feature (557)..(557): n is a, c, g, or t
  misc_feature (708)..(708): n is a, c, g, or t
gggctcgagaacctgggaaaggactgggtggctgaaagatggctggaaagcgcatttagccaaccgagcctgcgcatggaacctgcggcgctgcacagctgcatagagatgtggagcacctccctttaccgtagaaagtaggcgagccagctcgaggcactatactgaggaagcgctgcggcctacttccgccgtttttcttaacatcaaagaaacttccggtagtggggtgtcttgcattccaccgtgtcggtgccccagaatgagacgcaagctgatctgcagatcccgcagggtgccttctgctcttttcggggcaggttggccggtaggggagaaggccgccattggaacgcggcctttatgtcgggttctctcaagagtctaagatcgcaccctcaccagcggagggaaggagcccactcccagccacaccgctttgttttctttcgcttagccttgttgcgccgttctctaagccactcatgtccttagatcagattgaggggcccgcaggatttaagcctttaatccacagcacattccaagcacctacnccggtggtaggccctaacaaggaacacaggcaagtgacacgctgcctgggcctgaaaggtccgctcagacctttacatgaagttaataaatgttaaagcttcagggcccctcgcttgtatggcctcctgggagaataaatagttgctgaanttggggagaggggaaaccagctttgagattaggaagcaaacctatgtaaccatttctaataaattaccccgaagaaatctaaggaagaactgaaatctccagtcctccagc

SEQ ID NO: 263880 - DNA, 803 bp, Homo Sapiens
gggggggcgcagccgcggtggctgggcgcggagtgtgcgtggcctgagccgtgcgggtgactgcttcagggcttctccgcgactggaccgggcgccgctcgaaagcacgccctccattcgcactgcttgttgggctcatcatgaagcgcttgggctccgtgcagcggaaaatgccgtgtgtgtttgtgacggaggtgaaagaggagccttcctccaaaagggagcatcagatcagccatacctctgggctcgactagatagaaaacccaacaaacaagctgaaaaaagatttaaaaattttctacattcaaaagaaaacccaacagaatttttttggaacgttgaggaggacttcaaaccagctccggagtgctggataccagcaaaggagacagaacaaataaatgggaaccccagtgcctgatgaaaatggacacattcctggttgggtaccagtagagaaaaacaacaaacagtattgctggcattcctctgtagttaattatgaatttgaaattgccctggtactaaaacatcatcctgatgattctggacttttggaaattagtgcagtgccactttcagatctcttagaacaaacactggaactcataggaacaaatatcaatggaaacccatatgggttagggagcaagaaacatccattacatcttcttataccacatggagcatttcaaataagaaatctaccttcattgaagcacaatgatctcctgtcctggtttgaagattgcaaagagggtaaaattgaaggaatagtgtggcattgcagtgatggctgt

SEQ ID NO: 263881 - DNA, 882 bp, Homo Sapiens
  misc_feature (163)..(163): n is a, c, g, or t
  misc_feature (341)..(426): n is a, c, g, or t
caacagaaacgtggcgatttcgagtgttaaggggctgatgtacgtattacagggttacagtatagtacgcggagagacgagtaagcgtggtagggtgagaaggttaaggtgcagggggtaacggtggttagctgtagtggatgaagcgtcagttagaagcganatggtgactggggggagtgaagtgggagtatctggtacgacagagaggcgtgggtgataggggtggtggcggttgcggcgtgaaatcggtgggggtatgaaagcatggaagtgtgcaatgggtggggacaagatagggagatataaagggtgagagagagatgcgtcgaggttttgtnnnnnnnnnnnnnnnnnnnnnnnnnnnnnnnnnnnnnnnnnnnnnnnnnnnnnnnnnnnnnnnnnnnnnnnnnnnnnnnnnnnnnnaatagagaagaaaggagggcgcaagtcgcggtggaggggaacagggcgaggggaggaagattttcaggagagacaagataagtgaaagaattttgggggcgtgggtgaaagcttctcgaatagtggtactaatggggtgtgaattagagagtgtgggggagtagagagctcggtgaggcgcacacagaagggccttctcaagtccagaaaggttcaacaacaagatgcaatatggaaacacgttatccaccacaacttgatcaagggactgaaacttcccctccttatcagcctttatgaggtagtggagaagcagaaatagaggatccacaggtgtggcaaaatggagaagacctcctgattgaactgattgatttataaaccaagaatggtgtttttccttgaaaacttttacttcaaacagctgctgtagacacatattgaacaagtaaatgg

SEQ ID NO: 263882 - DNA, 846 bp, Homo Sapiens
  misc_feature (192)..(202): n is a, c, g, or t
  misc_feature (759)..(759): n is a, c, g, or t
  misc_feature (766)..(766): n is a, c, g, or t
  misc_feature (792)..(792): n is a, c, g, or t
  misc_feature (799)..(799): n is a, c, g, or t
  misc_feature (805)..(805): n is a, c, g, or t
  misc_feature (823)..(823): n is a, c, g, or t
  misc_feature (835)..(835): n is a, c, g, or t
acccaaagactacaaacctgagccaccatgcccacctgttttcttgacaggacttgcatatgacaagctctctgcttctcctcacctatgcattgcaagccaggtcagaggcaggttaaacaccttaaggacatgttaggacaagtggcatacaagggaaaaaaacccgttcatttaagttacagaaacagnnnnnnnnnnnctggcttattcccacacttactctactcaaagctttgagaagactaattttggcatcctctggctaaatacaaaacaacaaaacaaaacaaggcaaactctttcagcaagagctgtgggggaagggactataagggacacacacaactgacaggcaaaagctctgagcacgtgattgctaagtttaattcaactgttacaccccattctgccttgtaaaaataacaaaacgctcctatcaaaatgacattgtgatgtgagtacaggctttttgttttggtacagctctaaaaaatgttggcaccgaatgcacttaagaaaagtgttaaggcttaatacaaatacagagacgagtcatttctcaatgcagcttagagggtgagaacaggatgctaggtttttaaatcttccaaatacaggcagtccccaacgtacagacatacaggacacctcccaaatgtaaacgacagccacacagcagggcttgcatgcgcaggaactcttcttctcccagtgaggcagactaggcactctggaatcccaccccactgccttgcnggggggnaaggagggcaggggcaggtgccaggnggggttnttttcngggttcctttcacagttncccgggggtttntgtttttggtt

SEQ ID NO: 263883 - DNA, 770 bp, Homo Sapiens
gggggagggggaggtaggcggggcggcgcgtgacctaaggcctctctgccgcgcgcgcagagccaaggcactgatgtttgaactggaaacttcaaaacgtttaataagagtcttcaggatgggtttgaactagacaagctagaaatttctttagaacaccagctctagcatgcatctcccacttttggctttcctggagaggagcttgaagaggtggttctgcagacagccacagtgatactcaggaaaccagaggaatggatttgacttttctgctaggattctttgttatagtttctccctgagttgtaagaggcatggaaatatacatgaaactgaagaacctgcaaggaagggaagtggaactttccatgctgagtgaaaactaaccaagtggcagttgtgactgaaaacactgaaacctaccacgtccagattcactggattgggggatagaggaacggtcacagctagggagaaagaagtgataccggaaaaaaaaacctaaatgaagagaatgaggatgactgcacagtagatggccacctctacctccacagaggcaaagtcagcctcgtggtggaattatttttttctttatgatggttccaaggtaaagggaagaaggcgatccaacaagagctggcatttgttacttttatccttcccagaccctgctagaccaacagggagttgctttgtggacagattgctggagttgtccgctgtgtttctgacatttctgactctcctcctactcttgttcgtct

SEQ ID NO: 263884 - DNA, 1035 bp, Homo Sapiens; identical to SEQ ID NO: 6047
  misc_feature (19)..(19): n is a, c, g, or t
  misc_feature (722)..(722): n is a, c, g, or t
  misc_feature (941)..(941): n is a, c, g, or t
  misc_feature (986)..(986): n is a, c, g, or t

SEQ ID NO: 263885 - DNA, 849 bp, Homo Sapiens
  misc_feature (29)..(29): n is a, c, g, or t
cctaccagggctttcttggctttggcganggccagtgtacagacatcccatggtaccagagtgctcagaaagtcaagataggatatgcctcacccttcagctactccttgttttaaagttccagctcttggagtaacttcttccaatttcctttccaggacacttgggttgaattccagtaaagtttcatcctggaaacaccctgaagggtgcccatcccttacagagctaagtggagacgtttccagatcagccccaagtttactatagagactggcccaggcactgaatgtctaggacatgctgtggatgaagataaagatggtggaataggttttatcacatctcttatttctcttttccccttactctctaccatttcctttatgtggggaaacattttaaggtaataaataggttacttaccatcatatgttcatatagatgaaactaatttttggcttaagtcagaacaactggccaaaattgaagtcatatttgaggggggaaatggcatacgcaatattatattatattggatatttatgttcacacaggaatttggtttactgctttgtaaataaaaggaaaaactccgggtatatgtatagatgttcttcattatagacatcttctttgctttcctttggccttgggggagggaggggagaagtgctcttttccacttgtgggggtctcccattggaaacataaatcctatagtcccaggaaggattcagtcccccagtggctttcccatccaaagaagaaagagtttgagtttcttaaactctgctgttctggccacttactcccactagaacaacccagggacaaggtgccaacatg

SEQ ID NO: 263886 - DNA, 959 bp, Homo Sapiens; identical to SEQ ID NO: 6066
  misc_feature (70)..(70): n is a, c, g, or t
  misc_feature (87)..(87): n is a, c, g, or t
  misc_feature (112)..(171): n is a, c, g, or t
  misc_feature (228)..(228): n is a, c, g, or t

SEQ ID NO: 263887 - DNA, 864 bp, Homo Sapiens
gatgagctgcaactgaggtaccactgctgcgggcgccacgggtacaaggattggtttggggtccagtgggtcagcagccgttacctggatcccggtgacccgatggtggctgaccggatccagagcaatgtagaaggcctatacctgactgatggggtccctttctcctgttgcaacccccactcaccccgcccttgcctgcaaaaccgtctttcagactcctacggcccaccccctgtttcgattccccgacaaacccaaccaaaacctcggggcccaagggtgccatgaggtgctgctggagcacttgcaggacttggcaggcacactgggtagcatgctggctgtcaccttcctactgcaggctctggtgctccttggcctgcggtacctgcaaacagcactggaggggcttggaggggtcattgatgcgggaggagagacccagggctatctctttcccagtgggctgaaagatatgctgaaaacagcatggctacagggaggggttgcctgcaggccagcacctgaggaggccccaccaggagaagcacctcccaaggaggatctatctgaagcctagaggcctggagcttggggtgaggaagagggagggatggacaagtctgaaaacctcacaactccttaccaaggctccaggttggggggatcgtaggattagaggggctaaggatagtcagcgagctggactggggtaagaaagaaaaccagatgtcctaaggcctagcccttgtagtcagaaccaccagggaacagcaaagaacagagtgatgggaaagtgacatgagaaggcctggaggctgattctgatatagactcaataaagtttttggatggttaaaa

SEQ ID NO: 263888 - DNA, 138 bp, Homo Sapiens
gggaccttatcttccttatatttcagaacaaagaagcaacaagcgtgaataaaaagacaaatgtatttgactccctcataatccccatctgtatgtgctacccttccttcaaatatataaatgtgcatctttttttct

SEQ ID NO: 263889 - DNA, 1203 bp, Homo Sapiens
  misc_feature (481)..(528): n is a, c, g, or t
  misc_feature (554)..(562): n is a, c, g, or t
  misc_feature (694)..(706): n is a, c, g, or t
  misc_feature (1105)..(1148): n is a, c, g, or t
cagtttggaaggtgatggtattagtggggactgagttcaggttaccagaaccagtacctcagtattctttttcaacatgtagggcaagaggatgaaggaaggggctatcctgggacctccccagcccaggaaaaactggaagccttcccccagcaaggcagaagcttggaggagggttgtaaaagcatattgtaccccctcatttgtttatctgattttttcatcgctccgcatactgagaatctacgccaccccaacctctgttccccacccagttcttcatttgcaggaatcaccccactccagacctatcaagagacactcccccctccattcccacccctcatacctacacccaaggctgtcagctttggattgctggggccacgccccccggagggcatactgaggggccctatacgtttgtgcacccaaataacaacagctacgcgtgtctgatgcgccttttaactttgaccannnnnnnnnnnnnnnnnnnnnnnnnnnnnnnnnnnnnnnnnnnnnnnntcgcgcgcgcggcatttttcccatannnnnnnnnacccgaacggacttagcgcctgaaactacgccttttgccgccctcccttgcgcgccctattaaaaacactctctcacccacccctctttctcttttcggtgtcccccgtggccttcccgtcccgcgtgaatnnnnnnnnnnnnngtccatatcttccccgcgtttcccctacgtgtgacacctcgcccgccgttaaatctatccacgacgggggcgttttgcggacccccttgtcctgtcccaccgccccatttacacctctctcccgcggcgccgcagttcattccccccaccctctctctctcttttatacacacccgcccccccgcatcgcgcccatccctttctctagcggcccgccctcattatctgctgggccagccgcttcccccacaagagtgtactctctccacagacgcggaccggctgtcctgacctctcgcacaaatttttaccttttctcgatgtggcccccgcccgtcgtgaatttctccttagaagacgaaccgacacgcgcgcgcagtgtccccccgtgcgacgcgnnnnnnnnnnnnnnnnnnnnnnnnnnnnnnnnnnnnnnnnnnnnttttttctccccacccccgttgctcgctcacccacgcacccataccttccacacg

SEQ ID NO: 263890 - DNA, 493 bp, Homo Sapiens; identical to SEQ ID NO: 89599

SEQ ID NO: 263891 - DNA, 674 bp, Homo Sapiens
ggtggataagagcgccgttggctttgagtatcaaggcaaaacggagaagcacgagtcccagaaagactatgtgaaagggtttggaggaaaatttggtgtgcagacagacagacaagacaaatgtgcccttggctgggatcaccaggagaaattgcagctgcatgaatcccaaaaagattataagactggttttggaggcaaattcggtgttcagtcggagaggcaggactccgctgctgtggggtttgattacaaggagaagctggccaagcacgagtcccagcaagactactccaaaggattcggcgggaagtatggggtgcagaaggatcggatggataagaatgcgtcaacctttgaggatgtcacccaggtgtcctctgcctaccagaagacagtacctgtcgaagctgtgaccagcaaaacaagtaacatcagagctaactttgaaaacctcgctaaggagaaagagcaggaggacaggcggaaggcggaggcggagagagcccagcggatggccaaggagcggcaggagcaggaagaggccaggaggaagctggaggagcaagccagagccaaaacgcaaacgccccctgtgtcgcccgcacctcagccaaccgaggagaggctgccctcgagccccgtctatgaggatgcggcttccttcaagtggc

SEQ ID NO: 263892 - DNA, 1334 bp, Homo Sapiens; identical to SEQ ID NO: 7569
  misc_feature (467)..(512): n is a, c, g, or t
  misc_feature (574)..(612): n is a, c, g, or t
  misc_feature (690)..(728): n is a, c, g, or t
  misc_feature (782)..(963): n is a, c, g, or t
  misc_feature (1071)..(1082): n is a, c, g, or t
  misc_feature (1218)..(1293): n is a, c, g, or t

SEQ ID NO: 263893 - DNA, 304 bp, Homo Sapiens
  misc_feature (29)..(29): n is a, c, g, or t
  misc_feature (48)..(48): n is a, c, g, or t
  misc_feature (70)..(70): n is a, c, g, or t
acatggtgccccgaccgctcccatccccncctcctccttaggatgcanaaccctaccttgtctttttttntttaactttctttccaggtagagtagctctttgtacataaagaatacttgaaaaattaattgtatgatgtatgagaagacagagtctcctagttttgtatcttgttgtatgactgccatgagttccaccagaaagccactctattttggtctctgtgacattttaaatgcgtgacagaagtgagcaaataaagtgaggaagaaatctatatatgagataatatagattgtattg

SEQ ID NO: 263894 - DNA, 1219 bp, Homo Sapiens; identical to SEQ ID NO: 7574
  misc_feature (557)..(573): n is a, c, g, or t
  misc_feature (842)..(842): n is a, c, g, or t
  misc_feature (1040)..(1051): n is a, c, g, or t
  misc_feature (1061)..(1061): n is a, c, g, or t
  misc_feature (1119)..(1177): n is a, c, g, or t

SEQ ID NO: 263895 - DNA, 1146 bp, Homo Sapiens
  misc_feature (436)..(545): n is a, c, g, or t
  misc_feature (593)..(602): n is a, c, g, or t
  misc_feature (678)..(775): n is a, c, g, or t
  misc_feature (908)..(953): n is a, c, g, or t
  misc_feature (1000)..(1010): n is a, c, g, or t
tatatttttaactgactctttggaatccccttaaagccagttggtaagaaggaatggtatttgtatggggggagggaggctggaatggagaatctggattctctcctcttccccattctcccagagggagggaggtggtgaggaagaggaagggaggggcaggatgggccatggaggtgccccacccccacacctgacaatcacccacactccctggggctcttcctgggtcctggggcagggcgagtccaagtgtgaggctgttgatttgttttcaatatttcttttcgtgctgtatggtgatgctttcttagtattctacacaataagaaaagacaaagtcctcgagattcttatgagttttgtttgaaaactctttcactatatttgttgtaaagaggtttactattaaaagaaaaagaatacacgtttctgnnnnnnnnnnnnnnnnnnnnnnnnnnnnnnnnnnnnnnnnnnnnnnnnnnnnnnnnnnnnnnnnnnnnnnnnnnnnnnnnnnnnnnnnnnnnnnnnnnnnnnnnnnnnnncttgggggccccccccgcccccaaaaaattttttaaaacctttttttnnnnnnnnnnccccaaaagaaaaggaaaaggggccaaattttttccaaaaaaaacccgggcaagaacaagggttggattccccccnnnnnnnnnnnnnnnnnnnnnnnnnnnnnnnnnnnnnnnnnnnnnnnnnnnnnnnnnnnnnnnnnnnnnnnnnnnnnnnnnnnnnnnnnnnnnnnnnnaatttaaatttcccccccaccgggccctttttggaggaagggtggaattttttaaacctttcggccgactgggaaccctcccaacggggttgtgagaactgaaaccccccggggatccaccccttgggccctnnnnnnnnnnnnnnnnnnnnnnnnnnnnnnnnnnnnnnnnnnnnnntttgtcctatttgggcgcccctttttaattaaaaaagggggggaaannnnnnnnnnnggggtttggtggtgtaaaacaaaaaataatattatttctcacaaaaaaacccccctttaaggagaaaaaaagcggccccgggtttttttctccccgtagaaaacaccccccaagtctggttggagcgatatatagt

SEQ ID NO: 263896 - DNA, 1096 bp, Homo Sapiens
  misc_feature (313)..(313): n is a, c, g, or t
  misc_feature (460)..(469): n is a, c, g, or t
  misc_feature (562)..(589): n is a, c, g, or t
tcgcccgccccgcgggggcgtaaaacggggcagggcgcgaggcaagtgatgcgccgcgcaaaacggacaacgagaagggggttttagtgttttgggcgggctgcacggcgatgggtggcggcgcgcaggtgtggggggagggagtcattctttacgttttaagcagaggagggagagggtcgaacgggcgggggggcaagcgcaggcgaatcgcccgcttgtcgcaacatataaaacgggggggttggtgcaccgaaacagacggcattggttgtagaggaggattggttgtccgcccagtgttgtcgggcgngggagaaaagggcgtgagaggtaaaagcgttatgcggacccccgcattgtgtgcgcgaaaaatagaggggagggaacacagggggcagaaggggggccgcgcgaaaccttacaagaaatgcggaggagagcctctcccgcttgggannnnnnnnnnggggtaaaaggagggtccggggtaaaaaagcccccgcggggggcgcccctttgggggattttttctcaaaaaccgcgggggcgtttgcccccnnnnnnnnnnnnnnnnnnnnnnnnnnnnatccgcaagcccgtatgtcatggccccgggtttttccttcgggaaacaagggtatgggcccggtgtcccttgaccctcctggggcccgcgcgggcaaagggaggtgttttggaaaagcttctttgaagggccggagggcggccgagcgatgttttagggaatgacggggaaatgtttggtcgtagtgcctgcagccctcatgggtgggatggaggcagaaaatcagttcctgtttatttacaaaaagatatatactgctgtatgtatgtatatatattaacccctcagctccctcccatgatcatccttttacttctacccccacctcccttttaaaacaaagaggttttctggggtgcagagcagggttctcctgaaagtgggcagaagcagcaccgatagcctagtctggcaggttgtgggaaggggcgcagggagtgaccatgagcgaccttggccccgtccttgctccttgcaccctgactgggcatggggttgagaggaggg

SEQ ID NO: 263897 - DNA, 359 bp, Homo Sapiens
  misc_feature (326)..(326): n is a, c, g, or t
cgggggaaaacccgctgcccgccgccctggtccagccccacaccgggaaactgtgctggttcttggacgaggcggccgcccgcctcctgaccgtgcccttcgagaagcattccactttgtagctggccagagggacgccgcagctgggaccaggcacgcggcccatggggctgggcccctgctggccgccactctccgggctctcctttcaaaaagccacgtcgtgctgctgctggaagccaacagcctccggccagcagccctacccggggctcaacacacaggctgtggctctggacatccggatattaaaaggagcgttgctnctccctaccaacgcaaaaacaaaaataacatgt

SEQ ID NO: 263898 - DNA, 1477 bp, Homo Sapiens; identical to SEQ ID NO: 178643
  misc_feature (110)..(110): n is a, c, g, or t
  misc_feature (195)..(195): n is a, c, g, or t
  misc_feature (252)..(252): n is a, c, g, or t
  misc_feature (254)..(258): n is a, c, g, or t
  misc_feature (302)..(339): n is a, c, g, or t
  misc_feature (353)..(362): n is a, c, g, or t
  misc_feature (366)..(374): n is a, c, g, or t
  misc_feature (376)..(376): n is a, c, g, or t
  misc_feature (381)..(381): n is a, c, g, or t
  misc_feature (386)..(386): n is a, c, g, or t
  misc_feature (439)..(447): n is a, c, g, or t
  misc_feature (468)..(468): n is a, c, g, or t
  misc_feature (478)..(495): n is a, c, g, or t
  misc_feature (533)..(571): n is a, c, g, or t
  misc_feature (610)..(610): n is a, c, g, or t
  misc_feature (670)..(670): n is a, c, g, or t
  misc_feature (750)..(750): n is a, c, g, or t
  misc_feature (784)..(784): n is a, c, g, or t
  misc_feature (787)..(787): n is a, c, g, or t
  misc_feature (800)..(800): n is a, c, g, or t

SEQ ID NO: 263899 - DNA, 725 bp, Homo Sapiens
  misc_feature (475)..(475): n is a, c, g, or t
  misc_feature (505)..(505): n is a, c, g, or t
gggtggtctggcggagctgcggttggcttgtggcgtctccgccgccgccgccctcccttcctcttccccatcttcttctctcggtcccgggagcccccgcccggagagagtcgcggttgctgatcgtggtgcttgagtagagccgtggttggtgacagcatgacgagcgaggtgatagaagacgagaagcaattctattccaaggccaagacctactggaaacaaatcccacccacggtggaccggcatgcttggggggtatggccacatctccagcatcgacatcaacagctcccggaagtttcttgcagaggtttttgagggaaggcccgaacaagacaggaacgtcctgtgccctggactgtggagctggcattgggaggatcaccaagcggctgctcctgccgctgttcagagaggtggatatggtcgacataacggaggacttcctggttcaagccaagacctacctggngggaggagggcaagagggtgaggaactacnttctgttgtggggctccgggacttcaccccgggagccgggactctttacgacgtggatctgggaacccgtggggggatagggccacccttcaccgaatcgcaacctggcccgaagttcctgcggcgcctgaaaagggcaggcctcccgccccccaacgggaatattcggtccatcaaaagacaaacattggccccagggagggccgtgaaattctggaaa

SEQ ID NO: 263900 - DNA, 423 bp, Homo Sapiens
actttggttcgcggctgacacgccgactgtgcgccggcctgtcaatcaccgggagcagcaacagggagcacatggcaacgggctgcgggcgagctggccagcggcccgcccggggtcccagcccttcgaagaaagggacattcacgagcttctatctctaattctctgtcgcaggcatttcggccgtggaaccccaggctcggaggactgggtgtgagcgctgcccgggagaggctgacctgccgggaccggagtgcccggggacgctgtgcccccacttgcccaacgtgcggaatcggctaagcgcgtcggcctgcgcggggcacaagggacgacgcccgcctttctctctccgagaaggatccccaaacctcactctcttcactcctccccgttaaaaaaccccccaaccccccaaataac

SEQ ID NO: 263901 - DNA, 290 bp, Homo Sapiens
ggtgctccctgcagtgccttctccatggccccgccctccccgcgtgtgcgccaggcctggggtccccgggagagcagagcttgcgcctcgggcatagggacgtggggtgcaggcgccaacatcagtggcagcagccagggccgtggtccagtcccactcggggatggagtgggccggcggccaaaccagtcactcggggaggaatgcggaggagcgctcattccattctatttaattgcagtgtacaaaattgtgtttgtatatagaataaactgtctgttgacagcggt

SEQ ID NO: 263902 - DNA, 831 bp, Homo Sapiens
  misc_feature (540)..(697): n is a, c, g, or t
  misc_feature (722)..(746): n is a, c, g, or t
cagtcatttaaaaaatatttcagcctaagttttctaagaggtatgttgaatacatttttaaaagccagcttaagggtcacagcagccttagtttaggagaagagctaatcacaggtgaccactcaagttctttcaatgaagacctgatgatgtatttagttcccattttccacggtgattgactcaatttaagtgtattgtggctatatgtaatttacaggctgctttgcgttgcaggtgggaaaatctcccaggctggtgtgaggctgaactggggtaaaagaccccctgacccctcctcattcttctaaggtcaccacctcttagagggtctcttattttctttcagagatcaaatgcacagttatgctgtacaactaaattctgcagtcttggggaatccttacgagtaccaactattagtcactttttaaagtccccaaagtggagtgaggatagggggagtggaagcagtgtttggttcttactttacccaaactgtgtataaagaataaagttagcagaatgatgccacagtcnnnnnnnnnnnnnnnnnnnnnnnnnnnnnnnnnnnnnnnnnnnnnnnnnnnnnnnnnnnnnnnnnnnnnnnnnnnnnnnnnnnnnnnnnnnnnnnnnnnnnnnnnnnnnnnnnnnnnnnnnnnnnnnnnnnnnnnnnnnnnnnnnnnnnnnnnnnnnnttctttggcgccccccccgcccccnnnnnnnnnnnnnnnnnnnnnnnnngggggccgcccccccagagaaaagggaaagggggtattatttttcccaaaaaacccgggggaaagaaaaggggtggtttcccccc

SEQ ID NO: 263903 - DNA, 576 bp, Homo Sapiens
agcacctctagctgtctgcctcagtgggtcagaagcgatcaccctgttgatacacattgtatctctgtagtttcaggagacgctgccggtaacggcgtcaggtccgtggctgaggcccaaaccgtcttttctctcagagggtggggagggaggtgggggcagcagaggcctgggctgggtgccctgtgcacgccaccccacttccgccctacccctgggacgttggccttggctggctagttgggcaccgtgtgcctgccctccaaagggcctcctctacgccaatgaggcctcatctgggctctcgctgggcacgtggcttcatgtcagtaagcaagatgcttcttaataacccaccttctgccccactctattccttatcctgctgcccctgtaggggtcaagggccctccgtctacaccctcttcttctcctccatcctttattcagagtcatctcgcccttccccatgggtgggggaacctgtgtttgtttgtgtgcacatgtaaactttaaatattttaagcagaaagtccttacctcctgtaacacatcaataaagtacaatcattgtga

SEQ ID NO: 263904 - DNA, 599 bp, Homo Sapiens
gggtctgtcatgaaaccactaactgcattcctgactgaagagccatctgtcatttattggggaaggtcttcagttgagctctcagccttaggaaggaagcacgtggaggagggacggaggaggttcccttgctgggcatgcttcgtagagggccaggagcagcaggtcatgtgcacatgccgttgcagcacaagcttatgcttcccgtagccgtggcttttcattctgcacagtcccaggtcccagctcccctcttatggtttctggcataatgtgctttatctgattgactccaaacatcccgaaatgtcacctgcagatttctcgtgggaaccaatatgtacatgtttgcaattatgctgtgagaatttaaatgtgttagatggaaaatgctattggcagggaataatattaaccacaaggaacaaaacaccccccctgtcgggcccgcctcggcccctcaagaaacttttctaaaacctttccctttgggcgccccgggccccaataagggtaaagggaacatgggtccatagactgatttccctaggaaaaatccctgggcccatggactaagggcctggggatttcctcacccc

SEQ ID NO: 263905 - DNA, 327 bp, Homo Sapiens
ggtctgtgaagcaaaaagatgccttttaccatgaattcttgagtttacatcaataatattgtatattaaggggatcagaagtaggaaggaaaaaaataagagatagcagaggaaaaagaaaaacatttcctcttataacttctgaagtaatttgtaaaaaagatttgtagagtcaatcatgtgtttaaattattttatcacaaacttaacatggaagatattcctttttaactttgtggtaacttctttgaagttatttagaaatatcctttggaacaattattttattgtctaataaatattgacttctcttgaattaaaaaataa

SEQ ID NO: 263906 - DNA, 1451 bp, Homo Sapiens
  misc_feature (60)..(60): n is a, c, g, or t
  misc_feature (493)..(608): n is a, c, g, or t
  misc_feature (612)..(612): n is a, c, g, or t
  misc_feature (770)..(780): n is a, c, g, or t
  misc_feature (1166)..(1166): n is a, c, g, or t
  misc_feature (1230)..(1230): n is a, c, g, or t
caggcggccaagcaaagtggacctggccaaattgtttaacgccggagataatggctcccnatcctcgccaacgcggattgtcccaggagcgcctgctttccctaacttgccaatctggggaagtcgtagccgcagaccgcggatgagatccagaataccctgacctcgccccagttccaagcaggccctgggcatgttcagcgcagccttggcctcggggcagctgggccccctcatgtgccagttcggtctgcctgcagaggctgtggaggccgccaacaagggcgatgtggaagcgtttgccaaagccatgcagaacaacgccaagcccgagcagaaagagggcgacacgaaggacaagaaggacgaagaggaggacatgagcctggactgagccacgcgccgtcctccgaggaactgggcgcttgcagtgcgttgcacaccctcacctcccacccactgattattaataaagtcttttcttttacctgcnnnnnnnnnnnnnnnnnnnnnnnnnnnnnnnnnnnnnnnnnnnnnnnnnnnnnnnnnnnnnnnnnnnnnnnnnnnnnnnnnnnnnnnnnnnnnnnnnnnnnnnnnnnnnnnnnnnntaanaccttggtgagccccgctccggccccccaagaaattttctaagaacctttcccttggcacgggggggccccccacgcgcaaagtaacacatggtcccctcgggtttccccagggtaatcccggggcccttcacgcagccggcttggaatttcctcgcnnnnnnnnnnnccgcccgggaggcaaagccccaccgggttcaagacacaactcccaaagacgaggttttcgcgaggacatatacgcgggagctctcacacagcggggtgcttcggcgacctccctcttccaaaacaacaaatttacagccgcaggcgtctcagcgcactctctttgcagcaaaaattgtgggggggacccatagcctcagacgagccctcgcccggccagaacaggtggcgccgccacaatccccgaagatgccatatactggaagcctactcctttagagaatcccgctggaggagcgggagatgcgatagtaacacgaaactgcgaccgccccaatgacgggcgaaataataatacattatgcatcgaaagcgggcgcacaacgncccctgccatgcgcgcaaagacagaacgttctatgatacaccggtgtcgtcgcccacccacagnttattaatatcccgagagcacgttgggctagagtaactcctcctcacctcgtcagtgcgtaatcgtgtgtctggtgactgacgaatataaccactaccggtcgtaacgtcgcaccgtagactacaccacctgccgcctgtcaacgcaggacaacatcatatgtcgcgcaccgtgtgtctctattcgcgcacgctggacacacgtatctatctatatatgtg

SEQ ID NO: 263907 - DNA, 284 bp, Homo Sapiens
  misc_feature (24)..(24): n is a, c, g, or t
  misc_feature (36)..(36): n is a, c, g, or t
gtcacttgttggttggaggacaantgggcacttganaccctggtgacccatggaagggtggccttgcccactccgagggtcctggcctccctagcccaggcagagagtggggcacaggcaggccctttgggtgcttaagggctgggctgcatgtgggtagcccgagctcctactctgtctaaagagggccacagtggggagcaggggcacctctggaggcaggagaggccccccagcatgctgccctagtacgtgtttagaataaaaaccagtttgtttttcga

SEQ ID NO: 263908 - DNA, 1390 bp, Homo Sapiens
  misc_feature (46)..(46): n is a, c, g, or t
tcgagacgaccacgctgatgcgctgcgtacacgaatgttctcagtntcggtgcccgtgtctggtagccgccgtatgcgaaacactggagaatcactcctcgtggcgctgccgtctgcgcaccgctgatgcgcgtcgtcgagcatggactacacgcgtatcgactgctgctgtcctcaccctcattgcgctactgagtctgcagggcgtgcctctatgccgttcgtgcgcgtgtcgctgcgcggttgttgccgtctagtcagcagcttcgtctccaccgtcgtcgtactcgcgtgctgtcgctgcctactgcctgcacgagtcttgagcgcgcgcccctacctgcgtgttcccggtcctctcggagcgtcgttttacagcgccggtgtgagcttcgtccacgccgtgcttggcgtggcgtacgcctcggtgcgggcgggtgtgtacgtcggctgggcgttcttgctcgtgcgtcctggctggtcgggccgcgcttgcggggcgcagcgcgcgcatgttttccttcacgctctggtgggctgcgcggaggttctgtccctctgcctagcactgcgtcgcctgctgcggcctgtcgggtatggccccaaccgcctcgccgacgccgtgatctctgcgcgcacgcggtgcccgcgctgtctcgtttggcggtgcccttcatctaacgggtgccttggtctacggcgggccgtgaggccggggggtagccgcgagcgcgcgcgctcggcgagaccggggcttggcgccccgctcctcccgccttccggtgcggtgcggctacgagtgcctgtatctagcaaggctctcgggaggggcgacggcggctcatcaacgctctttgcttaggtatgggtcgtgttacggacgcgttttttcacgatgggtttttctcagagcagggatttattttcattacatgcaacatggacaaacactgttctggttttcacgacaatttgaattcaaagtaatatgtttttctaaaattcagtgtatttatttggccatatggatgctccttgtgttcttggtcacatattaaagaaactggcactttggctgcaagaacaaataaaaaatatcataaatccaactggtctttgatttgggtctaggttaataactaaagaaccattcagcaataatggcttgaaacatttatatatcctatgaaaccgcaattagttaagaggctgctgattctaataactatgacaccagccaagggagtgaggggagaaatgttaactctggatgccaaattcagagcaaagtatctattatctccttctcacttttgcagtatcctataaataaagtgggtggggggagaattatatggaataatgttaaataaaagtgcatacagatccg

SEQ ID NO: 263909 - DNA, 437 bp, Homo Sapiens
aaatcctcctccctgtcttgtctgaaaatggcctcccccccacaggacaattttaaaagaatccttaattgccagggtaagcccaagtggagtaggtctgttgctggcacgtgaatactggctgaacctgtgcaatgtagtaattgctaaagttggcatctgctacatagggggctggctggtaatagcaagtgacattagccacattaggaatgacattttggtcagctaacacccggatagccagcatggtgataaggtttaaagtctgtcttctttcatgtcccatcaggacactgtgctctcatttaccactccatgaagggtcatgagatactcatacttgcggtcttccaatccacaaagtggttctgcaaataggactccagttttctctgcttcttactgagttttttactaacacataccactacttc

SEQ ID NO: 263910 - DNA, 633 bp, Homo Sapiens
  misc_feature (58)..(58): n is a, c, g, or t
  misc_feature (342)..(342): n is a, c, g, or t
  misc_feature (345)..(345): n is a, c, g, or t
  misc_feature (354)..(357): n is a, c, g, or t
accgcaagtatgagtatctcatgacccttcatggagtggtaaatgagagcacagtgtnctcgatgggacatgaaagaagacagactttaaaccttatcaccatgctggctatccgggtgttagctgaccaaaatgtcattcctaatgtggctaatgtcacttgctattaccagccagccccctatgtagcagatgccaactttagcaattactacattgcacaggttcagccagtattcacgtgccagcaacagacctactccacttggctaccctgcaattaagaatcatttaaaaatgtcctgtggggaagccatttcagacaagacaggagagaaaaanaangaaaagagnnnnaaaagagtgatccagcccttattagggatgtgttttgtgcaatgatgatatgctcctggttttaagtttggcaaagcttatgtatcttttaatagatgggagcatgatctcgaaaggatccttttcccttctcttattctcctacccaattggattctatcctgcaaaaaaagagagacctgtcattagaagcaaccaggttctcctgatacaagagaagaaatgtgtgatgacaatatgggtttgctgtatctgctcccatagctttgccatagg

SEQ ID NO: 263911 - DNA, 364 bp, Homo Sapiens
  misc_feature (65)..(90): n is a, c, g, or t
ccctgcaattaagaatcatttaaaaatgtcctgtggggaagccatttcagacaagacaggagagnnnnnnnnnnnnnnnnnnnnnnnnnngagtgatccagcccttattagggatgtgttttgtgcaatgatgatatgctcctggttttaagtttggcaaagcttatgtatcttttaatagaagtgggagcatgatctcgaaaggatccttttcccttctcttattctcctacccaattggattctatcctgcaaaaaaagagagacctgtcattagaagcaaccaggttctcctgatacaagagaagaaatgtgtgatgacaatatgggtttgctgtatctgctccaatagctttgacatagg

SEQ ID NO: 263912 - DNA, 1217 bp, Homo Sapiens
  misc_feature (159)..(195): n is a, c, g, or t
  misc_feature (737)..(745): n is a, c, g, or t
  misc_feature (1142)..(1142): n is a, c, g, or t
tggtacggccggaagtacgggatatgtcgacccacgcgtcgcggacgcgtggggtccccgcgctgctggtcccggggtcctgaaccgcgggcggcccgctccctctgctggcatggcccccccgcccgcgtgccggtccccgatgtcaccgccgcgccnnnnnnnnnnnnnnnnnnnnnnnnnnnnnnnnnnnnnggcgcccgggcccgcgccgagcccgcgggagtgccgtccccgcgcagagccgcccatgcgtggactgccacgccttcgagttcatgcagcgcgccctgcaggacctgcggaagacagcctgcagcctggacgcgcggacggagaccctactgctgcaggcagagcgccgtgcccctgtgtgcctgctggccagcggggcactgaggaccacgctgctccgtgtgaataaatgcccagtggcctaaaataattacaaaaatgaacacaccaccccttgatgagcctagaacccacagaaaacaaaaataaatgaaataacttcacactctacaactgtaaccccactcactcgccctggtaaaattttatttttgggggccccttgggccctctcaaaaaagtttttcgaacacttttcctttggggccccggggccccatacggaagacgggaacggggctcataggtgtgttccccaaggaaaaccgcgggtcataaaatagggggtcgggagctctgcccccaaaacaaaaaacacgccnnnnnnnnnaaccgccggatggcttctttagaaacaatactcccagaggggaagctccgggggcgggcctttcccgggggactcatatacacgcgcgggaggcccgataggtgacctctctccactattaatatacttggcgaccccggcctctcgcggcaatatatatttgccacaaaaacagtggcttgaaacactccctcgtaaaggatgttttctgcgcccacacattgtggaaaaaccctcttctacagatacaccgggtgtgtgagagaacattttggtgataacctccgagtggcgcgattatttcagcccccccttgttgcaccgcccgtgtggggatataaatatattttggccccgccgggggtgcacaaaaggggggggcgcgtgccgaagaaanaagtggtccgcacataataatggggcggcatcctcttttataaaaacacaacaaacggtgggagtggaatactct

SEQ ID NO: 263913 - DNA, 402 bp, Homo Sapiens
  misc_feature (57)..(57): n is a, c, g, or t
gggtgtttaatttttatacttttcaacaccccattttacttgttgcctttgtcagangaaataagggaggtatcctacctcagagtattttggtcattatactttctgtgtttaccttcaacatgtgtcacgtggccagcggctttttcttctcttccctctgcacctacctgcaccttctctgcctttccctggaggggatgtatttatgttatttattcccagtgtttctgctttcatgtcctcctcagtggagagatttggaaactcatcatgtggattcaccagccagctgctggaattgcctgaagagcgatttgtttgtaatgtctgcctcattcacgttcttatgaagtagaaaagactgtgtttctgcctcagttgcctctgtctttccaccta

SEQ ID NO: 263914 - DNA, 872 bp, Homo Sapiens
ggctcggttgactcaagagtgtggagaagatctcagtaaacaggaggtggataaagtactaaaggactgctgtgtaagctatggtggcatgtggtaccttaaagggacagtacagtcttgacaatagtagcaaactactaacccagcaaatctaagcccaaggaagaagggcggaaccagaagtagggcctcgacttgcttcagacgacacagagcaagaggaactgaccatctcatgacctgtggcattgcacggtgcagtggacagaagggattatcctcagccagtcacagggtcagcttaagttagttagatcactcccagaagagaccagctgggaccttctttgcagtacaatttgaaattcctgatgtattttgcttattatttggtttcattctcataataaagagagtgtatactgacatgggcaggatgataaaaatcatggtttaatattttcttttgtaaacttaatgccaacaaggtctaagttatgtttacaacatgaagaaaacctcaaagttcttaatttttaaaatgcctagaagacaatatttagtcttggattatctatctgctaagacctccaccaatttcattaaaccaaattgaattattctattcttgggattctgtggccacttcacctttgacaacaacctactttatgtagcagtctcaactgtttacatgaaccatagcaaaaaaatcagaatcaaatccatctccttttaatgtttgcagaaagatgcaaacaaaaccaggtaagtatggaacaatgtgtaagtgaggttatcacactttgatgtaaaaatttctattttgtgtatttttaaaataaatgcaaacactaaactagcaaaaaaaa

SEQ ID NO: 263915 - DNA, 913 bp, Homo Sapiens; identical to SEQ ID NO: 7668
  misc_feature (498)..(500): n is a, c, g, or t
  misc_feature (512)..(568): n is a, c, g, or t
  misc_feature (581)..(640): n is a, c, g, or t
  misc_feature (662)..(662): n is a, c, g, or t
  misc_feature (673)..(686): n is a, c, g, or t

SEQ ID NO: 263916 - DNA, 196 bp, Homo Sapiens
ggtgtcctgaaattccaccacgggggtcaccctggggggttagggacctatttttaacactagggggctggcccactaggagggctggccctaagatacagacccccccaactccccaaagcggggaggagatatttattttggggagagtttggaggggagggagaatttattaataaaagaatctttaacttta

SEQ ID NO: 263917 - DNA, 666 bp, Homo Sapiens
  misc_feature (611)..(611): n is a, c, g, or t
ggcacgagggaagacggtcgtatgctgctcatagcagtgctggaggccattgggggcaaggcctcccgcagcctcatggactgctttgccgatatcctgttcgccctgaacaagcactgcttcagcctcctgagcatgtggatcaaggaggccctgcagccacctggtttcccctctgcccgcctcagccctgaacagaaggataccttcagccagcagatccttcgcgagcgagtgaacaagaggcgggtgaaggagatggtgaaggagttcacactgctgtgccggggtctccatggcacagattacacagctgactactgaggggtgcccccatcccatccaccccttctcttcatccttccctattcccaaagagtaaacctggaccctcactgctgtctctgcctcctttctgctgccaccaccacctaactgaaagcctgggtccagaaggcctgggggaaggatgggaggatgcttggacccaggccttgggagggaatggtgggaacatcctctagctcccaggttggaagagatactactgtagccaagccacctaggctggagcccttcagaatactgtcattgtccttggggcggggggngggttgcagtagtgtcatcaacccccccatccccattaaattaatcccaacatgc

SEQ ID NO: 263918 - DNA, 1252 bp, Homo Sapiens
  misc_feature (103)..(113): n is a, c, g, or t
  misc_feature (168)..(220): n is a, c, g, or t
  misc_feature (319)..(337): n is a, c, g, or t
  misc_feature (544)..(558): n is a, c, g, or t
  misc_feature (734)..(776): n is a, c, g, or t
  misc_feature (801)..(917): n is a, c, g, or t
ccacacccccactggggggggcccaaaaaaattatttttttatatagccgcggccaaaaggggggcggggccccaaacagggggttggaccttcaaatatttnnnnnnnnnnntggggcggggaattttttccagggggtgtttctcacttcccaattgcccccccgnnnnnnnnnnnnnnnnnnnnnnnnnnnnnnnnnnnnnnnnnnnnnnnnnnnnnaagaaaaaataggcctctttttaaaattagagaaaattatttcaccgacagcccagggtttttcttctgtcccggaaaatggagagtttggggccacannnnnnnnnnnnnnnnnnnccgcgtataaaatatttttgtgaaattatttttgggaaggccctttccgcgcctttgtggggagatctcccccccctgggttggggaataagggaattccccccagggtaaaattggacccccttccaaggaaaacttcccccattcttgggatatttggttttccaggagaaccgccttccgggttttccccgccccggggggcgnnnnnnnnnnnnnnngggtgtaggaaatcccaaaggcccctatggttcattgggcccagggaattctcccttaagggaaaacaaggctattgggcccatggtttcacttttccctacttggggccccgcggcgccaaaaacgaattggtcttagaaagcttcctcgaggggccgaggcgggccgacaaggnnnnnnnnnnnnnnnnnnnnnnnnnnnnnnnnnnnnnnnnnnnatcccccaccacgctgcccaaaaannnnnnnnnnnnnnnnnnnnnnnnnnnnnnnnnnnnnnnnnnnnnnnnnnnnnnnnnnnnnnnnnnnnnnnnnnnnnnnnnnnnnnnnnnnnnnnnnnnnnnnnnnnnnnnnnnnnnctaggttaacttcttaaaacaatgaaggaatcacagcgttaacattgtttgtaaagtgtagtatttgtcaggcaactgaaacaatcagacttccaaatgaagtcatttgcaggctgtgaccaacttttccctgaattcaaattgacaaaactactttgtagagatgcaagagtcttgcctcacttccaggaatgatgtatggattcatgcgccagaaaggaaaaacaatagtcaagtcagactaaaatgagagggagaacacacgcccgaatgttgctcacatacccagaagcaggagtaagcttgcacttttaacaaatgcctcttaccaagag

SEQ ID NO: 263919 - DNA, 787 bp, Homo Sapiens
  misc_feature (645)..(670): n is a, c, g, or t
gggaacttgccgcaactggccaacatgtttcttcagtatttgagccagagcctgcactgaccagaggaggtaggggggaagccatggcttctgatctccactccactttatttctctgggaaaaataggctgcaggtctccagagcatatcgatgcagtactgtactagagctgttgtgactgattcactcaaactttcctgcatacccctgtgccaggccttgggtttacagcataagttcagactaaagagaatggagaactattgtggtgcaacctggcaaatccctcagaggacagagctaaggtggacagggattacctagattggatcctacttgggctatcacagagcattgaccattggcttccctcatctgaggcgtgggagagcagactggatagatgagaattgttttaaaacaattgtgaacagaaactgaagatggtacagttctacatctgcacctgcccttttttcataccacaaaagtattttttgagtactgtactgactttttgctagtttctattctgggaccgagttcacagataaatccattggtttgtatccttgagaaactttgtttttgtggaagtaagaaagttatctactagattatttcctctaataaaatcttttannnnnnnnnnnnnnnnnnnnnnnnnnaacatggtcggcccgcctcggcccctcgaggaagctttctaagaccaattcgttttgggcgcgcggggccccagaagggtaattggaacatgggtccataagctgtttttcctaagg

SEQ ID NO: 263920 - DNA, 316 bp, Homo Sapiens
  misc_feature (149)..(187): n is a, c, g, or t
cacgcgcagtgtccatcagtatcagtgcctgcctgagttaggaaaattacattcctggttctgtattgaggagaaggatgtataaagcaacatgaaacattagccttccttttattttaaagactaatgttaattgttcttaaaactgnnnnnnnnnnnnnnnnnnnnnnnnnnnnnnnnnnnnnnnaatgaagtattgctagctgaagccagtttgacatagagagatgtcagattgatttgaaaggtgtgcagcctgatttaaaaccaaaccctgaacccttttaaagaacaataaaacatattttacacgcaa

SEQ ID NO: 263921 - DNA, 348 bp, Homo Sapiens
  misc_feature (274)..(274): n is a, c, g, or t
gggggaccttccggggttcctaagccgcggggcccctcgctgcccctcgaggccctttccctgacctaggctttggcctgggctactcgttccggagccgccatgtcgtccgacttcgaaggttacgagcaggacttcgcggtgctcactgcagagatcaccagcaagattgcgagggtcccacgactcccgcctgatgaaaagaaacagatggttgcaaatgtggagaaacagcttgaagaagcgaaagaacttgcttgaacagatggatttnggaagtccgagagataccaccccaaagttcgaggggatgttacagcaacagattgaggaagctacaaacaagaa

SEQ ID NO: 263922 - DNA, 514 bp, Homo Sapiens
ggggagtcctgagctgcgtcccggagcccacggtggtcatggctgccagagcgctctgcatgctggggctggtcctggccttgctgtcctccagctctgctgaggagtacgtgggcctgtctgcaaaccagtgtgccgtgccagccaaggacagggtggactgcggctacccccatgtcacccccaaggagtgcaacaaccggggctgctgctttgactccaggatccctggagtgccttggtgtttcaagcccctgcaggaagcagaatgcaccttctgaggcacctccagctgcccccggccgggggatgcgaggctcggagcacccttgcccggctgtgattgctgccaggcactgttcatctcagcttttctgtccctttgctcccggcaagcgcttctgctgaaagttcatatctggagcctgatgtcttaacgaataaaggtcccatgctccacccgaggacagttcttcgtgcccgcggactcttcccgaacgcccacaagcgctgt

SEQ ID NO: 263923 - DNA, 479 bp, Homo Sapiens
ctatgacaatgacatgtatttaacacgttatttcacattgtacaaatccttagattctctttattcactggtccatttctacaacaaatacatccaaaacactatataataaaattatttacaacatttccaaatgagaagattgcttttgcccccactactgctattcacacacagtacttccacggcacaatacattaggagatctaaaaatgctcaccctgtactctaggctgcttaggaaatgtgaaaactagtaacatttataatggcattagctcctttcaatacaagacaacattttagaaaccttgaacttcaactcgcaacaccaaaagggctcaacagtcctgctttccccattgcactttatgaaacaggttgcagggactaggaaaagggccacattattaaaattactaactgtacagaaattgatttcccggccgtaatgggactctgcgttataccactgctcc

SEQ ID NO: 263924 - DNA, 422 bp, Homo Sapiens
  misc_feature (16)..(16): n is a, c, g, or t
  misc_feature (25)..(25): n is a, c, g, or t
  misc_feature (288)..(288): n is a, c, g, or t
cgcaacccgttcccanaaagtgccnaggggaaaagccaggactgttgaacccccttttggtgttgccgagttgaagttccaaggtttcctaaaatgttgtccttgtattgaaaggagcctaatgcccattataaatgttacctagttttcacatttcctaagcagccctagagtacagggtgagcacttttagatctcctaatgtattgtgccgtggaagtactgtgtgtgaatagcagtagtgggggcaaaagcaatcttctcatttggaaatgttgtaaataattntattatatagtgttttggatgtatttgttgtagaaatggaccagtgaataaagagaatctaaggatttgtacaatgtgaaataacgtgttaaataaatgtcattgtcatagaacataaagttatgttattggta

SEQ ID NO: 263925 - DNA, 681 bp, Homo Sapiens
gggggaccctccccttcctcaccagagccaccgtgactgtttctgatgacctggagagtcaacaacaaccagaaaggtttctgcccagagcaggcttcttaaggcctttacgaagttttgtgccttccaagtgctgaagaagacctggtcagcctaaatcttcccagtcccgctgtggagctgtcagtcaccggagtaatgagctcctggttcctcgggagtccttcgtgctgtgtggcagggttcctctctagacaagtacacaggccctgccaccctgacatcaaactgttgtactatgatcacagtccctgtgccatccttttccaagactggggctcacaccatgtttttgaatgagaatccctgctggttgagacttttgcttccacttgtttccttggagatgttcttccaagagcataatgtacattaaagtcttccagttgagcctattaaaataaccgggaccgagaggctctaaatcttgtcgggcgcgcctacggcccctcgaaggaaccttttcctaaacccatttcgttttgggccgccgccgggtccctctgtaaggataaagttggcaacactgggcgcccataaggtttgcctctcccctaggagacaacacccgtgggccccatgaaacccaaacggggtctgagacattccctcccgcccaat

SEQ ID NO: 263926 - DNA, 745 bp, Homo Sapiens; identical to SEQ ID NO: 8137
  misc_feature (487)..(583): n is a, c, g, or t
  misc_feature (587)..(587): n is a, c, g, or t
  misc_feature (593)..(593): n is a, c, g, or t

SEQ ID NO: 263927 - DNA, 321 bp, Homo Sapiens
gggggcagacgaccgggagcacatagcggccgggagcccggctgcacaccaggctgctgctttgtccgtctatccacccgcccacccgcccccaccccaccggcagcgtcccaggtgcggggccgggaaccacacaccccactgggccggccacagtctggacccgcacgtcctgttcaaaagcagactcgggaactgcctgaatgtggtttgggacacgagacctcatcatattgatgagcgaacaaacaagaacatttcctccctcccctcctttgaattgaaatggcacattaagacttgtcacggcttctcactggg

SEQ ID NO: 263928 - DNA, 597 bp, Homo Sapiens
  misc_feature (13)..(13): n is a, c, g, or t
attcggcacaggnggagaccaaagttatcaaggaaatggtataggattttgaagcaagagcaccccgagttggcagtcctcgcagactcggttgaccttcaggagtccacagggatagcttccgacagctccagcgactcttccagctcctccagctccagttcgtcagactccgactcagagtgcgagtctggatccgagggcgatgggacagtgcaccgcaggaagaagaggaggacgtgcagcatggtgggaaacggggacaccacctcccaggacgactgtgtcagcaaagagcgcagctcctccaggtgacccagcaaggctgttgtctgtatggaaggacacgctcgcggcaagggcagggcctggggagggtggcctgtccagtcctgcagacaaggggaggcctgacagagcccaagaatgaggacaccctcggcacgggaacccattcacttagcgtttgctccagtagctttccctctgctaccaatgcagataaacgcggcttgttttactcaggcaagagaatgtgaatagtgccaagaaaatcctttacattatttaataaaaattgaatccattttcaaaaat

SEQ ID NO: 263929 - DNA, 1389 bp, Homo Sapiens
  misc_feature (1126)..(1126): n is a, c, g, or t
gggcagcacatctctgattctcccatcatcgatgggcagcagcagtcggaaaccccaaccccctcagacattgctgacattgacaacctggagcaggccgaccaggagagggaggtgaagaggcggaagtacgagtgcacaatatgtggacgcaaatttatccagaaaagccactggagggaacacatgtacatacacaccgggaagcctttcaagtgcagcacttgtgacaaaagcttttgcagggccaaccaggctgcccgccacgtgtgcctcaaccagagcatcgacacttacaccatggtggacaaacagactctggaactctgcacatttgaagaagggagtcagatggacaacatgctggtgcaaacaaacaaaccctacaaatgcaacttgtgtgacaaaacattctccactcccaatgaggttgttaaacattcatgccaaaaccagaactcggatgtttttgccctagacgaagggcgatccattctcctgggcagtggggactcggaagtaacggagcctgaccacccagtgttagcttccatcaaaaaggaacaagaaaccgtcttactagactgaatgtcacttatctttttaaaaaactctcatttttacaaagactatcttccctcccttccctgaattcagaactgtagttctccatggcatgatacaaacaggtccttgttctcttctcctcttccccttttccacatcccagccccacctctgtaaaggcttgtgcattataaacctggaatgtatcgactttctttcaggggatatggaaagataatggtcattatacttataaactcaaatttgagaggttttagattattcagaagcatacttggaactaatgaagggtatataataaaacaactggaatccaattggtaagctaaaattatgactttccctgggtaaaaagtcttctcagaaaaacaatgtcagaaaataacagcgtgctgcttagaaatacggctgggctctgtactatgcaaaatctagaaagtgtggggaaactttaaacccaagaaaacgttcttagtattcatcctccaggtgtcttacttcagaatgcattccttgagattatgtccacttaagaganatcatcagttaagaaatctactttaagaaaaaccaaaaggagaaacagtataatgtgcgtgggcatcttaattttgggtccaccttgacaagctgtgagttgggtgttgcgcacgaaaaatggtggggcctggcatcaaccgcggataagcgtcttaatatggtgggctttcaggtgagacacaaagcggttggggctcggcgaaggttaaacactgatggatcaaagggttgaaaaaaggtatgccgaatttacaacacggt

SEQ ID NO: 263930 - DNA, 503 bp, Homo Sapiens; identical to SEQ ID NO: 178653
  misc_feature (256)..(452): n is a, c, g, or t

SEQ ID NO: 263931 - DNA, 1160 bp, Homo Sapiens
  misc_feature (868)..(879): n is a, c, g, or t
gatttgggtgggaggagagtcccaaagccgccctaggttccatggacccgagggtttgttcctaggggaaaccaggctgatgggccccatggttccaaattggcctgaatggggcggcgcgcgccgcaaaccggaatggtctgggagaagctttttcgagggcccgagggcgagccgaacagtgggaggcgggtaaatataggaggggggccccgttagcgttataattttatttcaaagaaaacagaaacagaacaaaaacaacctttgcatttgagggaggagattattttacagttttggaaaagaataagaacaattgtatcaggaaacaaatgattatgacagaaactcgcatccgacagctgcagtgaatccacgaggacacagaccatgctggtggccacagcagggccacaggtgaatccacaaggaaacacagaccatgctggcagccacggcagggccacagggcacggtctccatgtgttaatgtttaatgtcagcattttcatatggacagaaatcacgaagaaatcctgcaaaaatggcatcaatatgaacaaacccttgttataaaaagcaaaatattgataggaacaatatcttccagcgtgtgcgtttcacatttaggctttactgtatgaaactaagtcaaaattagaagcactggctatctccaccgacatatattttaactgaatataaacttcaaggcttttcttaaccataggcttaagaggatttcttttatgcagaatgtgaccagagcaacaaatacacctaaactgtttgaagatgggaaatttatacatgaaatgagctagcaggcttcctttggtatggggacactgttattctaaaattnnnnnnnnnnnnttgaatggaagtggactgcttcaagatggtaacacttgtagctgcaatttttagcccagtagagaataaaatggaaaggcagctacatgctgactgcacaagcaggtgcaccccaagccaggaggggtatcttcaccactttccccacggccatgaccttctgataactgaaatgggaaaacacttgggagagaaaaacaccaacaacacttggcttctcttcagcacagcggccaggacgaagcgggaggccactgatcgaagggcccccagtggaccgg

SEQ ID NO: 263932 - DNA, 614 bp, Homo Sapiens
  misc_feature (111)..(244): n is a, c, g, or t
  misc_feature (257)..(320): n is a, c, g, or t
  misc_feature (326)..(480): n is a, c, g, or t
  misc_feature (487)..(496): n is a, c, g, or t
ggggctgattaaagtttctataaggtatgtttattcttaaggatatctactctaacacctgtaaatgtagggtgatcaattagtaaattaataaatctgaatcaattaatnnnnnnnnnnnnnnnnnnnnnnnnnnnnnnnnnnnnnnnnnnnnnnnnnnnnnnnnnnnnnnnnnnnnnnnnnnnnnnnnnnnnnnnnnnnnnnnnnnnnnnnnnnnnnnnnnnnnnnnnnnnnnnnnnnnnnnctttgggggcccnnnnnnnnnnnnnnnnnnnnnnnnnnnnnnnnnnnnnnnnnnnnnnnnnnnnnnnnnnnnnnnnggggcnnnnnnnnnnnnnnnnnnnnnnnnnnnnnnnnnnnnnnnnnnnnnnnnnnnnnnnnnnnnnnnnnnnnnnnnnnnnnnnnnnnnnnnnnnnnnnnnnnnnnnnnnnnnnnnnnnnnnnnnnnnnnnnnnnnnnnnnnnnnnnnnnnnnnnnnnnnaatttannnnnnnnnngggcctttttgggaagtggggggaattttttaaaaatttttgccgcgggggaaccccttccaaaaggggttttggaccctaaatcccccgggggaaaaaccccctttgggccctgtgg

SEQ ID NO: 263933 - DNA, 1401 bp, Homo Sapiens
  misc_feature (85)..(85): n is a, c, g, or t
  misc_feature (367)..(367): n is a, c, g, or t
  misc_feature (521)..(521): n is a, c, g, or t
  misc_feature (1276)..(1277): n is a, c, g, or t
  misc_feature (1282)..(1282): n is a, c, g, or t
  misc_feature (1331)..(1331): n is a, c, g, or t
gggttgtgccaccacattgagaatgaggggctcactttattggtgggtcccacaagagactgttcatcatggccccgcgagcgcngccaaggcggcggccgctcacacaggcgcatggtaagctgcgcaagatcattagcatgcgcctccaaagctatctttgttggataacggttttataacaggaggcgcgggggtggacacctcaggcgagtaattagtgtggtgtcgcccgcaatcgtgttcttccagtcatgccgcggccggtccccgccaccgcgagtttagtatgcgcgaggcggggcataaagggtgggcggcgcacgaagaagaatgagtcgtctaaacttcgacctggcgtccaagnagagtgcacgcggagaggcgcaacaggtgtcagtatgatctctcttataagttcgtggctgagggcgcatagtggggcgcgacatttttctgtgcacagagggcgctttttctgcagtgtacagcgggcgggacacaggagctcaaattcggtntaggcgaccggggggggcctttttattgcgcccgacgcctgtattttagcgggggtcacgtgagccaaaattgcggctaatcgacaaataagggggcgtataatatcccgggcccaacattaccgctgcggccgggaatgaacgggtggatacaagggcggccggcgcgacgcgttcgaatttgtggataattacgaaagggcgtcggccggtaagagtcttgccaggagggtagctgagggtccccaggtagatgagcccctataaggaacgtgccgatgctgggagggtgggtggcggaaaccgattccggtttgccggcccgaggggtttggttaggtagtggagaatccccaggcgcctggtctatgacacaggatcgttcctcggaagccaggtagggagcatgttcgctttccgggtgggcccgcgcgccgaacgagatggtgtagggagcttttcgatggccgagggggccgccaggttttctttgattgttgttctttctctttccgccgtcattgttattaggaagcaaaaaaatgtacagttacaagaagcattttccaaacagaggttaaatatgagctgaaaagtgtaaaaaaggaagaggaacatcactttacaaatcattaaattaaacaaataaacaaacagaacccaaagaaccaaccccccatgctgagttctctccttgtgcaactctgcaaaatgagaacagaaaatgaagtgggccgtggaggtgggggccctgnngaggngcgggactcggggagccaggaacaggcaggagggggctgctggggcatnggacgctggctttctgccccgtgtgcctggtgggtttctggtaacctggtcgtcgtacctggtgggctct

SEQ ID NO: 263934 - DNA, 1561 bp, Homo Sapiens; identical to SEQ ID NO: 7985
  misc_feature (893)..(970): n is a, c, g, or t
  misc_feature (1430)..(1482): n is a, c, g, or t

SEQ ID NO: 263935 - DNA, 552 bp, Homo Sapiens; identical to SEQ ID NO: 97836

SEQ ID NO: 263936 - DNA, 241 bp, Homo Sapiens
ggtcaccatgtcccccggtcaccagtcctcttgctgccccatggttcataggtcatagaaggcagcaatgcactgactgggccacatcttgaaaactcgtggaaagggaaaggggaggagatgggactttgaccacacacagtgatgcctcacaccctgaaggtgggggattttgtacctgtttgtacaactttggtcttgatgggaaaaatggagaattaaaaagtgttttgagaagctt

SEQ ID NO: 263937 - DNA, 314 bp, Homo Sapiens
atattgtttcaaataattttattaagagttaactttttaggtattttcccttttaatgtggttttgaaatgttaattgcatttttacacatgatgcattcagtggacactcttttttcctaattataactcatctctgaatgcattgtgccaatcaagagtaagataggattcagtgcgcaaaatttgcttttgatgcttattaagagtaaacccatgaatttgaatttttatattatgcttggtacttggaattgatatataccttattaaagcttgaaaacatttagcatttgaatagtaagtttcatcacg

SEQ ID NO: 263938 - DNA, 1398 bp, Homo Sapiens; identical to SEQ ID NO: 8007
  misc_feature (108)..(206): n is a, c, g, or t
  misc_feature (395)..(403): n is a, c, g, or t
  misc_feature (556)..(556): n is a, c, g, or t
  misc_feature (678)..(678): n is a, c, g, or t
  misc_feature (683)..(683): n is a, c, g, or t
  misc_feature (822)..(822): n is a, c, g, or t
  misc_feature (953)..(953): n is a, c, g, or t
  misc_feature (962)..(963): n is a, c, g, or t
  misc_feature (965)..(965): n is a, c, g, or t
  misc_feature (982)..(982): n is a, c, g, or t
  misc_feature (1009)..(1009): n is a, c, g, or t
  misc_feature (1032)..(1032): n is a, c, g, or t
  misc_feature (1159)..(1159): n is a, c, g, or t
  misc_feature (1247)..(1247): n is a, c, g, or t
  misc_feature (1261)..(1261): n is a, c, g, or t
  misc_feature (1302)..(1302): n is a, c, g, or t
  misc_feature (1307)..(1307): n is a, c, g, or t
  misc_feature (1358)..(1358): n is a, c, g, or t

SEQ ID NO: 263939 - DNA, 215 bp, Homo Sapiens
gggattggctggtgagccggccgcacgcggaggatcctaaggagcagctctgttgcgacataggccgagcagcgaggcccagctccctgaaacaacagtaacctacccctgtgggtcatcatcatgccctccgacctggccaagaagaaggcagccaaaaagaaggaggctgccaaagctcgacagcggcccagaaaaggacatgaagaaaatgg

SEQ ID NO: 263940 - DNA, 1339 bp, Homo Sapiens
  misc_feature (456)..(472): n is a, c, g, or t
  misc_feature (828)..(837): n is a, c, g, or t
  misc_feature (903)..(911): n is a, c, g, or t
  misc_feature (966)..(966): n is a, c, g, or t
  misc_feature (1089)..(1089): n is a, c, g, or t
  misc_feature (1139)..(1139): n is a, c, g, or t
ttgggcacgtgtgctgggatctactttccctctgggatttgcccacgtacccaggtctggctggggcccaggcccggatgcagaggcctgcagggcctctgtcaattgtacgcgccaccaagtgccttcaacacagcttgtctcttgcctgccactgtgtgaatcggcgacggagcactgcacctgcctccagccgccggctgtgcagtcctgggtcctcctttctgagggcccgtgtaaatatgtacatttctcaggctaggccagcaggggctgcccgagtctgtttttcatgcgatgacacttgtacaattaattatcttttcaaaggtacttggataataatgaaataaaactgtttttgaacctgacacaagaaaccgaaacaagccaagaacaaacccccaagggctcctccccacccccgacgttgctcggcggcgcaaaacgcgcgcnnnnnnnnnnnnnnnnnccttgccggcggcccccggggccccccaaaagaattttgcaaaaccgttgctgtgggcggcccaccggcccccgaaaaggagagcgggaaatgggggcgtaaagcgggttttcccgccgggagaaaccccgcacgcctctgggctgaagggcggctggaacttttcccccccaaaacaaaaaagagacgccccccggggcggggccaaaccccgcgggggggtggtctcgggacgcacatcgcccgcaaaaaaccaacacttccccttggcaccacacacaaactcaccccgcggcgcgcctccgtaagtgcgcagacagtggggggtggttactcaaacagaggcccgccggggnnnnnnnnnnaccaagaggcgcaccccttaaaatatttttttctctactccaacccggccgatggggcgccccccnnnnnnnnntcgagtgaaggggcgtgcgtcagcgctatcgcggggcaactggaaaaatgtcttntccggggttctctttgtacaaaaaaatgtcgcttcggctgcacgtgcgcggaccagaaccgctgtagttctaacgtaacccgcgaactccagccattttttatactaaataaatacgcgcccntttcttccttaagaagcacaaacgccgggtgggcgcctataagcgagggngggtggtgcccgccgcgcgggggtaatgatgccgtgacgacggggaggacgcgggggggtgtgtcctctaacaaacaccccttcttggtggttgaaactccccccgactgttaagcgctcgtaccaaaataaacaactttattgtcgcccgcccctatggtgtgggcgggggaacacagacagtagggggggaccagcac

SEQ ID NO: 263941 - DNA, 254 bp, Homo Sapiens
tttaaaaataatccggtttccagaaactgtcaaatgtacccatatttgtattaagagatgttggggaatttttgtacaatgaatttacatttatttatggtgacatatttacgcttgtgatcaaataatgatgttaaattcttaaatcatatttgctatgcagctgaagatgatattttgatttgtattttgggggtacctgtgttgagttgataaacatttccatcttcattaaaactgcttccaaactagtt

SEQ ID NO: 263942 - DNA, 453 bp, Homo Sapiens; identical to SEQ ID NO: 178660

SEQ ID NO: 263943 - DNA, 394 bp, Homo Sapiens
  misc_feature (20)..(20): n is a, c, g, or t
  misc_feature (42)..(42): n is a, c, g, or t
cccaggaatctggtcgcttncccccagggggactgaatgggncaaaatcgcccctgtggctggactgtgaaccatccctgatggggcctgaccgcgggagctgaggaagcgccgctccaccgtctgccctccaaggacccgcatggaggcagtgggctggcagcttcctgctgctccctgtcagagtcaaagcacaaatcctcaggacgggctcaagggccagggcagccgagggaagctccaggtggggaccacgtcttcctgaggttggtgcccactggctgggaccctttgcagtggggtggcctcccctctgtctgcctggtggagggagccgtgggcgtggggacgtgactgaataaagccaccatgggtggatgtgcttggagcctgt

SEQ ID NO: 263944 - DNA, 950 bp, Homo Sapiens
  misc_feature (26)..(27): n is a, c, g, or t
  misc_feature (485)..(496): n is a, c, g, or t
  misc_feature (538)..(558): n is a, c, g, or t
  misc_feature (611)..(628): n is a, c, g, or t
  misc_feature (660)..(675): n is a, c, g, or t
  misc_feature (789)..(820): n is a, c, g, or t
gaacaccttggggtccctccaccccnnagaaccttcaacccagtggtctgggatatggctgcccaggagacagaccacttgcccacgctgttgtaaaaacccaagtccctgtcatttgaacctggatccagcactggtgaactgagctgggcaggaagggagaacttgaaacagattcaggccagcccagccaggccaacagcaccttccccgctgggaagagaagagggcccagcccagagccacctggatctatccctgcggcctccacacctgaacttgcctaactaactggcaggggagacaggagcctagcggagcccagcctgggagcccagagggtggcaagaacagtgggcgttggagcctagctcctgccacatggagccccctctgccggtcgggcagccagcagagggggagtagccaagctgcttgtcctgggcctgcccctgtgtattcaccaccaataaatcagaccatgnnnnnnnnnnnncacaccccaaaaaccccaccgccgggggcggcaccgaagggnnnnnnnnnnnnnnnnnnnnncgaggcgcccgggaacaaaaactgcataagaaagaagggtgctcgggggcggnnnnnnnnnnnnnnnnnngaaaaaacttttctcaaaaccaatttccgttnnnnnnnnnnnnnnnncccccctgggaggtgaaagggggaaaccggggggccctaagaggcgggttctccacagaggagaaaaaccccgggggcagaagggacacaaaagggggctttggggggcctctnnnnnnnnnnnnnnnnnnnnnnnnnnnnnnnngggcgggggaaacacccgagaggcttttgtggaacaaacaaccccccagaaggggaggttctcgtggggggcccattttgcgggggacccaacacccacgggggagggcccaagaggggggcctccaaat

SEQ ID NO: 263945 - DNA, 420 bp, Homo Sapiens
  misc_feature (33)..(33): n is a, c, g, or t
  misc_feature (182)..(182): n is a, c, g, or t
tggaaacgaaaccctctcccaggtgtctccaangccatcttcttcgtgccgggcttcctgttgttggtgcctggaatctatcacgtgatcttcatctactgcgcggtcaagggccaccggggcttccagttcttctacctgccctacttcgagaagtgatcgcggcgcaacgtggaaccccncttctccatgggggcgcccctcttgccctgttccgttcccctcatctcaagggaagaggccctccaggaccctcgaaaccccagcccctagggagtttgctcaggaagttcggggcatgcaggcctggccctgggaaagccgcccgtcgcctgctctgtgccttaacttattctcgggccgtgcggctgctaggttgctgttattttgtgctaataaaagagtaattaattccaccag

SEQ ID NO: 263946 - DNA, 304 bp, Homo Sapiens; identical to SEQ ID NO: 174992

SEQ ID NO: 263947 - DNA, 1177 bp, Homo Sapiens
  misc_feature (691)..(805): n is a, c, g, or t
  misc_feature (939)..(947): n is a, c, g, or t
  misc_feature (1048)..(1059): n is a, c, g, or t
  misc_feature (1106)..(1130): n is a, c, g, or t
gggtcttggcactggactctgccagcatcctcctgatggtacaggggacagtaatagccagcacacccacaacccagacaccaatccctctgcaacgtggtggcgtgctcttcattggggccaatgagagtgtctcactgaagcttactgagccgaaggacctgctgatattccgtgcctgctgtctgctgtaaaggctgcagcctccccagctctcctctgccagccaccctaaattccagccaacctcacctcctcgggcccagctcaaccccccttccttgctctggaccccttaggtataccctggaagagctggggtgggggaggagggagcgtgaaggtagtgactcctgaacacacccaggtggaaccatctttggggaggagaggcccgtgtgaggggtctgatactccctttgtcttccctctctactcctcgctacacctgagccaggctcttgccaactctgttccaccctatggctttaggctagctgttaaatatgtgacccagcattagctcagcatctgtcagagcaagagaccaggtaatttctaagaacagggttctagcgatgggactgcccatttcctcagctgcagaggaggaaagggaaagggtaggcctgtagactaacgctgtttacacccttgttctgtcaaagcaattaaagatcacttgtgttgnnnnnnnnnnnnnnnnnnnnnnnnnnnnnnnnnnnnnnnnnnnnnnnnnnnnnnnnnnnnnnnnnnnnnnnnnnnnnnnnnnnnnnnnnnnnnnnnnnnnnnnnnnnnnnnnnnnctttgcggcccccctcggccctcaaaaacttttcaaaccctttttttggggcgggggccccagaggtaaaggaaactgggccaacctggttccaaaggaaaccccgggcatggcatagggttggattccccccnnnnnnnnncccccggggggaaccgaagggttttaaaaaatcccaaaggggtttcgggggcctttctgggttttacccagggggtccaaggcaagctcaatttaaatttnnnnnnnnnnnntggccaattattggaaagaaggggtggaattcccttaacacattttnnnnnnnnnnnnnnnnnnnnnnnnnaaaaggggtgtgagtgacaccctaattccgcccccgggcatatacaa

SEQ ID NO: 263948 - DNA, 441 bp, Homo Sapiens
  misc_feature (415)..(415): n is a, c, g, or t
ggtgagaggcaaaacctgttgcctccaccacggcttccctcttggctcattccaagcttggccaaattggggaagtgggatggaggttgccctgcatcccccctcctctgcctgagtgtgtctttgtaatgtcagctggcatcatacaaagagcaggagaagcaaacacccagaactcttttgctggtcagagattccctgagtgtctgtcctcacccaagcctgctctgtgtctgtgttgtgaagcttgagactctggaaagaaatggggagggggggcaggggaaatgttgccctaagaatgcttctcattcctctgttcttattgggtcctgtttttcgggagggtgggggttgggggaagcttgaccttgtgtcttcgtcaataaactcacatttacaccaaacaccatcntataaccaaaaaaacaattcttgtcg

SEQ ID NO: 263949 - DNA, 406 bp, Homo Sapiens
  misc_feature (32)..(32): n is a, c, g, or t
  misc_feature (40)..(40): n is a, c, g, or t
aaataccaggtttaaaggccataggaatgtgntatatggnccccctaaaccagataatttaattttaggcaatttatccataacctgatacctagcctaacaattgtcccataacttgtttaagtgtaagaaatacccatttccaggaatgaaaaagaaggaatacctactttcctaagaaagaagatcttataatagacatatttagtaggttaaactactcctttgaaagaataagttttggttcaaagtcaataatgaagacgagatttgtttttctcttctctggctgatttttaaggatattatgtagttcatttagttaacagaattgaaatgtttgatatggcaagataggtatggtaatttcaaagtgaattgggaattcctctggctcatagaaccc

SEQ ID NO: 263950 - DNA, 392 bp, Homo Sapiens
  misc_feature (46)..(46): n is a, c, g, or t
gagactcggccaattgcaggggcctctgggtgccttgtccgggcantggtgaaagtagccgcccctcccaccccggcacgatggggccctggcacctcgtctacccaacctcaccggaatgtaagcatctccgctgaacgactccctgcccttaccctacctctgagtttgtccatgtttatttcctgaagagagaagggactggcaagagggcttggccccagcccaagggtggagagggggccaagggctcctgaccaaataggaaggacatttgagcagagcaaaatgaaaggaattacaaccaaaaaccccctccgagaagacaggcagcatggaaggcatggtggagatgactcaaacaaaaactatgattctagaccaaaaaggaa

SEQ ID NO: 263951 - DNA, 1163 bp, Homo Sapiens
  misc_feature (99)..(110): n is a, c, g, or t
  misc_feature (152)..(171): n is a, c, g, or t
  misc_feature (173)..(321): n is a, c, g, or t
  misc_feature (385)..(393): n is a, c, g, or t
  misc_feature (559)..(559): n is a, c, g, or t
gtggggggggaaacccaaccctggtttttttacccgcgggtgttttttgtggggaaacattgtatatccccgttgtttcttccccccgggttggggcgnnnnnnnnnnnnaaaaaagggtgagaaaaatttttcttggggcggggggggcgnnnnnnnnnnnnnnnnnnnntnnnnnnnnnnnnnnnnnnnnnnnnnnnnnnnnnnnnnnnnnnnnnnnnnnnnnnnnnnnnnnnnnnnnnnnnnnnnnnnnnnnnnnnnnnnnnnnnnnnnnnnnnnnnnnnnnnnnnnnnnnnnnnnnnnnnnnnnnnnnnnnnnnnnntatacttaaattaaatagcatgatttaatttagttggtgcttaaccctgaatcctcttaagttnnnnnnnnngttataattaactattaacgttaatgaatttaaaccttccagaaagcatgaatccaaaaggaaaagtcccaacaggtgatatgaaccagatattttatggccttccctgtttcagtctcaaactttctaaacatcaatggggaaaaaaaattctctagagttttcnagttttattcttctagagcacaattttccggcctgttactgagtacggtcttctaaacaggtacacaattaactcataagtagacaacacaatggcagtatttgggatctgccggataagctgggcaaacagtcctctataaaaggcaaggtagccttcttcccggaacacccaggcgcgccgtctggacaaaagacttgtacttggtgccctcttcccggagcctcgtccttatgacttcgtgtggataagcaatgcaggagcacagcccttagaaagagcagcagctgccataagtccaaaaaaacttgtggaatttttctcagtcccatttgcagaagaggctaatggagcttctttcagatacttctttaaactttcataaaatagcaaagcagattatagtttcggaaattccagcatacgaggcagttaatcctctatagaagccacgaatgccttcggtctggtaaacgtaattatcacactggagtgtattcatctgcttagagcccctcactttctgttctagctgcattcgggttttaaccatccatataggattcattaaggaatttgtgataaaagctgcagagccagctcc

SEQ ID NO: 263952 - DNA, 464 bp, Homo Sapiens
ttaacagtcacagaatcgtgctaagtttataataaataattcacatacaacataggttaaattatcaaagaaattaaactgacatctttataccttttgcagatttaacacatttctaatccaccacatacggatagcagtaggtatatttcttgacatcattcagtctatttcaaaaatagatttgattgtttagaggcataatttataaagcaagataaccaaattaaacaacagaattttaactaatattggctttttgggatttcttaagaaaagattcacaagcattgctcagctactggagaataattaaatctcttctttactcaggcacttttaatgcagtaacctcaggcttcattttaaagtactggttaaaacgaaattgacataccaaggaaatcaaactcaatagtggagtatttggcttgaatcaaagcccacaatccccaaaagaaatg

SEQ ID NO: 263953 - DNA, 506 bp, Homo Sapiens
  misc_feature (202)..(202): n is a, c, g, or t
ccaggatcttctggaggaaggtggccatggatggatgggctgtatctgtgttttacctctgggagtctcatgggtccagcatcaggcctgaggtcagcaacagggaaagagggtggttacggggatggcttgccccgcctatctagaggcttgcctcgggcccctccttggggaaggtttgcgtgcagagctgcaagggaanagggtcccagaagcattgcccttttggcctcgtctaataggatccttaggacactgtgggctttaggaatgactatagatgctcacacgtgtttaaagtgacatttggagatgctctcagtcctgtggcatctggcacgaagtctccaagaagccactttgcctcttctcccttcaagcacaagctttactgcaaaagggccagtcgcgtttctatttctctcgatcccaggcttctgcggaccgacgatacgtttaaatgttgttctagtaaatattcttgaatgtattaaaatggctgaaac

SEQ ID NO: 263954 - DNA, 736 bp, Homo Sapiens
  misc_feature (23)..(23): n is a, c, g, or t
  misc_feature (440)..(440): n is a, c, g, or t
gcctctagataggcggggccaangccctcccccgtgcccaccctctttccctgttgctgacctcaggcctgatgctggacccatgagactcccagagggaaaacacagatacagcccatccatccatggccaccttcctccagaagatcctggggaccccttacccctccatcccatgaggcaaccagggctgggctcgcatggcccagcaagggataaagttgggaactgcagacccagggaagccccctcattcttagggcaaaacagcccctgaaggacaaaataaataaaccaaaccatgaccagacagctggatccggacaggtggagtggcctctgtgaaggcaaatgagagcaaaagtgggaactgaggacacctaagtggagagacacttaaaaacagtaattctcacatgaacatcagtggctcatgccanacagcagagctggccatcaacagaggaacagcaacaaaaacacaactcagacggggggcgggacggggccaggagtctgcgggggtctctgatatgctttgtggcatgactttgcttgcctggcctctcctttcttagctgaaaacaggcatttcactaaagggcatccagccaagcggcagcagcctgagctcccaggctgacatctgggcagggctgatgggcagcttctggccatctggtgacccaggtgtgccgccagctgcacccacaagcacagcccctttcctaataac

SEQ ID NO: 263955 - DNA, 1553 bp, Homo Sapiens
  misc_feature (528)..(551): n is a, c, g, or t
  misc_feature (578)..(607): n is a, c, g, or t
  misc_feature (658)..(689): n is a, c, g, or t
  misc_feature (726)..(765): n is a, c, g, or t
  misc_feature (877)..(920): n is a, c, g, or t
  misc_feature (1011)..(1011): n is a, c, g, or t
  misc_feature (1099)..(1107): n is a, c, g, or t
tgagatggggaagaaacataaaatgccactttacaacttcaataatagcctgtaatttatatttactgtgtgaatttttagtcctatattttaataatttgtaaattgatctcttattccaagaatcctttgaacttgtagaacatctgggagtccacttccctgtcctcttcctgatccctgctttctggactgtttaaatcctctttgggatggatcagagagtctagagaggccactcataggtccagctgctggcctcctgactctccaaagccttcactggaattgggacatttgctccagccctagctgtgaacatgaccagagacattatttataattcagccatttaagatatacctgtactcaaaaagtcctgtatatttttaaaaagttttatttttcaggtgaacaaaaatacatcctaagaactctgcctacaaacaaaacaaaaaacaccccccctctcctcacgattaccatattccccgcgaacctctaaaaaagaaatacactctcctactnnnnnnnnnnnnnnnnnnnnnnnngccttttcataccccgctctgtttctnnnnnnnnnnnnnnnnnnnnnnnnnnnnnntctttctcattacgcccgcgcttttaattccctagtttcccataccctttnnnnnnnnnnnnnnnnnnnnnnnnnnnnnnnnttacctaagaccaactcgcgcgaccgccttcagactnnnnnnnnnnnnnnnnnnnnnnnnnnnnnnnnnnnnnnnngactccatttaaagcctccctaataaacccaacaaaaaacccagcgaatgcccgtccctccccagatcccccatatacgcccccttcgacaccccctcccgtataatttatnnnnnnnnnnnnnnnnnnnnnnnnnnnnnnnnnnnnnnnnnnnncttgccatctacctctcgccttttgattcacgccatcttgccgcattaataattcccaattttcgcagcggctctttactattgtccaccnccataattccgctcgactactcttgatgtatggcccgcgcgcgctccgcgccctaaaagcgaacagtcaccgcgccaatacataatgnnnnnnnnnttctgcttatcgccattaattcccccgtaccggtcgcgccctttcatcgacctattatatttgattataggccccccggcccactaaagttatgtggtattattcccccatattctaccctcgtccccctcaaccttaccccttatgccaatgcctctatttacaggcggtcacccaactattcacctctgcctcttgggtcaccccctgcacttttgtccacttctcacgacgaattccccgcacaccccgcacattctgcgccgccgcacacctctgctttccttacccacggaatgtccgccctcacgagacaaccactaagaccagtcgacataagagacacgccagtgtcccccccaccaaccccgcgacttgcgcgtttgtacacacccggtaaatgtttgttcttgtacatgcacgcgcgtcctcttttgcgcccgata

SEQ ID NO: 263956 - DNA, 431 bp, Homo Sapiens
ggggaagagaaggcagagaaaggcctcatgttgcctccacccccagcactcgaggatgacatggagtcccagctggacggctccctcatctcacggcgggcagtttatgtgtgacctggacacagacagagacagagccaggcccggccctcccgcccccgacctgaccacgccggcctagggttccagactggttggacttgttcgtctggacgacactggagtggaacactgcctcccactttcttgggacttggagggaggtggaacggcacactggacttctcccgtctctagggctgcatggggagcccggggagctgagtagtggggatccagagaggacccccgcccccagagacttggttttggctccagccttcccctggccccgtgacactcaggagttaataaatgccttggaggaaaac

SEQ ID NO: 263957 - DNA, 472 bp, Homo Sapiens; identical to SEQ ID NO: 178668

SEQ ID NO: 263958 - DNA, 376 bp, Homo Sapiens
  misc_feature (28)..(28): n is a, c, g, or t
  misc_feature (52)..(52): n is a, c, g, or t
  misc_feature (58)..(58): n is a, c, g, or t
  misc_feature (127)..(149): n is a, c, g, or t
taggaaatggccaaaaattccccacaantttttggatgggatgaaaataccnccctgnaaccacaaaccagagaactggagggaactgaagaataacctcacctcatatagctctgccctcattccnnnnnnnnnnnnnnnnnnnnnnntagcagaggtattttactcagaaaataggtttcaaagaacattaatgactttcttttcccttttatgtctgcttaatcagtgttaaactgctatgggaaaagttttatagaactatataacctgaatgttggtctctttgtacacatcttttctatgactgcaaatcttcactttatgtatcatttttactgtcatattatttttgttcaataaaaactttgtgata

SEQ ID NO: 263959 - DNA, 354 bp, Homo Sapiens
  misc_feature (58)..(67): n is a, c, g, or t
  misc_feature (124)..(124): n is a, c, g, or t
  misc_feature (152)..(153): n is a, c, g, or t
  misc_feature (182)..(183): n is a, c, g, or t
  misc_feature (211)..(211): n is a, c, g, or t
ctcccttaaacccccaggtgggctgacccctccccacccagtccaggacattttaggnnnnnnnnnntgaaatgtggggggcttctcatctccccaagatcctcttccgttcagccagatgttncctgtataaatgtttggatctgcctgtnnattttggtgggtggtctttcctccctccnntaccacccatgccccccttctcagtctnccctgcctccagccctaggggactagctgggttggggttcctcgggccttttctctcctccctcttttctttctgttgattgtcgctccagctggctgtattgctttttaatattgcaccgaaggttttttaaataaaatttt

SEQ ID NO: 263960 - DNA, 327 bp, Homo Sapiens
  misc_feature (176)..(210): n is a, c, g, or t
tcttacctctcatgcgtgttttaccttttgatgttcagagtggctcactggctgggagtccttacctcggggagagggggaggttgttccttgggggccaaagaaggcagggaatgcctggagggtaactggggggccaccatgaccccttctctctccagaaacagctgcttctnnnnnnnnnnnnnnnnnnnnnnnnnnnnnnnnnnnaggtggcccttgtttacagtgaggactcggccactgtgtctctgtttcctgaaatataaactgtagcgaccccagactgtagagatttttatgtgtttggatacatctgctgtgtgg

SEQ ID NO: 263961 - DNA, 456 bp, Homo Sapiens
  misc_feature (25)..(25): n is a, c, g, or t
  misc_feature (73)..(73): n is a, c, g, or t
tgcccagatacctgggggtcgtccnttaaaggccaacttttcccttttcttaatggtcatcaaatttttagtnggcccaccatgtagaccattcctggaccacattaaataaagaccaacaccctagagatggtgaagtaagttgtaaactaaaatcctaagccccctaattgactgaatggaacccctcttgaccaaagtgaccccagaaaaaccttaaaactgagttcctggccatgacgggatgggaggtcagacacgcttcattatatctccgtctcttttatggtttagacacagcaactgaccagcattaatgtcaaaataaagatcataaggctgacagaatagaccctttgtggcaataacaaattattcgtaagatctaaggtcatgccaggcaagtgttatgtcatgcactcctacacttaaagaataaactatgttctaactgcc

SEQ ID NO: 263962 - DNA, 898 bp, Homo Sapiens
  misc_feature (370)..(483): n is a, c, g, or t
  misc_feature (495)..(507): n is a, c, g, or t
  misc_feature (618)..(626): n is a, c, g, or t
  misc_feature (727)..(736): n is a, c, g, or t
ggcagttcattattcctataagaattaaattgagtttagagagaatggtggtgttgagctgattattaacagttactgaaatcaaatatttatttgttacattattccatttgtattttaggtttccttttacattctttttatatgcattctgacattacatattttttaagactatggaaataatttaaagatttaagctctggtggatgattatctgctaagtaagtctgaaaatgtaatattttgataatactgtaatatacctgtcacacaaatgcttttctaatgttttaaccttgagtattgcagttgctgctttgtacagaggttactgcaataaaggaagtggattccttataaattaagnnnnnnnnnnnnnnnnnnnnnnnnnnnnnnnnnnnnnnnnnnnnnnnnnnnnnnnnnnnnnnnnnnnnnnnnnnnnnnnnnnnnnnnnnnnnnnnnnnnnnnnnnnnnnnnnnncctttgcggccnnnnnnnnnnnnnaaaaattttttaaaccctttttttgggcggcgggccccaaagggaaaggaaccggggctttgctttttcccaaaaaaacccggtccaaaacaaagggttggactccccccnnnnnnnnncccccgggggaaacccaaggtttttaaaaaacccaaaagggtttttggggctttttccggtcttattcaaaggggtcccaagggccttcattttaaattannnnnnnnnngggccattattcaaaaaaatgttggaatttttttaacccttccgccccaagtggggaacccctcccaaaggggctgggtaaaacccgaactcccccaggggatacaacccactttgcccccttgggaaaaaattttcccccaaggggtaaaaacgggggggg

SEQ ID NO: 263963 - DNA, 446 bp, Homo Sapiens
  misc_feature (74)..(74): n is a, c, g, or t
  misc_feature (347)..(367): n is a, c, g, or t
  misc_feature (379)..(379): n is a, c, g, or t
cctattaacctgaacctatgccttgggagagagccccctgaacccctttaacctttaaatgccccatccttagncccccggaagttagagtgagggaaatgagccttggccttctgggactgtgtcaagttgaattttctgtcatttaatttcagatccctagctcatcatcagtgaagtcccagccctacttacttgtaactattaacctttctaaaagttttcatcgccttggtaaagctccagaaatggacaatgctagtgactgcacaatattgtgactgtacttaatgccactgaactgtacactttaaaatggaaaatttatatgtatttttaccacaatnnnnnnnnnnnnnnnnnnnnnctttaatgaaanggtggaaaataatttaacttacaatgtgaaaatacaatgtgaaagtgtacaataaatcatatttatg

SEQ ID NO: 263964 - DNA, 858 bp, Homo Sapiens; identical to SEQ ID NO: 8140
  misc_feature (705)..(705): n is a, c, g, or t
  misc_feature (825)..(825): n is a, c, g, or t

SEQ ID NO: 263965 - DNA, 837 bp, Homo Sapiens
  misc_feature (324)..(324): n is a, c, g, or t
  misc_feature (346)..(346): n is a, c, g, or t
  misc_feature (456)..(456): n is a, c, g, or t
ggggattggtttgaaggagttacccaccatcccagcacgataatgtcatctcccaagttggatggcagcacgatctggccctagggagcttcctgttcccagaagtcattgtcctgggctatccagatgtccctagtaaatcttgcttccttctgcaatgttagtaatgccttaagctgacagttgctattttgcagaacagttttcctctttgcttagctagtaacttgcctctgagcctgggctgatctgagaaacaggtgtgacaagagcatgaaccagaggtgcacctggggcagttccctaataaaactggtttgtacnagtcatggtgttggggtgatcnagaatggaagcccctttcaaaaatagacccttagtatttttgtccttaattcgcaatgccattgaattccagcccccagaattatttgcccagaaaatagactttccttnccccctggtgttgggaaccccaggagggttggaaaaagctcaggaacccctgagctggttcatctgtttgccatattgggtaggttaatttcccctggagcctgagagtctttggccagatttcagctgcgtctccctggctcttttgctgcagctgtgagattggggtctggttccagcagtctgtcactggtcagcctgagtatcacaccctgagctctggggctgggagtttcttcccacaccctctcccttgtgccttaagttgcgatggctctgagtatacaattaatcggaggtgaggggtgggtgtcacagctaatcccaaattcaaaaattagtcccaaggtgctgcaaaatataaatttgatgtcaagtaga

SEQ ID NO: 263966 - DNA, 326 bp, Homo Sapiens
  misc_feature (128)..(128): n is a, c, g, or t
  misc_feature (212)..(212): n is a, c, g, or t
  misc_feature (232)..(232): n is a, c, g, or t
gataatgtcatctcccaagttggatggcagcacgatctggccctagggagcttcctgttcccagaagtcattgtcctgggctatccagaggtccctagtaaatcttgcttccttctgcaatgctagcnaatgccttaagctgacagttgctattttgcagaacagttttcctctttgcttagctagtaacttgcctctgagcctggggctgnatctgaggaaacaggtgtgnacaagaagcatgaaccagaggtgcacctggggggcagtttcccttaataaaaactgggttttgtaacagttcatgggtgtttgggggtgatcca

SEQ ID NO: 263967 - DNA, 417 bp, Homo Sapiens
  misc_feature (366)..(366): n is a, c, g, or t
  misc_feature (369)..(369): n is a, c, g, or t
  misc_feature (374)..(374): n is a, c, g, or t
  misc_feature (381)..(383): n is a, c, g, or t
gggagtgattttctttcttccccttgaaggggaaaaagctattttcattggtacatttaaagtcccccaactatggggaggtaccaattctggacaagtgccactacaacaacactaaacctgaacttttcaactccgttggtggtgggaggcagcgggcagaaatttactgttggccactgccaggtctatttcatatttcaaaggaatattgggtgctgcatataggaactgaaggggtcaatgtattaaacctgtgattggttgttttcctgtcattttgagagactaaatgtggggggcagatgtcaaaatacctgtacaattttaaaatgtcacaattaaacatgagctggtttcccaaanaanacaanaaggaannnctaagggaataaatgggatatataaaaaggaaga

SEQ ID NO: 263968 - DNA, 636 bp, Homo Sapiens
  misc_feature (204)..(212): n is a, c, g, or t
ttccccctagcatgaagagatgtatgttgtagtcctgcccactgattactgaagtcctgcccattaattgctgaatgtcttcagttgggccactgagcttgtctgaatctgttcccttttataaaagagttactacatcaaaacaaagagtgaaatccaaatttgtcaaactgtatgtattaaacatgtccagttttttggttnnnnnnnnnttgcactggctttgagggaaaacacacagggtgagggaattgggctaaatgacttcttacaggcccctttctgattctttaactttgaaagcaagccatattgatccagttgttatagtgaactcatggtaatggtttgtgagaacaatagagattttcatttctatgtagatgagttggtatgagaatatatggaatttttaagggactgtttaaatctttgatttgtagactattaaatataccgtatgcataaagtaagcctttagctctaaggtaaagacgacacgttttcggtttgtgactacaaataggttaaaaatagattttaattttattaaaaatataatttaatgcaggttgtttgaagcatctgtcttcatatgatggcattagaacaccttggtataataaaaagttacca

SEQ ID NO: 263969 - DNA, 365 bp, Homo Sapiens
ggggtgtggttctagcaacgagcggtggcgggggttgtgccggtcccactggcaggcgggcaagaggggagtccgggcggcggccggcgtgggagccgggggaccaccatggtaaagaagcggaaaggccgcgtcgtgatcgactcggacacagaggacagcggcagcgacgagaacctggatcaggagctcttgtccctggcaaagcgaaagcgcagtgactctgaggagaaggagccgcctgtgagtcagcctgcagcctcgtcagactcggagacgtctgacagtgacgatgagtggacatttgggagcaataaaaataagaagaaaggacccgccccctaaaaaattttctaaatccttgt

SEQ ID NO: 263970 - DNA, 612 bp, Homo Sapiens
acctggccagcttccccaagatgtgactccagccagccaaatccatcctgctcttccatttcttccacgatggtgcagtgtaacgatgcactttggaagggagttggtgtgctatttttgaagcagatgtggtgatactgagattgtctgttcagtttccccatttgtttgtgcttcaaatgatccttcctactttgcttctctccacccatgacctttttcactgtggccatcaggactttccctgacagctgtgtactcttaggctaagagatgtgactacagcctgcccctgactgtgttgtcccagggctgatgctgtacaggtacaggctggagattttcacataggttagattctcattcacgggactagttagctttaagcaccctagaggactagggtaatctgacttctcacttcctaagttcccttctatatcctcaaggtagaaatgtctatgttttctactccaattcataaatctattcataagtctttggtacaagtttacatgataaaaagaaatgtgatttgtcttcccttctttgcacttttgaaataaagtatttatctcctgtctacagtttaataaatagcatctagtacac

SEQ ID NO: 263971 - DNA, 422 bp, Homo Sapiens
gcgaagtcgcacaataggccgtctgcaagctgggttagagagaagccagtagtggctcagcctgagttcaaaaacctcaaaactggggaagctgacagtgcagccagccttcagtctgtggccaaaggccaaagagcccctggcaaccaacccactggtgcaagtcctagattccaaaggctgaagaacctggagtctgatgtccaagagcaggaagagtggaagaaagccagaagactcagcaaacaaggtagacagtgtctaccaccacagtggccataccaaagaggctaccgattccttcctgctacctggatccctgaagttgccctggtctctgcaccttctaaacctagttcttaagagctttccattacatgagctgtctcaaagccctccaataaattctcagtgtaagctcc

SEQ ID NO: 263972 - DNA, 347 bp, Homo Sapiens
  misc_feature (11)..(11): n is a, c, g, or t
  misc_feature (24)..(24): n is a, c, g, or t
  misc_feature (34)..(34): n is a, c, g, or t
  misc_feature (48)..(48): n is a, c, g, or t
  misc_feature (54)..(54): n is a, c, g, or t
  misc_feature (67)..(67): n is a, c, g, or t
  misc_feature (75)..(75): n is a, c, g, or t
  misc_feature (93)..(93): n is a, c, g, or t
  misc_feature (124)..(125): n is a, c, g, or t
cccaggagganccagcccccaaantcttccctanaatcagactttaancacaancagggagggaaancacttgancagtgcccgtccctgcanacctggcctctgctggaacccatgcagggannggaaacttctttatcagcaatcctgttcctctcctgggcagcttcaacctgaaaatcctccttcaccttgagctaaaatgggtttcttgtcacccttgcccatcaaacctggccttgccctcaggaaccacacaggacaagcctaatacttccttcttgtggcaaaactttagcaattgagacctggctgtcaggtcctccaaataaacatttgtgactgcg

SEQ ID NO: 263973 - DNA, 348 bp, Homo Sapiens
ggggtgacggagcggggccaagggaggggtccggagggagtcagggatggagggcagagggagtggatgtgggggtttgaggacgtgtgacaagctccagcaggggtgggggccgggctgagggtgggggtgcgaggcggtcactcccatcgtgcccctggccgtccctccactcacccacacctggcccagtccacgttgaggtccaggactgggaaggaccgggtgagtgcaccggggacccaggccaggtgccccccggagcctgctggggtggccagagcaggagggggtgtgtttcctttttgtgggtgttgcatgcaaatcaagtggacaagaaaaaataac

SEQ ID NO: 263974 - DNA, 457 bp, Homo Sapiens; identical to SEQ ID NO: 8276
  misc_feature (206)..(385): n is a, c, g, or t
  misc_feature (392)..(394): n is a, c, g, or t

SEQ ID NO: 263975 - DNA, 1062 bp, Homo Sapiens
  misc_feature (808)..(808): n is a, c, g, or t
  misc_feature (810)..(810): n is a, c, g, or t
  misc_feature (812)..(812): n is a, c, g, or t
  misc_feature (814)..(878): n is a, c, g, or t
  misc_feature (883)..(883): n is a, c, g, or t
tgcaggtagacatctccactgcccaggaatcactgagcgtgcagacagcacagcctcctctgaaggccggccataccagagtcctgcctcggcatgggcctcaccattgaggcagctccactgtctgtgctggtctgagggtgctgcctgtcatgggggcagccatctcccagggggccctcatcgccatcgtctgcaacggtctcgtgggcttcttgctgctgctgctctgggtcatcctctgctgggcctgccattctcgctctgccgacgttgactctctctctgaatccagtcccaactccagccctggcccctgtcctgagaaggccccaccaccccagaagcccagccatgaaggcagctacctgctgcagccctgaaggcccctggctaagcctgggagcccaggacctaagtccacctcacctagagcctggaattaggatcccagagttcagccagcctggggtccagaactcaagagtccgcctgcttggagctggacccagcggcccagagtctagccagcttggctccaataggagctcagtggccctaaggagatgggcctggggtgggggcttatgagttggtgctagagccagggccatctggactatgctccatcccaagggccaagggtcaggggccgggtccactctttccctaggctgagcacctctaggccctctaggttggggaagcaaactggaacccatggcaataataggagggtgtccaggctgggcccctcccctggtcctcccagtgtttgctggataataaatggaactatggctctacngngnannnnnnnnnnnnnnnnnnnnnnnnnnnnnnnnnnnnnnnnnnnnnnnnnnnnnnnnnnnnnnnnntacgntttccttggtcggcccgccctccgccctcaaaaaaacttttcaaaaaaccatttccttttggggcgcggcggggccccccgttaagggaaaaggggaaactggggggcccaaaaacggggtttcccgcaagggaaaactccccgtgggcccaagggaactaaaggggccttgggaaatt

SEQ ID NO: 263976 - DNA, 154 bp, Homo Sapiens; identical to SEQ ID NO: 8277

SEQ ID NO: 263977 - DNA, 348 bp, Homo Sapiens
gggacttgtccacttaccttgtcactaatttggggcttctgggctgtgagtgatcctttgatacttcaccaaggggaacgtgggggctttgtgttttgtacttttcactcactatttcactttattaagatgactgtacagcaatttgtatataaagcttatgattaaaaactattttgaacatacggacaaggcctcgccttcctgtgtccagatcacctgaaccctcgtgccacagcgcagtctggggtccaggaaaggaaggacttcacagccgccgggggtgaggacggggttttatttgtggcacattttacacagcgttagaggcggtcttggggttggcag

SEQ ID NO: 263978 - DNA, 436 bp, Homo Sapiens
  misc_feature (288)..(288): n is a, c, g, or t
gggtgagaaggaaactctagccgactccggcttgcgaacttctggcggtctccttggacatttccaacacgggacgcctgtgttcaagctcgctgactttccttctttaatctctgatggtcgttatctgtgggcccactggactatctcgcgcgtgcacgcggaaccggaggtgggtggagggtggaatgagagagaaacccatccgcagaaggaggggccctaccttactcagtctttagccccggacagaagcaaaaccacaggccccctctcccaccccacttncgccgcgtttcctttccagactcttccctgagacactagatcaggaccatttgccttttcttatctctgtgtgtttcctaacacaattttaaaacacctctgaggcttcatagaggggtaaagtgtcaaaagaaatacacgaataaga

SEQ ID NO: 263979 - DNA, 788 bp, Homo Sapiens
  misc_feature (382)..(453): n is a, c, g, or t
  misc_feature (694)..(704): n is a, c, g, or t
gggggatgtgagcctggttcagaagattgagctggcggctcgccgaaggagaagtcttccaggactagcatcctcggtgaaagagcctttgccccaagcaacctgattttgacaaatctgattaaaatgtgatgctagaacagggatctttcccagtatcttgagtgggtgaccacacttgtcagtgggaggctctgggctgccctgtcggctccttgagggcgggatgaactgctttgtgacttggaaaggtacgctgctggccagcattggagaagaagctgctgagcatggctttctgtagtctttagcaagacacaagtggattttgactttgtatcatgtcatgatttctaacaataaatgatgtttttatgtgccnnnnnnnnnnnnnnnnnnnnnnnnnnnnnnnnnnnnnnnnnnnnnnnnnnnnnnnnnnnnnnnnnnnnnnnncaaagagagggggcggcgcgcggcacaaaaagaatcctcccccggagggagggccacaataaacgggccaaccacgaacattggagaacaaaggggcgccccaaagggggggcgcgatataaaaaccgagggcggagggggcgcgcggtataaaaaccacggggtggcagaggtggcgaaaacatcactggccgcacggggaaaacagtggtgggggagagagacacccacatacggcgcnnnnnnnnnnnacaacaaagggtggcgaccaaactattactcatcagagggagagatatatatactaagccccaaaggagggggggagatatatt

SEQ ID NO: 263980 - DNA, 401 bp, Homo Sapiens
ggggctttattttttcatatacatttctagaaatattgctattctaccttagtatttcacatttgtagttcaaacaagcgattgtccatctgttgcctagagctatagtacatgtgtgttatgaatgaaatatgacagcatgttcccatacccctgctttagccatctgtgggaaaccagcaaactgaaaaagacacctctgcaaaatgtgcctcaagtccatttcttgggatcgctcgtttggtgcactctcgtgggagacaatcagagaacaacatatacttgtgccttattttcaaagaatctatttacactactatgaatattccactgaagagtcaatgatgtaaatgataaccaccaaatctcaaaaatatactcaccaaaaagtaaaaaagtaa

SEQ ID NO: 263981 - DNA, 242 bp, Homo Sapiens
  misc_feature (80)..(90): n is a, c, g, or t
gggggaacggggaagggggagcaacttgctctttcatatgagttggtcatagcatgtaagaaccaatcttgaaatatcgnnnnnnnnnnnaatggcttataatgtatttctagaaatactttgtacttaaaatgataacagtttgtatctttttgtccatataaagatactttataaataaaaaaattagcattgtaaataatgttaatatgtatttatacaaaataaatttactataatat

SEQ ID NO: 263982 - DNA, 457 bp, Homo Sapiens
tgagccagggaggcggcccttccagcagccatgagggaaggacaggagatgggcccaccccagtgcccagcaaccccctgctccaccgctcattcccctgctggccccggggctggtctcacccagtgccaacccgagagctccttttggaacctgcacagcccgccgacctgttgccacctgcacccaccgctggaccatgcagcctcgcctcctggatgtgtcccagcctggccgagggtcccaggtgaagactggagggaccccaacagccaccgcccaggacgctgaggctcccttgcctgactgtgacttgtgcctctctcatgaccccgtggggacatggcagcccagagccaaggctgggtgggcaggtgacccaaggaacctttctgggaacaccttctcgccgggctgggaacaataaatgcagccatgtctctgcagctggtgctga

SEQ ID NO: 263983 - DNA, 366 bp, Homo Sapiens
ggggtgtgtggcccgccaccactgatccagacggcggctcaccctaacctggagaagctgggttatacccaggacatgattttcacctactaacaaacacctccatgtgctcagcaaatttgcatgtcccttttcatctgtttcagagtaagttcaatttcaccacggtaaactgggatgttttcaaaagtgccttgccatgtaccttcgcgcacacactggttctcctcttttgggtgtgggcctaacaaaaagggctcaaggggctggagactggctgctggggcctccttgcttggaggctggcaagagctccatttcagtatctttctccgtggttttgtgaaataaactcaagtacaaagc

SEQ ID NO: 263984 - DNA, 466 bp, Homo Sapiens
gtgttggtcgtgcgaaatcttggtattcgcatttcaagaagggagttcttttttctttcttctttctatggaacgtttcaagtgattggatagaaagaagggctctgaagcagttttcacctgctctgagggaacttggggctccagggacgtaccccaaatgttgcccaggttgaaactccctgacagcctgttctacgtagtggctcgtggtttccagtttgaagagagttgtgcccctaaaagtgtttgaaacctgtggctttcaagcaaggtaccgttgtccccacagtgttccgtggggtagggggtgatggagactgtggcaagcctgttgtttttggccccctgttgttacatgggacctgttttgacggtgggagggtgagatgtgaagatgtgggatgaacctggaatgaacgaattaaataaagacatgcatccatctgtcagcgaaatttttttt

SEQ ID NO: 263985 - DNA, 761 bp, Homo Sapiens; identical to SEQ ID NO: 15839

SEQ ID NO: 263986 - DNA, 603 bp, Homo Sapiens; identical to SEQ ID NO: 15840
  misc_feature (540)..(540): n is a, c, g, or t
  misc_feature (543)..(544): n is a, c, g, or t
  misc_feature (549)..(549): n is a, c, g, or t
  misc_feature (551)..(552): n is a, c, g, or t
  misc_feature (556)..(556): n is a, c, g, or t
  misc_feature (558)..(558): n is a, c, g, or t
  misc_feature (589)..(589): n is a, c, g, or t

SEQ ID NO: 263987 - DNA, 283 bp, Homo Sapiens
aaatttggctctcgagttggggaacgaagggctgggggaggaaactgggaaacgggccagccgtggccctgcacttcccccagggagcaccaaggctaagcgcggcttcaccgcggggctgggtcgtggccagcttcgcccctgggtctgaagacctctgggcgcccaggtccaaccttgccctgccgccgcacactcggctgccttctcatacccaggcttggggatttccaggtcccgttcccctcgtggcctggctgccagtcctccagcacccctcact

SEQ ID NO: 263988 - DNA, 452 bp, Homo Sapiens
tagtatgtccattactggagtccctaatcacgcctttggcaagcctccttttgaaagtgtccgaagcctttttactttgcctcaagcaacctctagctcccacaattcagtgttgggtcctctgtgcaatatcatgatcatcttcctcatcccctaccttgtgaaagctaggcatacagccaaaccctccttttccccacccaccaacactactgccaatttcctaggctaccatgggtgtatcttccttgacctgcttccttcagtccctctgcctccctttgcccaggcctttctcagactgtattccatcctggggtcttatcattcagctttgtttgaatttattaatcaccatgatacctctccctccctttgtccacatgtaacttgttcttggggctctaccagatggctgaagagtaaatcctttctacctctggctgaaaaaa

SEQ ID NO: 263989 - DNA, 724 bp, Homo Sapiens
gaaagtctttgatatatcaagaagttccacatttgaggcagtcttaaaatggaaaagtgatctggatagtaaagttcatcttccaaatggcagccctatccctgctgtcctcttggctaacaaatgtgaccagaacaaggacagtagccagagtccttcccaggtggaccaattctgcaaagaacatggctttgcggatggtttgaaacctctgcaaaggataacataaacatagaggaagctgcccggttcctagtggagaagattcttgtaaaccaccaaagctttcctaatgaagaaaacgatgtggacaaaattaagctagatcaagagaccttgagagcagagaacaaatcccagtgttgctgatatatggcttctgcttctcttgtgtgtgcctcagctctgaagaagttcctgagaatgggttacagatgtcatgttagctgggagtcttcccacatgtggcacttcaaaaggcagcaccactgggcgcctgcacttatttgaaaatggaactttgggagaagtatccctgctagtggctctgtaacttaacagatgacaattaggcttttgtcattgttgccatcatatggaagataatgtttacatccttttaaacatttttatatgacaattcctcaggatttggtaaggcttccaagttgtagcttttagtgtaagtgctggggtggtaataaaatgttacctccagtcttaa

SEQ ID NO: 263990 - DNA, 351 bp, Homo Sapiens; identical to SEQ ID NO: 178687

SEQ ID NO: 263991 - DNA, 307 bp, Homo Sapiens
ggactcccccccgaaaatcccctgaaagttggacaccaactgtataccctaggttgcttaaagggatttcactattatataaagtcaataaaaatgaagtagttgtatatatgcaacattgtgtacagaggggaaataatgaatagtattaaagaaacattctcgtcttcctttacctttaatcccctaatacctagtctactttttaaattttcagacttcactgctttttgaattcataattctaattttcacattattgttaatggaaaatcatatctaataaaggttttagttattcccatgc

SEQ ID NO: 263992 - DNA, 659 bp, Homo Sapiens
  misc_feature (427)..(429): n is a, c, g, or t
  misc_feature (433)..(433): n is a, c, g, or t
tcttggggtcagctgctccactctgctttttctccaagctcagccccctagagcccagtctttgatggatctcagctaaactgaaggaacagacttgccactaccaccagttcctagcagcctccagaggctatttggccttcctgggtggaggcctggcccaggctaagggtggccagagaaggtcaccatgtaccacacaccaaagaagggggtcggcccaggggtgggcgacacaggcagcttcttcggcacgtcacggcagcaaccccagccttcccaaagcagcaggcgcctccaggctggggcccaacctagaaggcaggggtcaatctaacaaaaccctaacgttgacttttttccctggtggggcttcttctgtaacatgacttgcgaatatttatataaaaacgagtgttacaatgcnnncccnttcccccgcccacccgaaaacaccatggtcggcccgccttcggccccctcaaaaagcttttctaaaaccattccgtttggcggcccgggcccccagtaagtaaaatgaacctgggcccaaaactggtttcccaaggaaaaacccggggccattgaacaaagggctttgggattccccccccaattaaaaaaccgccccggggcgggaaaccccgggcgggttcttg

SEQ ID NO: 263993 - DNA, 1091 bp, Homo Sapiens
ttacaggaaacaccctttagtctgtcagttgaattcagagcactgaaaggtgttaaattggggtatgtggtttgattgataaaaagttacctctcagtattttgtgtcactgagaagctttacaatggatgcttttgaaacaagtatcagcaaaaggatttgttttcactctgggaggagagggtggagaaagcacttgctttcatcctctggcatcggaaactcccctatgcacttgaagatggtttaaaagattaaagaaacgattaagagaaaaggttggaagctttatactaaatgggctccttcatggtgacgccccgtcaaccacaatcaagaactgaggcctgaggctggttgtacaatgcccacgcctgcctggctgctttcacctgggagtgctttcgatgtgggcacctgggcttcctagggctgcttctgagtggttctttcacgtgttgtgtccatagctttagtcttcctaaataagatccacccacacctaagtcacagaatttctaagttccccaactactctcacacccttttaaagataaagtatgttgtaaccaggatgtcttaaatgattctttgtgtaccttttctgtcatattcagaaaccgttttgtgcctgctgggagtaattcctttagcaattaagtatttggtagctgaataaggggtcagaacttctgaaaccagagatctgtaatcatctctattggcctggggtgcctgtgctataaatgagtttcttcacatgaaaaacacagccagcccaagatgacttatctgggtttaggattcaatagtattcactaactgcttattacatgagcaatttcatcaaatctccaaactcttaaaggatgctttcggaaaacacgctgtatacctagatgatgactaaatgcaaaatccttgggctttggtttttttctagtaaggattttaaataactgccgacttcaaaagtgttcttaaaacgaaagataatgttaagaaaaatttgaaagctttggaaaaccaaatttgtaatatcattgtattttttattaaaagttttgtaataaatttctaaattatcgaaa

SEQ ID NO: 263994 - DNA, 453 bp, Homo Sapiens
  misc_feature (21)..(21): n is a, c, g, or t
  misc_feature (38)..(38): n is a, c, g, or t
  misc_feature (53)..(53): n is a, c, g, or t
  misc_feature (67)..(67): n is a, c, g, or t
  misc_feature (76)..(76): n is a, c, g, or t
  misc_feature (94)..(94): n is a, c, g, or t
aattaaagtatttgggtagcntgaaaaaagggggtcangaaccttctggaaancccagagatccggnaatcatccncccattgggccccggggntgccctgtgcctataaaatgagtttccttccacatggaaaaacaccaggccagccccaaagatggacctatcctggggttaggattcaatagtattcacctaactgccttattacatggagcaatttcatcaaatctccaaactcttaaaggatgctttcgggaaaacacgctgtatacctagatgatgactaaatgcaaaatccttgggctttggtttttttctagtaaggattttaaataactgccgacttcaaaagtgttcttaaaacgaaagataatgttaagaaaaatttgaaagctttggaaaaccaaatttgtaatatcattgtattttttattaaaagttttgtaataaat

SEQ ID NO: 263995 - DNA, 832 bp, Homo Sapiens; identical to SEQ ID NO: 8392

SEQ ID NO: 263996 - DNA, 655 bp, Homo Sapiens
  misc_feature (400)..(587): n is a, c, g, or t
  misc_feature (597)..(610): n is a, c, g, or t
ctgatttaagaaacaaggccgccaaacaaaggcagcagttccgactccagcagctgggaaaggaaggaaagtgaccccactttcactcctgcacagcccactggttaccaaaaccaccgtgcaagtcgggatgacagcagggacttctggccaggtgggaaaggtgcctggaagcgggatgcgcctgtgcgtctcttggccatgatgttcttgtgggcatgttattcttggtgctgcctggggtgttgctgagcggacaggctctccagctggagtccatggagaggccagaggctggcggccctgcctgggccttcggagcctcctgcctccaccctccacctcttctaaaccatgatgtggcacattttggtgttaataaaacacaacacacaaagtnnnnnnnnnnnnnnnnnnnnnnnnnnnnnnnnnnnnnnnnnnnnnnnnnnnnnnnnnnnnnnnnnnnnnnnnnnnnnnnnnnnnnnnnnnnnnnnnnnnnnnnnnnnnnnnnnnnnnnnnnnnnnnnnnnnnnnnnnnnnnnnnnnnnnnnnnnnnnnnnnnnnnnnnnnnnnnnnnnnnnnnnnnnnatttgggggnnnnnnnnnnnnnngaaaaattttttaaaacattttttggggggcggggcccccaaggg

SEQ ID NO: 263997 - DNA, 527 bp, Homo Sapiens
  misc_feature (41)..(41): n is a, c, g, or t
  misc_feature (238)..(238): n is a, c, g, or t
ctgtttggtttgaagaacccgtaaaagggatggtaatttantccctagaaaacagaaataagagcctgaaccccacataggaattaccacacccgaaagaggttttggttggtgaacctaccccaactttgttgagggatatgaaagtggctcctaccctagagtgcctgtttggaaaggactgtgggcctgagatgggctctgtagagtgcccacgattgattagggtatggtcctnccatgggcactggagatgggagaaagtgctatgtgcaccttctgtttgccaagcttgccatagacctatctgaccatagtctatgctgatccatgtcagagtggagaggtctttttctctgggaagtctaatagactctgtggtaactattgaagtattatctaaacttaaacatatgctttgtgtttttccctgtaaccttaaatgagactgggcaaattgcattcttatcctaaaaccatgatgtggcacattttggtgttaataaaacacaacacacaaagtaaaa

SEQ ID NO: 263998 - DNA, 389 bp, Homo Sapiens
ggggtgcaggagtatattgatgcattctcagattatgccaacttcaagtaagcggcaacaagggtccgtggaccaggaggattgcctttaatattttgtaatattctgttttgttaatataccccaaattgtgtatatatcttataactgttttagaaattggtacataggcttctattacctattaggtggaaattttatatgtaaatgtgttagcactgatagtcctttttccaatgttttattggggaattaaatagtgtgatgtttggattgatatcgtgaaatcctcagccgagaaattgggctggattgtgctttggttaatacatctttccctaaagaagataaacacaaaatccattccaggtagctcggcaccaactaag

SEQ ID NO: 263999 - DNA, 435 bp, Homo Sapiens
  misc_feature (53)..(53): n is a, c, g, or t
  misc_feature (75)..(75): n is a, c, g, or t
ccaaacattccccccaaaaccttgtggcagtttttgcaatctgtagactggtntgggtttgtagggtccaggccnacagctggggcttgggtccaagctgggtgatgtagttattggaggggcattaatcctggaactcagatcgccactcagaaagttctttgcataggaggcgaggttcggcacgctgaccacgcggctgggcacgtcctccaccttctttttctgtttgtattaatggacaggttagtgcaatgcaatgcaaaaaacaaaataaagcattattgtaaaagcaaataatgctcacccaatcaaaattgtatcggagaagaagcaacaatttcatttatacacttacatgctactttttaaagcacttttccctccaatcttcattttgtattataaataaatatgtatgttcacaacctctta

SEQ ID NO: 264000 - DNA, 230 bp, Homo Sapiens
gggctttggaaatgttttctaatagacacagggaggccagttctgtttcagagcaattatcttccccaaaatctctgttctggtgttggaactgtgtgccctggtttctgttttcctttctactgctgtaattctctgtctcatcatccttctcttttgtttccatagccttttataatgcatatatgatgctgtgaacagaaataaattatttatacaatcaaaaaaaa

SEQ ID NO: 264001 - DNA, 865 bp, Homo Sapiens
  misc_feature (83)..(145): n is a, c, g, or t
  misc_feature (171)..(232): n is a, c, g, or t
agctataggtgtttttgtagatattctttatcaagttgaggatgttcccctctcttcctagtttgctgagatcataagtgggnnnnnnnnnnnnnnnnnnnnnnnnnnnnnnnnnnnnnnnnnnnnnnnnnnnnnnnnnnnnnnncctgctgatgtgatgatggactaccnnnnnnnnnnnnnnnnnnnnnnnnnnnnnnnnnnnnnnnnnnnnnnnnnnnnnnnnnnnnnngtataattctaacatccctgccatatctgactctggttctgatacttgctctttctcgtcaaactgttttttcttgcctttaatatgtcttgtaatttttttcttgataactggacatgacacacaagttaagaggaactgctgcaaacaggcctttagtaatgtggtgataaaatatggagggagaggaagggttctatagtcctaggagggggtctcaatcttttagtgagcttgtaccactgaactgtgaacttcacacatgcttctcaggcccccctaacccccttgcacaggacaagatggcctagagtgtattggagttgggtatttcccttacttcccatgtggaaggccagggctggctagagttggttctttcccttccatcaggtcagtcaggctctggtcactttctactgagggtagggccttgtcaagaacagaatgccctgactgatgtatttcaaaatggttcccttctggcccccttgccagaagcacatggggatttttctccaatattcactgtgggatcttggtcaaggccctggaggtaaaactcacaaaaaaagtgtggatgggctgggcaccgggcgcacgcctgtaaccccagcacttttgaaggccgca

SEQ ID NO: 264002 - DNA, 912 bp, Homo Sapiens
  misc_feature (84)..(98): n is a, c, g, or t
  misc_feature (109)..(277): n is a, c, g, or t
ggagaaaccggcttttgccccctttctcttttttcttttgggggccggcggcccccacaaaaaaggttttaaaaaaattttttnnnnnnnnnnnnnnncggcccaaaannnnnnnnnnnnnnnnnnnnnnnnnnnnnnnnnnnnnnnnnnnnnnnnnnnnnnnnnnnnnnnnnnnnnnnnnnnnnnnnnnnnnnnnnnnnnnnnnnnnnnnnnnnnnnnnnnnnnnnnnnnnnnnnnnnnnnnnnnnnnnnnnnnnnnnnnnnnnnnnnnnnnnnnnccgtacaagtattttatttccattacaataagtgccacgccaaaactacagtagctcaaaacataatacaaaaaatagattcccagctcccaaccccacgtccacgcacccacagagaagccagccctatggctccccaggcctaaggggaggggtctcacttcattttccttaaagctctggagcgggtagtggcagtggcaggggcttccacccctgctgggcctgagccctcttcttccccaaccccctgccggccccggcagacctgagccatgagtgtggtctccattccctcgggctgcacccccagccctaggacacctgcctgtgtccagggagggggtccaagcccatggtgctggtgctgacactacaggaccaccaccctccacgcggaaggcaggagggtcgggggaggggaggcagaggggacaccatggctgggagaagcccgcctctatgtggcaaggggactgaggctggcttctgcttcagctacttctcgggttcctgtctcctctgcagagctaccaggactgctgcgtgctgggaccaggacctccatctggaatccactctcgataccctgcaccagcttggaggcagatcccaaggtggcaggggtgtccccc

SEQ ID NO: 264003 - DNA, 605 bp, Homo Sapiens
  misc_feature (39)..(39): n is a, c, g, or t
  misc_feature (53)..(53): n is a, c, g, or t
  misc_feature (70)..(70): n is a, c, g, or t
  misc_feature (98)..(98): n is a, c, g, or t
aattattccaaattattgccccaaaagtttttttaaccngtctttccaggttncccggaaaggaaagccngtaaatgccatggatgcccatttattangtccatatatccatgtgccattccaagctgtgtgaccaggatatatccaatattaaaacccaaggtatatactttattattttttgaaaacaaggatattgtgatcaattttaccctgtaaaacatatttctgtatttataggtcttaaacatgatgaattttttctattacaagtttatttaaaactgctttctcaagttgttattgatacagcaagtgaacctgctgcagacagaagcagaggaaagccaagaacagcctttattggtgaagaaaagaatgaatgattctttgtaggcgccatcagccacttttagaagccatcagccagtgtgttgggaaaagaggtttgtcaagtgttggcctatgggaaggtggtcaatgaatgttttgatgaaatgaatgtttttgtataatggccttaaacttttctggaagtatttcaaataaattacattattaagtcgggcccaaaaagaaaaagaacatggaacataactgtttcc

SEQ ID NO: 264004 - DNA, 716 bp, Homo Sapiens; identical to SEQ ID NO: 177716
  misc_feature (126)..(143): n is a, c, g, or t
  misc_feature (161)..(302): n is a, c, g, or t
  misc_feature (309)..(324): n is a, c, g, or t
  misc_feature (363)..(486): n is a, c, g, or t
  misc_feature (613)..(637): n is a, c, g, or t

SEQ ID NO: 264005 - DNA, 226 bp, Homo Sapiens
ggtcacttcccaagtggttgtcatttgttaaaccctggtttacctgtcttgctattatgacatttcatttggaaggatgtttgtgttgtagctaactgttcaagtctggtgctgactgctgttcttagccatcacaaaacgctaaatttgtgtaattggagcttcctgctgttatctggaaatagcaggaaagcgcaactttgtatattgtttcctaaagtataat

SEQ ID NO: 264006 - DNA, 289 bp, Homo Sapiens
ggaaatgacagaactataattacagagatcagatcagataggtaaactgcaagatagataggatgaaacttttggcctactgtattacttacagagtttttttgtgtgtggtttttaaaactgttaaggcaagaagtgtcaaatgctttagagttaaataacagatcactgatttcaaagacttggtgtatagtgttaaaaattaaagcttaaaaggtggttagaaaagtggattaatgcaaaaggggtaataaagactgcaacattctcaggaccaaattaaactgct

SEQ ID NO: 264007 - DNA, 208 bp, Homo Sapiens; identical to SEQ ID NO: 178692

SEQ ID NO: 264008 - DNA, 190 bp, Homo Sapiens; identical to SEQ ID NO: 172995

SEQ ID NO: 264009 - DNA, 467 bp, Homo Sapiens
  misc_feature (34)..(34): n is a, c, g, or t
cctgcacattggcttcaaactcctcttctagganatccatcttggcctgaaagcagaggtacaacaccagccccaaaggcaaatctgttttcaaattggttgcctctggaaaggaaggctggggtgagggggcattttacttgcacagaggctgaccctgcctcccctcttcactgaccccatctccaaggtagacctcagccatgtcagtccctgttctgggaggtgctggactgggccacagccagggttatgtaggtaattaacctgtccaaccctgagcctcgcctccccacaccagcaacacagtggtctctctgtggtgaccattcacagcataacattctgcttagcctcaaactgaaagcattgcaactgatgtcaaaaccagatgagatcttacagggagagagattgggtgcaatttgcctctttctttgaataaaaagctctttgctcaccctcaa

SEQ ID NO: 264010 - DNA, 1254 bp, Homo Sapiens
  misc_feature (16)..(16): n is a, c, g, or t
  misc_feature (25)..(25): n is a, c, g, or t
  misc_feature (41)..(41): n is a, c, g, or t
  misc_feature (68)..(68): n is a, c, g, or t
  misc_feature (79)..(138): n is a, c, g, or t
  misc_feature (459)..(459): n is a, c, g, or t
  misc_feature (712)..(740): n is a, c, g, or t
actctgtgtgctgctntctttggtncctcccctcaccccantgtagctgtgactgtgttgaagttttnagatgtttgtnnnnnnnnnnnnnnnnnnnnnnnnnnnnnnnnnnnnnnnnnnnnnnnnnnnnnnnnnnnnttcaccttcgtcatgctgcgtccagtgccccaaccctgtggtcactctccccattttgtaacactgtaccaggtggtgactgtttaactctttggtgtctgtgctcaaaagactgccttctccagtgcccagtgtatgagtgtgtgccctgtgcccttgtccctcactccccacatgctggacgtagccctcttcctcgcacccctgggagggacccatccatctcccttgctctcctggggaaccctaaacccaactctgttgatgtgaaaaatgcagtgaaaaatattgacgaaaaataaaacggaaacaaatcctcgnaatactgagaaaaaaccactacgacactcccccaataaaatcaatacgagataagaactaacccctaccctagcaattaaaaaactgttaataataaataattgccgggcccacctcggccctccagaaaatttcttcttaaacccattccttttggccgccgcgggccccctaagggaaaaccgaaacatgggccttaagtttgttcccaaaggaaaaacctggggcaattagcctaagggctttggaattnnnnnnnnnnnnnnnnnnnnnnnnnnnnnggggggacacccgaaggcgtttctgaaaccaatccccaaatggggagttctccgcagggccctctcactgggaatctcttccaaacggggggcgtcaccgcgcgaggccttgaaaattcaaatttttacacccccgggcccccttggccctgtcttttttacaaaaaaccgtggtggaaaaatctccttatagaactcttttctgcccgcaaaaatgggagaacccctctccccaaaaatgggcatttgtaatgaaacccttggaatactccccaacggtggcaaccacaaccccctttggtgaccccttttggagcataataaaatatttccgcccccgtgggggtagaaaacgcggggcgcgcaaaaagaaaaatttttcccccactgtttgggcgccccccgctttgtaaaactctcaatagtgggtggggtgaaaacctcctcccccccgggccatatttggggttctaaacaccaactaataaaactcgtcttctttttccccaccgaa

SEQ ID NO: 264011 - DNA, 478 bp, Homo Sapiens
agcacagaggcctgactgacttttttgcttaacttccatgttctgggtgatggaaactgccaaacctcctgtcagtgaggactctttccgactgcccagaaagtgggggtggaggaccgaggctacagctccacacgccccggtcccccagagcatctgccccaggtacacctccccctgcgcccgcacgactgcgggagcccagactgtccagggaaacagcctctctcttttctacacactcagccacaaagccccccagctcccacaccgcgtcccagctcccctcttttgtaagtatgtgaaaaggaaaaaatgcaaacgttggagtttgggctggagctcctccctccagctgcgacttttaactatgtaataatgtacagaggaagctgttggtgttctaagactctgtgtggctgtgcaatttctgtacatttgcaattagaaatattaaagatttatttagctattttaa

SEQ ID NO: 264012 - DNA, 451 bp, Homo Sapiens
  misc_feature (283)..(283): n is a, c, g, or t
  misc_feature (344)..(344): n is a, c, g, or t
  misc_feature (352)..(352): n is a, c, g, or t
  misc_feature (357)..(357): n is a, c, g, or t
  misc_feature (379)..(379): n is a, c, g, or t
gggacaggcgcgcccgcgccgcccgctccagctgggctagtgctgcacattccggccagcccctcctcaagaccccattcccaagccccttctcagctccctcgggccggcagagcggctctgatcagtaaaatgctgttgaaggcccacgggaatgactgcacccctcactaattggtcattggtttggggaggacaccactgtcccagtggaaccttgagcacaccttggagccctcctcttcctctccggacctgtgccaaactgtgagtggcacagagncaaggactgtatgtgttctcttctttgttgcatactcagttccttgaccacagtgccaagncacacagncgagncacttccctgtgtatctgctgnaggtaaaataaaacgaatgtaacaaacccaaacacattttcaggccaagttcctggctggatgttttcttct

SEQ ID NO: 264013 - DNA, 249 bp, Homo Sapiens
ggagataaagtgaatgaaatagtagaaaccaacagacctgatagcaagaactggcagtaccaagaaactatcaagaaaggagatctgctactaaacagagttcaaaaactttccagagtaattaatatgtaaagccatgtaactaacaaaggatttgctttagagataattatttggaatttttatagcttacttcacaatgtgcccaggtcagctgtataaaataaatactgcattgttgtttctttc

SEQ ID NO: 264014 - DNA, 529 bp, Homo Sapiens
  misc_feature (21)..(21): n is a, c, g, or t
cccggccgtggccgacagtcnggctgacctcagctgcgacagccgcgttaacagcgactacgagacggacggcgaaggcggcgcggtacacggatggcgagggctacacagacggcgagggggggccctacacggatgtggatgatgagcccccggctccagccctggcccggtcctcggagcccgtgcaggcagatgagtcccagagcccgagggatcgtgggagaatctcggctcatcagggggcccaggtggacagccgccacccccagggacagtggcgacaggacagcatgcgaacctatgaacgggaagccctgaagaaaaagtttacgcgagtacatgatgcggagtcctccgatgaagacggctatgactggggtccggccactgacctgtgacctctcgaaggctgccagctggtccgtcctccttctccctccctggggctgggactcagtttcccatacagaacccacaaccttacctccctccgcctggtctttaataaacagagtattttcgcaaa

SEQ ID NO: 264015 - DNA, 445 bp, Homo Sapiens
aacttagagaggaagaacccaggaccagagagcttaactcacttctctcagggaaaattaggagttgagcacaggacaggaaatgggctttgccacttttagctccaggcttttctaaccagacttgatttcctcatgttctagaaagatcactaatggtcaagtggaacaagcactacacgacctaaccctattggggtttttaacttaagggaggctaatttttaatttaaactgctcgagatatgagttctgcaaaaggtggtccgcatccttggccctctggacattatcactaaattgcttgtgcctgttaacaagaatactgaccagaatgctcttcatgtagcttatacagttggttcacttcatgcggttcttgacatgtttatttctacccttaatgcaatgaaatgtttcattaataaaaaacctttttatataa

SEQ ID NO: 264016 - DNA, 243 bp, Homo Sapiens
gcttgtgcagagaaactcctgtttttaaaacgatcagatctcatgaaactcattcactatcatgagaacagcacaggaaagacccacccccactctagcgttttgtcacgtcttacattttagcagtattttatattttctgtaacgcaccaagtcttagatctttctagagcttgtttgttcatcctcacaatcacagattttttttctccaatcctcacagaggacccaattggaccaaaa

SEQ ID NO: 264017 - DNA, 554 bp, Homo Sapiens
ggggcgcccagcagctgctggacgcggtggagcagcggcagcggcagctcctggacaccatcgcagcctgcgaggagatgttacggcagctgggccgccggcgcccggctgtctccgccagaggcggctttccaaagtatgctggcgatggagctgcggagccctgaccatccccgagcaaaataccctgacttctctccctccccagggccggtggctggactctgaacaactcccttcagtaaaggggccagtcttcactggcagtggctggtacttggctctcagcctggagtggcagctctgctagcagctgggttcactcccacttcatcctggctgaaagcagtgctgtgctttgaaatgcagccaatgaatacccagtctgattacccagatttgggcagaccagcagtgctcgccagagtggtctggcctgctatgggggatccaggtggtgttacatgtccatttcatgttttgggggcttttagccccacaaaacaccttcagtagagccttgattaaaaggaaacctgcagactctcctggtg

SEQ ID NO: 264018 - DNA, 449 bp, Homo Sapiens
  misc_feature (34)..(34): n is a, c, g, or t
  misc_feature (39)..(39): n is a, c, g, or t
  misc_feature (66)..(66): n is a, c, g, or t
  misc_feature (152)..(152): n is a, c, g, or t
  misc_feature (236)..(236): n is a, c, g, or t
ggacaagcaagaggatcgaagctgctgcgggccnagcgnaaattccgaccgtactgaagctgtganagccgcagtggatggctggaggtgcagggcccaggaggaacatgaggtgaagcagggcctgcagcggtctctgagaggccgagctnctgccaacgggccccaggttgaaggccaccgcgtccaacagccccatcagagtccacacaggccaggagggaaggaccaggccnacccctcgggtcttgtgcttcagcagtcctggagacccaggcgtgccgagaggaggacttgtccttcccacctcttgcctccacaccctcctctccaggaccctggatgaatccgttctgtgcttccttttccctcaatgcaaaagcccttgctggcaacaaaaaagcctcaaaagcagtgagaatacaagaaccttttattttacaagcgag

SEQ ID NO: 264019 - DNA, 1005 bp, Homo Sapiens; identical to SEQ ID NO: 178700
  misc_feature (517)..(573): n is a, c, g, or t

SEQ ID NO: 264020 - DNA, 1224 bp, Homo Sapiens
  misc_feature (287)..(288): n is a, c, g, or t
  misc_feature (293)..(294): n is a, c, g, or t
  misc_feature (471)..(481): n is a, c, g, or t
  misc_feature (671)..(706): n is a, c, g, or t
  misc_feature (774)..(782): n is a, c, g, or t
  misc_feature (907)..(907): n is a, c, g, or t
  misc_feature (1036)..(1036): n is a, c, g, or t
gggggacctggcacaggatgaagctgtatggctggagcgtggtcccctggagcccagtgagccggctgtagtggcagcagcccgggtgggcgtcggccatgcaggggagtgggcccggaaacccctccgcttctatgtccggggcagcccctgggtcagtgtggtcgacagagtggctgagcaggacacacaggcctgagcaaagggcctgcccagacaagattttttaattgtttaaaaaccgaataaatggtttattttctcgaaaaaaaacactccatctcacnnaccannaaacctgtccgcgccgcccccgccccttcaaaaagcctttctagcaccatttcgtttgggccgcgcggggccccagcaagggaaacgggaaccatgggccataagctcgtttccccaaaagaaaataccctgggccccttgaacctaaatggccttgggaatttccttcccaccacnnnnnnnnnnnccgcccccgcgcggcggaaccacccgcagccgtattccttccgaaacacaaaattctccccgaattgggagaagttctctctcgcaagaggtcgcccctctatacttcgggggaatctcttcctatcccccacccacgagggagggtcttcctcacatacgcgcgcaagcgtctctcctcaaattatttnnnnnnnnnnnnnnnnnnnnnnnnnnnnnnnnnnnnacgcgcgcgcacttggtggtcacacacatctctctaactgtcattcgcgagaataaacaaaggggtcnnnnnnnnnaacaatttccccccccctatattaaacgcgcctattttctctggtgcgcggcccacacaccttgtgggcgcaaatactcccccttctcttcccccaccaatcccgggagcgccgtcattcaccgncgagacacacccctcataaacacatttgcgcctccactagcggctgtcgtcatctctcaccaccctccctctattgtcctcccctgcctctggtgcggcccgatataaacagaataatctattttcccnccccctctgtgcgcgcggtacatataacacacggcgcggggcggcgcacgcaaaaccaaacacacatttgtgcctcctctcacaatattatcgtgcgcgcgcccaccctctctcttataaaatatcttccacaaccaccggtgtggccgagaaaaacacccccactccccacgccccgcgagcccgcg

SEQ ID NO: 264021 - DNA, 378 bp, Homo Sapiens
ccagctggctttgctccgttccctggctagtctgtgcctggtcaccagggaggctgagtgaggggctgtgaacagttgccggaagcaccccctccctccccggcccgtgcagcagtgtctgagctgtagtgaaagtttcagggcctgcaaaagaagaggcttgggcacaggactgaccatggctccaggggtttaggacccccagacctgtgaaggtgggagcagctcaccaccttcacgcaggctttgtatgttctctgagccttagttgattttggcccccaaaccaaatccaaaggttctggcccaccttgtcagaggcttccaccctgctcacatgttgggaatccctggaataaaatgcttgttcagtgtgaa

SEQ ID NO: 264022 - DNA, 699 bp, Homo Sapiens
  misc_feature (83)..(99): n is a, c, g, or t
  misc_feature (151)..(153): n is a, c, g, or t
  misc_feature (155)..(155): n is a, c, g, or t
  misc_feature (157)..(159): n is a, c, g, or t
  misc_feature (161)..(161): n is a, c, g, or t
  misc_feature (164)..(165): n is a, c, g, or t
  misc_feature (182)..(266): n is a, c, g, or t
ccccacgcccctagtctttggtcccggggtttcccttggaaacaaccggaaagccacccggttcccctttcctcctcgggggnnnnnnnnnnnnnnnnnaaatgtctttaagaaaatttttttggggccggaggggcgcccccacgggggnnngngnnntnaanngtttggtgttttggagnnnnnnnnnnnnnnnnnnnnnnnnnnnnnnnnnnnnnnnnnnnnnnnnnnnnnnnnnnnnnnnnnnnnnnnnnnnnnnnnnnnnncactccttatccaattttatcaaaaatagagattagggcaatatgacataacagcattaagcactaaaccatttgacagggattcctttcaaaagtgaaaaccagtgtacgattatacagcttctccactaatctttgttaccaacagccacttaatctaatcctaaagactgagtacaatattccttctacaatactttgaacactcacttcaatttattgcatattttctaaatgcaccgctctctctcttctgaaagagagaacatttcatcagaaaacgaacggggtcttttgcctatctgatggtctcacaccttcacaacagctacaaatccttggaccagccagggacagaccaactccagggttctctgacaacagaagtcctggaaaggctctgcactcaaaacaaacccctacaccaccccaa

SEQ ID NO: 264023 - DNA, 489 bp, Homo Sapiens
  misc_feature (22)..(22): n is a, c, g, or t
  misc_feature (33)..(33): n is a, c, g, or t
  misc_feature (140)..(140): n is a, c, g, or t
tgtaacactgctaaatatgccnaagtacagaantttatcctacagtactgtgagacagtcaattattgccctagggtagttccaaaaatatggatggtgagcctagttaagcctttgccttgactgatttccagtgatantcagaagtgtgtacccaatcaaggcttctttaaaatacggaacgactcaacttaataaccagggaaccagccaaatactgtgcagccgcagaatatgcatatcaatgagttggaggtgattattctctgtaactccctaatgattgttttctaagcattgtggcttctcagtggcttgacagcatcttcctggttgtatgtggcctgtttacatgatgtattgaataatgttgtttgttgtgagcatcaatgcctgtaacaccaaactaaacacgtgtttttgggatatgtttccaatctttaaatgaccttgccctgtccaataaataaatgattgtctcaccctgtt

SEQ ID NO: 264024 - DNA, 307 bp, Homo Sapiens
  misc_feature (238)..(255): n is a, c, g, or t
gttttaagaaaagtaaattcatcttgctcacagtcctttctggaagagtttagaaagcaaagaattcaccgactcagcaggaagcagaacgagctgttccttcttttgacacgcacaagctaatcccctagagagtggggatgtgggaaacggagggtaattaattctttggtcactggttcactgctgaatagccttggtcagttttggctctctcctattttagggggaaaaatannnnnnnnnnnnnnnnnnaaaaaataaaatgttcgcacaatgggagaaaattgctttaagtgttacacct

SEQ ID NO: 264025 - DNA, 476 bp, Homo Sapiens
  misc_feature (22)..(22): n is a, c, g, or t
  misc_feature (266)..(266): n is a, c, g, or t
ggttctgaaggaccaaaacctngaaaaagtatataaatctaaatcagaaactcgttggggcccacgaccaagctctaacagaagggaagaagttaatgatagacctgtgagaagatcaggtcccattaaaaaacctgtacttagagatatgaaagaggaacgggaacagaggaaggagaaagaaggagaaaaggccgaaaaggtcactgaaaaagtagttgtaaagcctgaaaagacggaaaagaaggatcttcctcctccccaanccaccacctcagccaccagcaccaattcagccacagtcagttccaccaccaattcaaccagaagcagagaaatttccttcaacagaaactgcaactttggctcaaaaaccatctcaggatactgagaagcctctggaacctgtgagtactgttcaggtagagcctgcagttaagactgtaaaccaacagactatggcagcaccagtagtc

SEQ ID NO: 264026 - DNA, 421 bp, Homo Sapiens
  misc_feature (63)..(63): n is a, c, g, or t
  misc_feature (99)..(99): n is a, c, g, or t
ttaaatttctgcagcatccctttagctttcaatctccccagccccctgaacccggaataaagnctactgcgcgatacacccagaagaacctcacagccngaggtgcccctcctcggaggacagccacgcgctacactggctctccgggccacccccaggacacagggcagacgaaacccacccccagcacacggcaggaccccccaaattactcactacggggggctgtgccataggccacacaggaagctgccttgtggggacttacactggggtgtcccccgcatgcctgtaccccagatgggtgggggcccgctttgcccatcctgctctcctccagccgagggaccctggtgggggtggctccttctcactgctggatccggactttttaaataaaaacaagtaaaatttgtgtttt

SEQ ID NO: 264027 - DNA, 642 bp, Homo Sapiens
  misc_feature (180)..(188): n is a, c, g, or t
  misc_feature (325)..(327): n is a, c, g, or t
  misc_feature (329)..(333): n is a, c, g, or t
  misc_feature (336)..(339): n is a, c, g, or t
  misc_feature (342)..(342): n is a, c, g, or t
  misc_feature (344)..(345): n is a, c, g, or t
  misc_feature (347)..(347): n is a, c, g, or t
  misc_feature (383)..(434): n is a, c, g, or t
  misc_feature (458)..(458): n is a, c, g, or t
  misc_feature (469)..(469): n is a, c, g, or t
  misc_feature (474)..(483): n is a, c, g, or t
  misc_feature (563)..(563): n is a, c, g, or t
gggagattgggatgtggattatgcttaacagtgagagctgaaatgagaccatttactttgtttaaaatgctgtactgtgcaagtttggaaatgtaaattaatttactgtatataatatcttgagtttgtttatacctccaagtttttacactgaagataaactagctttaattcaaaacnnnnnnnnnctttataagggaataagctgttgagctaaacctgtatacttgtgctttttattttctggatgcacaatgaaagtttatacttgtatctcactgcatcatatctgattgcagaaattaaagcacaatttacaagcaannnannnnnacnnnncanannanaaaccaccaaaaacacacaacaccccaaaaacacannnnnnnnnnnnnnnnnnnnnnnnnnnnnnnnnnnnnnnnnnnnnnnnnnnnaccaaaacacccggcgaccccaanacaccccccanacacnnnnnnnnnnttttggggggcccgcccctcgggccctttaaaaaaattctttctaaaacccttctttgtgggggggcccgcggccccccncggggaggagggcaaccggggccaaaaagtggttgttcccaagaagaaaccccggggacaagaaaaaaggggggttggt

SEQ ID NO: 264028 - DNA, 1703 bp, Homo Sapiens
gggaccacccacccgcgacgccgacgcaaggctgctgctatggggccgggcggccgtgtggcgcggctgctcgccccactaatgtggcgcagggcggtttcctcggtggcggggtccgcggttggagccgagcccgggcttcggctgctggccgtgcagcggcttcccgtaggagcagcgttctgccgggcttgccagaccccaaactttgtccgcggcctgcacagcgagcctgggctggaggagcgggcggaggggacggtcaacgagggacgcccagaatcggacgcggcagatcatactggtcccaagtttgacatcgatatgatggtttcacttctgaggcaagaaaatgcaagagacatttgtgtgatccaggttcctccagaaatgagatatacagattactttgtgattgttagtggaacttctacccgacacttacatgccatggccttctacgttgtgaaaatgtacaaacacctgaaatgtaaacgtgaccctcatgttaagatagaagggaaggacactgatgactggctgtgcgtggattttggcagcatggtgattcatttgatgcttccagaaaccagagaaatctatgaattagagaaattatggaccctacgttcttatgatgaccagttagctcagatagcacctgagacagtacctgaagacttcattccttggaatagaagatgatacttcatctgtgactccagtggagttaaaatgtgaataaaatattttatgcactgcgttagtcatttcagatttggattgagtcacttattggaaaatacagctcctaaagtccgtctccttggttaggctgctcttaggacaaggcttgtgtacctcatgggcactcctgctaactggcatgcagagactgtcgataagtgagctatacctgcaaccaaaaatcagtacattctacccaaaacttatgacacgctgcctttatcctgggaaatgtcatcagaatttcctgggagttagcactggctcctgtgcttgacttctctgctcagatttttattaatttaatttaggcttaaatgtaaaatcttaaccctgtttgtttaatgggaatggcaaaaattttaaaaaataatataaaacatagcccactggtcttatttttatactttgaggtgataatattcttctaggaggacttctgtaacccttccagaatactccagtaacacaagaaagtaaacaaagtgtttgttaggaaaaactctgaacgctctagttcttagttcatatgcaagagtattatcaaggttcacattaagtaccatggctggacatggtataacagaaatctgcgtagagtttgaaaaaaaattcagaacattccccattcaattgaaaacccaaaaataaaacatactacacaacaagctgcacctaaatgatgaaaaaatttattctgcgtcaaggtatctggaaaatgaagctgcatttggggcacattatacatgaggaatgatccatatatggtgagtacaaaactcaattatagaattatttcttagctagtaccagatactccaaattacaaatgcttaagtaaaagtaaaatatgatttgccatactaaaaggctagaagtgaaatatgacagaatttaaaccagcagatataaatgcagcacctatgtgtatatttttaaaaaatcaaatattgggg

SEQ ID NO: 264029 - DNA, 1276 bp, Homo Sapiens
  misc_feature (23)..(23): n is a, c, g, or t
  misc_feature (191)..(191): n is a, c, g, or t
  misc_feature (246)..(246): n is a, c, g, or t
  misc_feature (273)..(273): n is a, c, g, or t
  misc_feature (276)..(276): n is a, c, g, or t
  misc_feature (329)..(329): n is a, c, g, or t
  misc_feature (354)..(354): n is a, c, g, or t
  misc_feature (454)..(454): n is a, c, g, or t
  misc_feature (520)..(520): n is a, c, g, or t
  misc_feature (840)..(894): n is a, c, g, or t
cggggcgtccggcgcgtggccanaaggcggggtctgataaggcgatggtgtgggtgtggtgtccgagtcggaggggccctgggacgcggggccgcgcccgcccacttttgtacgtttcgccgccggtaggccgaatatcggcggcgtggggtgtatttgggtgacggcggggggtggtcgccgcgtggggnattgtgtggtggggtcggcgctaaagttcggagcaacgggggttgcacgaagtcnccccgctgtggcgcagcttgtccggtnctnccatacgcggtcgcgttcctgggtcggaatgagcattcgcgcgatggtgtggncgtaaacggggggcgtgggacgtgnaaggggtcgggtggcagcgctacttgcggagaagggacagaagagtccatgaggcccgcgggcggccgggaaatatcgcgggccgctggcggagagttangaggtggaggcgacttctcctgggccgggtaaggacgcccaggtcaatgcggcctgtcgaaaagcnctggcgtcgggggatgtccgggtcacggcgggaacgcaggttggcgcttccggggcgggggttttggttggggggaactgccgagcacagactcgaggcgcggtgacgtccgtaggaggccggcgtggccccaggggcgcgctacctgccggggccgccccccaaacggaggggtgtagaaagcttgtcgaggcccgaggcggcccgcggggcgcggcgtcgcggtgggcggtcgcggcccgctctgcatgtttgaggggcgctcaggtgggcgtggggcgcgggtgtccttaaatgacagcccccaaggtcagggcatnnnnnnnnnnnnnnnnnnnnnnnnnnnnnnnnnnnnnnnnnnnnnnnnnnnnnnnacctcagctgcacttgcaggagcgcacgatcatgttggacagctgctccaccttgggcttgcggcccacgtagtacacgatgggcagcggctccagcgcctgcggcacgcagcacggcgccgccgaggcgcccgggttatgctggttgtacagggccaggaccttgctgtactgcgtgtccaggctccaaatgtaggggcagggcccgaggcagaagttggcatggtagcccttgggctcgtggatccacttccagccgaggtccttgcggaagtcaatgtacagctgccgcacgcagcagttcttctccgtggagctgaagcaatagttggtgtccagggctcggcggtgccgggagctttgcagatgctgggccctctcc

SEQ ID NO: 264030 - DNA, 1008 bp, Homo Sapiens
  misc_feature (322)..(322): n is a, c, g, or t
ccgcgggctgctgacctctccccacagccaggcgacgaaacagcctctggatctggggaagctagtgagctcggtggcggcccagagactggttttggacactcttccaggtgtgaagatctccaaagcccgtgacaaatctccctgccgcagccagggctgcccacctagaactcaggataaggccacccatccccctccagcgtcccccagttctctggtgaaggtgcccagtagtgccactggaaagcggcagacctgtgacatcgaaggcctggtggagctgctgaaccgggtgaagagcagcggggcccacgaccangaggggccttctgaggaaagaggacctggtacttccagaatttctgcagctgcccgcccaagggcccagctccgaggagaccccaccacagaccaaatcagcagcccagcccatcgggggatccttgaactccaccaccgactcagccctctgacagctacccaacagtccaggacagctgcatggcacccggcgggccgagcatgccatgggtccgctctgcatgccctgtctgtgccatgagtgtccctggccccttcctgccatgggcaggcccgcaggaagagccggtaggggtggaaaggggactcagatgagacacaccccacagctgccaccgccttgtccctcaacaagctcacccccaatcccttgcagccaggccacaatgggggaggtgagtccagccccttggaacaggcttgcccaacatggagggatggcgttgcagtgccagcctccccagcctgtgccaagcttcaacaggggcaaagaggagggccggcccctcctcaggaagctggtatgagtaaggccttgagggtgcaggcaggcagccctgtaccccacccacatagactatactgtacatacagattttgcagtaggcttggggcagctgggtttgtccttgatgtatgatactgttattataataattattattattctgcgaaacaaaaacc

SEQ ID NO: 264031 - DNA, 812 bp, Homo Sapiens
ggagaaactgagactcagcaacatcaattaatctgtccagagttgtccagctagtaagtagtggagctacatttcaaacctaggtcttagtgcttttaaaacctttgctttccactgcagagtattgctgcctgaatgaaagaagcaaataaaaaaaattacacatttttaataagcagaagtagtgatgagattaaagcactcctattctgattaaccttctaacccctttccacttttgaaagcctagaaacaaataagtaagctaccgtgggctaaaacttgggtatttttctttagtttttttaaattatgatatcatatatataatattacataatgtatgtagctatttttatcattactgtttgtcacttcttcggttgtagggattaacttcctgtatgctgcaactcatgaacttggccattctttgggtatgggacattcctctgatcctaatgcagtgatgtatccaacctatggaaatggagatccccaaaattttaaactttcccaggatgatattaaaggcattcagaaactatatggaaagagaagtaattcaagaaagaaatagaaacttcaggcagaacatccattcattcattcattggattgtatatcattgttgcacaatcagaattgataagcactgttcttccactccatttagcaattatgtcacccttttttattgcagttggtttttgaatgtctttcactccttttaaggataaactcctttatggtgtgactgtgtcttattcatctatacttgcagtgggtagacgtcaataaatgttacatac

SEQ ID NO: 264032 - DNA, 855 bp, Homo Sapiens
  misc_feature (621)..(628): n is a, c, g, or t
  misc_feature (631)..(634): n is a, c, g, or t
  misc_feature (638)..(692): n is a, c, g, or t
atcaattacagtggttgcagacatcatgagtactcctttggcacagagctcggtcttttacttcctgcccctaattgacccctgacctggacatatctgtctttaggcctggaagtggtgtgtctaagggactggctgagagtctgcagccagactacagtgaacgactctgcctcgtcagtgagattcccccaaaaggaggggcccttggggaggggcctggggcttccccatgcaaccagcatagcccctactgggcccccccatgttacaccctaaagcctgaaacctgaaccccaatcctctgacagaagaaccccagggtcctgtagccctaagtggtactaactttccttcattcaacccacctgcgtctcatactcacctcaccccactgtggctgatttggaattttgtgcccccatgtaagcaccccttcatttggcattccccacttgagaattacccttttgccccgaacatgtttttcttctccctcagtctggcccttccttttcgcaggattcttcctccctccctctttccctcccttcctctttccatctaccctccgattgttcctgaaccgatgagaaataaagtttctgttgataatcatcnnnnnnnnaannnnaatnnnnnnnnnnnnnnnnnnnnnnnnnnnnnnnnnnnnnnnnnnnnnnnnnnnnnnnccttgtggggccgccctcggccctccaaaaaatttttcaaaaccatttctttttggggcggggggccccaataaggaaaaggggaaaatggccctaaaactgggtttcccaaggagaaaacccggggcccaggaaaaaaggggcttggggatttcccccccac

SEQ ID NO: 264033 - DNA, 484 bp, Homo Sapiens
  misc_feature (259)..(259): n is a, c, g, or t
gaaaaactgaagtaaatgtcaaaaaacaccagccttaaatccaaagggagagaattcgtgttcttgggtctgtcccgagtgggctcgcgtgcagccaaacatcagctctgggtccaggcgtggcctcagctgggaacctgtgtcctgaacccccggaacgaaggggtccctggggcatcttggccctctctgggaagaaaatgtgtgcacctatgtggaaggccaaggacatgggctgtgcccaggcctgtcccgctcnaggccccctgcccggcggccgtctgtgtgcggggcctccctcctgggctgtccagggacacagcccgtgcagccccagcctgggacccaggccatctctggttgtgtctgtgccgactcggtgttgaatcaaatcaggtgtgcgtcaggagccggctgtgtccttcctgccacactcggggattcattccttagaaactgaaataaattctaattttggaaactc

SEQ ID NO: 264034 - DNA, 845 bp, Homo Sapiens
  misc_feature (590)..(591): n is a, c, g, or t
  misc_feature (594)..(594): n is a, c, g, or t
  misc_feature (597)..(599): n is a, c, g, or t
  misc_feature (601)..(601): n is a, c, g, or t
  misc_feature (604)..(615): n is a, c, g, or t
  misc_feature (628)..(723): n is a, c, g, or t
  misc_feature (729)..(729): n is a, c, g, or t
  misc_feature (732)..(733): n is a, c, g, or t
  misc_feature (735)..(735): n is a, c, g, or t
  misc_feature (747)..(762): n is a, c, g, or t
gtgcggccctacatggacgcggtcgtctccctggtcactctcatgttggacacgggcctgccctgttttcgcggccagacaatcaagctcttgaagcacaggtttagccccaacatgactgagcgcgaggctgcaaatttcatcatgaaggtcatccagagctgcttcctcagcaacaggagccggacctacgacatgatccagtactatcagaatgacatcccctactgaggaggggaccttcgagggcctctgccccatgtgcccttgaagctgccccacaatcatggagccctgcgacctacccgccctgccgccacatgcagtggaggagaggcctgtggcccgaagagcctggtagcgcctcctggggcagcacgtgggtggcgcaggcttagtaacgccgtggactgcagcgacaatcagtggatggtgctgtctatgcacaggtgtgagtcctctgtttgcactggacatattccctacctgttttatttcataggtacatgaagtattgtgtataaaaaaagagataagatttaaccaacatcaacaaaataaaaacccaaaatagtgctgtgttggaaaannaanacnnncnacnnnnnnnnnnnnccacacaaaacannnnnnnnnnnnnnnnnnnnnnnnnnnnnnnnnnnnnnnnnnnnnnnnnnnnnnnnnnnnnnnnnnnnnnnnnnnnnnnnnnnnnnnnnnnnnnnnaacaanaanncnaaaatggggggnnnnnnnnnnnnnnnnaaaaaagtttttaaaaaaccttcttttgggggcggcggccccccacaaggaaaaaggaaaagggggctatactttgttccccc

SEQ ID NO: 264035 - DNA, 420 bp, Homo Sapiens
  misc_feature (158)..(158): n is a, c, g, or t
aactaccttcagtgccacaacacaagggtacgaaaccctcctcaggccctttccggaagaacctttccataattccatggaaagccccagttcctgaagattcaccgtatcccatcctggagaccctacaggaagaaagtgattgggttccctctggntcttgcctgcttcactgtggatgggaagaggtgacaacctcaggtctccctttgggacctgtccaagggtaggcaaccaccttcaccttcacacagattgaggagacactggactttttacccattttctttaatcttcaatattaatattgtgtttacattgatgagaacaagagttaatgccctaccctctgctgggctgtttgtattgagttgcaatgtgaccagcgaaagctgcatttaataaatgaaagtacagact

SEQ ID NO: 264036 - DNA, 378 bp, Homo Sapiens
gggtgtcgctcagatgtcctttgaagtgggagggaatcaatccggggataatttcaaatggaatagagtattttgatatagttcattcggagggtgatgtgtacatatctatattgtatatatgtgatgaaaatgcattggctttttgtgcagatacaacctgctctctgtactgctgttggacagtcagtgttttaatgtttctacagttttgctattgcacgatttcatattttgcctctatgatgaacggcaaccattatttgtaactgtttagtgctgtaaagaaatattccaagtgtcattaggattgttgctgccagaactgatatgcatgaatggcacttaaaataaatatattatgttaactctgaaaaa

SEQ ID NO: 264037 - DNA, 385 bp, Homo Sapiens
gggcgtggcagggccctctctgtgccctctcctccccaagtaggaaggggctccgggtggctgctctgggactgggcacccacaagggctcagtgggcccaaacccttgaaatccgtgaaaccgggtggtcccaagagctagaaactcaggaaaccccaggtgctcagggccccgcgtctcgggggctccgtggggcagacccctgctaatatatgcaattctccctcccccagcccttccctgacccctaagttattgcccgctcacctctcccaggccccaggcgcggagctggcagggtggcgcctgcggtttctatgtatttatagcaagttctgatgtacatatgtaaaggacttttttaaatatatgtgccttttgcct

SEQ ID NO: 264038 - DNA, 589 bp, Homo Sapiens
gagctccaggaagtgatacagcagcagaatgagaagatcctagaacagatagacaagagtggcgagctcataagccttagagaggaggtgacccaccttacccgctcacttcggcgtgcggagacagagaccaaagtgctccaggaggccctggcaggccagctggactccaactgccagcctatggccaccaattggatccaggagaaagtgtggctctctcaggaggtggacaaactgagagtgatgttcctgggagatgaaaaatgagaaggaaaaactcatgatcaagttccagagccatagaaatatcctagaggagaaccttcggcgctctgacaaggagttagaaaaactagatgacattgttcagcatatttataagaccctgctctctattccagaggtggtgaggggatgcaaagaactacagggattgctggaatttctgagctaagaaactgaaagccagaatctgcttcacctctttttacctgcaatacccccttaccccaataccaagaccaactggcatagagccaactgagataaatgctatttaaataaagtgtatttaatgaatttctcc

SEQ ID NO: 264039 - DNA, 421 bp, Homo Sapiens
agcattacccggatataattctctagaaagagaattcccattttattcatttatttattttttgcaaacaattttagaggcagggtattaaactgattaaaatttcacaagattgacattattgcttaaagtgcttgaattggttacattttaaaaaattaaggtacagattattttaaataaaaactacaatatttttagcaacaaaataataggaatgccacacaaatacagtaactattttggttatacagaaatggaagccaaaaataaattaatgtaatactggaaaacagaaatttaattaggcagaaaagtaggaaataattttccctgacccatgccacttacatgagttcattacaatagtgctgataaatgccttgaccatataatagcaacaagggcaaacatttagtgc

SEQ ID NO: 264040 - DNA, 873 bp, Homo Sapiens; identical to SEQ ID NO: 176951
  misc_feature (547)..(604): n is a, c, g, or t

SEQ ID NO: 264041 - DNA, 721 bp, Homo Sapiens
agcaggctggtccggtccggaatccctgggatatcgtcgacccacgcgtccgaatttgcagactaactctcataataaacagaggcccatagttgtttatgaactgcttatcccttaaaggagcacaagaacccctccctgccctccttgggcaccctgcctccaggagatggaggcacgtgataagacaaaagactgcaccaactcaccctgacacagttacatagtcactgagagtggggaagatgggacagcccacatgctgcataagatgggccttatgcagcaggcccaggtcgtcattaaggagtgacccctttcctgtaacctgcactttgggatggtagaagtttctttacctgctgacaggtttggtggcactgctggttacccctgggccctgaatggagctaaaatcacatttggtaccagcagcacctatcccaagtgtgatccttcatcccaacactccctcttggagctgttccctgggtagagctagcatgccagcagcttctgcaggctccaaacccaggccagaagccagacccaggcctgctgcctgcatctgcattccctccttccagtgttccttagaacagacatttaggtatctcaggtcctttctaagtgtccctttcctatgtatgcatttcctttttttgtctttactatgcactttagcttataaagccaattaaaaacgatgattgagaaaatc

SEQ ID NO: 264042 - DNA, 463 bp, Homo Sapiens
atttaaagaggtcatcatcaaattttctgtgttatttaagattttagttttaattctgaagaaagagggtacatttcctcgtttttagttttagcgtcagggttataaccaggtttctgttttcttttctcctgtcttttcaatactgcacaaacgtccagaaactacagggttaagtaaaagctgcaggcaaggaggtcagagatttgctcccgatggtgatcagatgaccccagagcagtgctatctcagagtgccctcgtcaggtgaatttatggtaaaacaaaaaagattccgacagaggagaaggactgaagaaatgacttacatttcagctcttatattattaataggtattaaatctgtgaatacttttttctttaaaacatttcaatttactttaaatctaagagccaaaaatttttctcctttaaaaaaattacttctcacctccttatgaact

SEQ ID NO: 264043 - DNA, 581 bp, Homo Sapiens
  misc_feature (17)..(17): n is a, c, g, or t
  misc_feature (24)..(24): n is a, c, g, or t
  misc_feature (36)..(36): n is a, c, g, or t
  misc_feature (42)..(42): n is a, c, g, or t
  misc_feature (47)..(47): n is a, c, g, or t
  misc_feature (54)..(54): n is a, c, g, or t
  misc_feature (61)..(61): n is a, c, g, or t
  misc_feature (73)..(73): n is a, c, g, or t
  misc_feature (96)..(96): n is a, c, g, or t
  misc_feature (108)..(108): n is a, c, g, or t
  misc_feature (271)..(271): n is a, c, g, or t
  misc_feature (312)..(312): n is a, c, g, or t
  misc_feature (483)..(483): n is a, c, g, or t
gccctgtggggccatangccaaangatggatggggnaggtgntgggnaaggacnaaatccncccggaggaggnaccgggccccgatgccccaaagnggtcccaagggngggtgagaaggtaattttttaaagggggggaaaaaatttttggggccctaagatttaaaaggtaaattggaaatggtttaaaaggaaaaaaaggtattccaccagatttaaatcccccctattaataatataaggaggctgaaatggtaaagtcattcccctnaagtccctcctccctctgtcgggaatccttttttggttttnccccataaattcaccctgacgagggcacctctgagatagcactgctctggggcccatctgatcacccatcgggagcaaatctctgacctccttgcctgcagcttttacttaaccctgtagtttctggacgtttgtgcagtattgaaaagacaggagaaaagaaaacagaancctggttataacctgacgctaaaactaaaaacaaggaaatgtacctctttcttcagaattaaaactaaaatcttaaataaaacagaaaacttgatgat

SEQ ID NO: 264044 - DNA, 764 bp, Homo Sapiens
cagatgtggctactgctgtatctcaacgacctgaaggcggtctctgtggagagtctgctggcgttctcagggctctccgcagacatgctcaatcaggcgattgggcccctcacctcttcaagaggccccctggaccttcacgagcaaaaggatataccaggaggggtcctcaagattcgagatggcagcaaggaacccaggtcgagatgggacattgtgcggctcatcccacctcagacgtacctgcaagctgagggtgaagacggccagaacttggagaagagacggaatcttctgaactgcctcatcgtccgaatcctcaaggcccatggagatgaggggctgcacattgaccagcttgtctgtctggtgctggaggcttggcagaagggcccgtgtcctcccaggggtttggtcagcagccttggtaaggggtctgcatgcagcagcactgacgtcctctcctgcatcctacacctcctgggcaagggcacgctgagacgccatgacgaccggccccaggtgctgtcctatgcagtccctgtgactgtcatggagcctcacactgagtccctgaacccaggctcctcaggccccaacccacccctcaccttccataccctacagattcgctcccggggtgtgccctatgcctcctgcactgccacccagagcttctctacttccggtagccctagacttggggtcaggggaaggtagagctggagcttttacagaaataaaacccaagagtttgatacacc

SEQ ID NO: 264045 - DNA, 650 bp, Homo Sapiens
  misc_feature (495)..(495): n is a, c, g, or t
gggccccgcccccgaccccgcgcgaagagtgcgcaggcgcgccgacagccgagttttctgcgcttccttctccctctctccagacgtcgtggtcgttcggtcctatgtcgcgccgggccctccggaggctgaggggggaacagcgcggccagcagcccctcgggcccggcgccttgcatttcgatctccgtgatgacgatgacgcggaagaagaagggcccaagcgggagcttggtgtccggcgtcccgggggcgcagggaaggagggccgtccgagtcaacaaccgcttcgagctgataaacattgacgatcttgaggatgaccctgtggtgaacggggagaggtctggctgtgcgctcacagacgctgtggcaccagggaacaaaggaaggggtcagcgtggaaacacagagagcaagacggatggagatgacaccgagacagtgccctcagagcagtctcatgcaagtggcaaaaaacgaaacaaaagaacnaagtaaaacatggtcggccgcctcggcccctcgaaagctttctaaaccatttcgtttggcggcgcggccccagtaaggtaaggtgaacagggtcataagcggtttcctaggaaaacccgggccaatgaactagggcctgggatttcctccccaat

SEQ ID NO: 264046 - DNA, 1199 bp, Homo Sapiens
  misc_feature (17)..(17): n is a, c, g, or t
  misc_feature (24)..(24): n is a, c, g, or t
  misc_feature (40)..(40): n is a, c, g, or t
  misc_feature (49)..(49): n is a, c, g, or t
  misc_feature (76)..(76): n is a, c, g, or t
  misc_feature (120)..(120): n is a, c, g, or t
  misc_feature (150)..(150): n is a, c, g, or t
  misc_feature (199)..(199): n is a, c, g, or t
  misc_feature (236)..(236): n is a, c, g, or t
  misc_feature (564)..(608): n is a, c, g, or t
  misc_feature (851)..(863): n is a, c, g, or t
  misc_feature (947)..(1009): n is a, c, g, or t
  misc_feature (1088)..(1088): n is a, c, g, or t
  misc_feature (1184)..(1184): n is a, c, g, or t
actgtgccgtcctgctnccccctnaagttggcaaaaaagnatgttttgnccccattcccttgaagcccaccggganaacccctggacactagggtcaggcggggtgctgttgtggtgggnaaaaggcatggctggggtgggggtggggancccctggttggccgtggtccagctcttggcccctgtgtgagttgagtcncctctctgagactgctaagtaggggcagtgatggttnccaggacgaattgagataatatctgtgaggtgctgatgagtgattgacacacagcactcttcttaaatcttccttgtgaggattatgggtcctgcaattcttacagtttcttactgttttgtatcaaaatcactatctttctgataacagaattgccaaggcagcgggatctcgtatctttaaaaagcagtcctcttattcctaaggtaatcctattaaaacacagctttacaacttccatattacaaaaaattttctataaaaaagacaacacacaacgccaaaacactaacccactacaaacatcacaataatacaaaacaaaccnnnnnnnnnnnnnnnnnnnnnnnnnnnnnnnnnnnnnnnnnnnnntttgggacccctccgcccccgcaaaaaattttccacaaacccttttcttggcggcgcgccgcccaaaacaggaaaggcgaaactgggccccaaccttttctctccaagaaaaaaccccggcacctacaaatcagcggcctcgggtttcccacacaacaaaaacaaccccccggtccggccacccgagggttatcctaaacaacccccaaaaaggggatcctccggcgcgccccttactgggannnnnnnnnnnnngggaagtcccacagacgcgttccgaatattaaaaattaaacctgccgcccgccggcagaatatttttattagaaccgggcgttnnnnnnnnnnnnnnnnnnnnnnnnnnnnnnnnnnnnnnnnnnnnnnnnnnnnnnnnnnnnnnngctatcgtgtgaaacacgccgcgctatatcgcccacgcgcctaaaatttacaccacccttttgctctccgcttacgcgncggtaatatatatatttcccgcccctggtgaataacaaccgccgaccacttagaaaaacccttcttcctccatacgccgccgcgccaccccttcanacattatctaacggt

SEQ ID NO: 264047 - DNA, 1004 bp, Homo Sapiens
  misc_feature (525)..(539): n is a, c, g, or t
  misc_feature (908)..(908): n is a, c, g, or t
  misc_feature (923)..(923): n is a, c, g, or t
  misc_feature (937)..(937): n is a, c, g, or t
  misc_feature (956)..(956): n is a, c, g, or t
  misc_feature (985)..(985): n is a, c, g, or t
tctggtgctctcctgcctctcttgggctccggcttggcgccttgcgtgccgtctcgggctgtggggcgtgtgtctgccttgctgctgcgtggttcgtctggcgtcgtcgcttgtctcgccgtcgtcgcgttattctctgtctttcgtgtcctgctgctctcgcgctcgtccgtcgccgaggtgtccgtgccagcgttttgtgcgctctggctcttggttccgaccgtagtcggtccgttctgtggtgccgctgcatctgtggtcttgacggtgtgtgttgtctccgtcggttgctgagtgcgtgttcctttgttgcgtgttgttgttctgtgtatggtgcctctgtgtctgcctttgtatgttggcttggcgattgatgtctctgggttggtatgttgttccgttctgtgcttgttcgtctggttgcttcttctcgctgttccctcttgctttcgttccttgttcatgcgtcttcgttttccctctgttgccctcagacttccacagtggtaaggaggctgcccnnnnnnnnnnnnnnnggttgtggctgagaatgctggagatgctcagttctctccctcacaaggtaggccacaaattcttggtggtgccctcacatctggggtcttcaggcaccagccatgcctgccgaggagtgctgtcaggacagaccatgtccgtgctaggcccaggcacagcccaaccactcctcatccaagtctctcccaggtttctggtcccgatgggcaaggatgacccctccagtggctggtaccccaccatcccactacccctcacatgctctcactctccatcaggtccccaatcctgggcttccctcttcacgaactctcaaagaaaaggaaggataaaacctaaataaaccaggacagaagcagctctgggancaaaaagtacaaaanggcagccagaggtnttgcggagagggtgaggtngccgcgtgggacgtgggtaggtattcgcntgcagcactggatctcctg

SEQ ID NO: 264048 - DNA, 418 bp, Homo Sapiens
agaaaatagaaaaccggaaaataattgaactttaaccccggccttttccactatttaatttttcctaaataactcccccggcttacggccttaggtaataaaagtcctctgcccacctttccaagacattttaagctttccatgtttccttgtcagcccatgattattctgtataatcaatgctttaaaagaacatagaaattcctatatgtacatgcatgttttcacaggatatttttaaacaagctactgaagatagattaacaagtgcaaaggaattgccttatttcgagggtgatttctggcccaatgttctggaagaaagcattaaggaactggaacaggaggaagaagagagaaaacgagaggaaaacaccagcaatgaaagcacagatgtgaccaagggagacagcgaatg

SEQ ID NO: 264049 - DNA, 784 bp, Homo Sapiens
  misc_feature (563)..(572): n is a, c, g, or t
  misc_feature (595)..(616): n is a, c, g, or t
gggtcaactgcacgtgttttatatttttaagagatcgtaggcaattacagatcgaagcctcctatctccacatctctgaagaagctgaggggtgggggagagaatgacttctgccttcatctgcagtaacggggggacctatactgacctcttccccagccatttagaaacaagctctagggtgggttggaaaatctccaagagccctgacctcatcttccacctcagcaaccatgacctgaaacctcagcgtgaatttgggggattttccagtggaacccttgcccccaaatgtcgaccagcccccaaatgcccaagaatctccttcttcgcaatcctgctgtttaacaacaaaatgccgggaaacttaccaccctggagcccccaacacgggcggcaagaaaccggccacacaacttgcccggccgcctcgggccctgcgagaaacttttctagaccctttcgttttggggtggcgggtcccagataggcaaaccggcaactgggtcatcgcctggcttccctagggagatcccggggccctgcactaaccgcctgggatnnnnnnnnnnataaaaaacacgcccggcaaggnnnnnnnnnnnnnnnnnnnnnntatttccgcacggccgttcctcgagctcgtttcctgcgacccaacaacccccgggttttccccggggccttggttacgcacgatgtgcgcccccgccacctggcgacattccccgaaaaccgatgagtgggtcaattcccccccagccgctttcgggccaaaaccggg

SEQ ID NO: 264050 - DNA, 459 bp, Homo Sapiens; identical to SEQ ID NO: 92642

SEQ ID NO: 264051 - DNA, 421 bp, Homo Sapiens
  misc_feature (344)..(344): n is a, c, g, or t
  misc_feature (372)..(372): n is a, c, g, or t
gggtttctaataatttttttaaagtcaagaaagataagagcaccattctatttctccccacacacataacttaaagaagggtcagatacaattgagctgaaaaagagacagactgacctgggttcttcctctgtctccaaacaggagagtatactatctgaaaagcacaggccactacaatggaagttttcggatttacaatctttcttagatatattttgaacttggtaggggaaagagggcaaactcataattgtctatactgctttgaaaataagatccactctgggtggtggggtctgggaaataatcagggattcacttactcgtaagcatatcaaagntattaaatgatccttacccttcaggggncatctaggaaaggttggggctaaatgtgtggaaattccttaaaattaac

SEQ ID NO: 264052 - DNA, 342 bp, Homo Sapiens
ggtaattttgtctcaatttaatttgttgtaaggtggggtggggggaattgctggtttcaccatttcagatctgtgttgtctaagagtattaacgttttaattaagcaaagaaatgatttttaatctgtatgtaattgttttaaagcacccattttaagagaaaatactgtgcaatgaagaaaccagtttaggcatttgctataaactgaaatattccaaaagaatcatctataacagccctgtaaattcctttaaaatgataactaacaggacagtttgaccaattttttttaaatatacttccttttatgtgttcaataattaaatgcctttgggtccttc

SEQ ID NO: 264053 - DNA, 1031 bp, Homo Sapiens
  misc_feature (714)..(792): n is a, c, g, or t
  misc_feature (838)..(838): n is a, c, g, or t
  misc_feature (923)..(931): n is a, c, g, or t
  misc_feature (941)..(941): n is a, c, g, or t
agaatacaagctggagcgcgagtagtgattaaatgcgcgggcggggatgaattactaacgtggaggaacgtgtgtaggacacaggtcgcggcgtgtgagcaacaagagagaggcgggtgagagggcggcgggagaacacgggaatgcgtccggcagagcgaccagcgccggtgaacggtaaacgtggtggtgctcatagtgatggggtggcggagcgaggggagaaaaggcgtgggccgacgcagaccagagagggcaagcggtgggcgaacgcgggatactggaataaatagggatcggcggagtgagatagcagtgaaaggggaagtacagatgggatcgactccgaggggcgacatggggggagcacaaaagaagacatggaggggtttgcggcaagggtaaggggaagggggggcagcaaggcgaaatggcgggacagtgccggtaaaccaaaaagaagggcgcgggtgagatgatatggcggttggggaagggatgggggcaccccctgatagacgggagagacttgttttttggaagagaattttttgcgcgggcggggtggggggttagatacgtccactttgaaaagaaaaattgccacaggggcgggtagatagaaggtttctgtgggggaaaatattcccagctttgtaggccaaatcccgtaaacatcgtttttcttcaattcccccaattttattctttccnnnnnnnnnnnnnnnnnnnnnnnnnnnnnnnnnnnnnnnnnnnnnnnnnnnnnnnnnnnnnnnnnnnnnnnnnnnnnnncttaaaaacaacacaaatctgaaatggtgaaaccagcaattccccnccaccccaccttacaacaaattaaattgagacaaaattacaaacacatttcactacatgattattattaataaaaatcagtttcnnnnnnnnnataaagttgncccaaaatgcaagggatgtgcataggtttacaacttagtcataatagcattttaattcttattcccctggggtgtggccccatggaacgg

SEQ ID NO: 264054 - DNA, 513 bp, Homo Sapiens
agaagtctctactaaaaaatacaaaaattagacaggctccttccaagcccaggtccaagcagtgttacccatctgcttctccctgggaggacaaaccaggcacccccaccatgaaggggctgcaggcaccatgaactatgttaacaaccccagtctgtactacagaaagggctgcagccacatgagaattcagtccacacaagccccatggccgtgttccccacttcagccacaaggctcagggagccccatctggcgctaaggggaactgctggggtgtgggtgacacctggcctttggcgttctgccttggggaggtttctggttttgttacggggtggaagaataggacctgggggtctcggatgcaacctgcagaccccgtggctcacccaaccccaggttctgcctcccagaccagaacgggcatggcctggtccttggcaccgaggtgcctgctctgtaaatatcaagggattacaactttaataataaagcagaacttgataacaa

SEQ ID NO: 264055 - DNA, 1736 bp, Homo Sapiens
  misc_feature (870)..(914): n is a, c, g, or t
  misc_feature (1632)..(1694): n is a, c, g, or t
gggacaagctggccgagtatgtcgccaggaacggcctgaagttcgagaccagtgttcgtgccaagaatgatcaaagatttgagttcctgcagccgtggcaccagtataatgcttattatgagtttaagaagcagttcttcctccagaaagaagggggcgatagcatgcaggctgtgtctgcaccagaagaggctcccacagactctgctcccgagaagccaagtgatgctggggaggatggcgcgcctgaagacgcagccgaggtgggagcacgggcaggctcaggcgggaagaaggaggcatcgtccagtaagaccgtcccggacgggaagctggtgaaagcttcctttgctccaataagctttgcaatcaagcccaaagaaaatgatctgctccccctggaaaaaaatccgtgttaagctagatgatgacagtgatgatgatgaagaaagcaaagaaggccaagaaagttctagtagtgctgcaaacactaacccagcagttgccccaccctgtgtagttgttgaggagaagaagcctcaacttacccaggaggagctagaagcaaagcaagcaaagcaaaagctggaagatcgcctcgcagctgctgcccgggaaaagctggcccaggcgtctaaggagtcaaaagagaaacagcttcaagcagaacgtaaaaggaaagcggcgttatttttacagaccctcaaaaatcctctgccggaagcagaagctgggaaaattgaggagagtcctttcagtgtcgaggaatccagcactacgccctgccctctactgactggagcaggcctctgcctactttagaagttaaaccacccgataggccttcgagcaaaagcaaagatccaccgnnnnnnnnnnnnnnnnnnnnnnnnnnnnnnnnnnnnnnnnnnnnntctcgaacaagatcacgttctcccaagtaccattcgtcatccaagtccaggtctagatcacactcaaaagcaaagcattctcttcccagtgcctatcggacagtgcggcggtcgagagtcacagacctccccagggacgctgcgcgcggagccctgatcagagcagcagcgtcagtagacagcggaaagccgagccaaggaagttatcagggcagcctcgaccacacaacagattagactcccgcgagctctataagagggagaaccgtggtaaaacgtcaaaggtcccgatccacggacccctcggaggagagcccaaatcacctgagcagacggagggaagaagaggagtgtgccactgcgtaccgagtgaggcagaagacactgggaggcaagcatgcaagacggcaccagatacaagaagtacccaggagcacgcaaagaaaacgaggacaccggacgggaacacagtccaaggcaaggacaagacggagaaacccaagaaagagagagggcacaggcacgaggaccaggggccaagagtcgcattcaacaaagtctaccggtgagaagtgggataataaaaagcagcccagggggcagtacagcagaaacgaaagccgagacgcaggagacgcgaatcggaagacgaaaacaaagagaccacgaaacaacaggggagcagacaacaaagaggagtaggagaccaggacagggnnnnnnnnnnnnnnnnnnnnnnnnnnnnnnnnnnnnnnnnnnnnnnnnnnnnnnnnnnnnnnncaacactagacagcggacacgaagcagccgcgcaaaagcagt

SEQ ID NO: 264056 - DNA, 836 bp, Homo Sapiens
  misc_feature (19)..(19): n is a, c, g, or t
gacagcccgcgcccctagnaacgctttgcgtcccgacgcccgcaggtcctcgcggtgcgcaccgtttgcgacttggtacttggaaaaatggacaaggattgtgaaatgaaacgcaccacactggacagccctttggggaagctggagctgtctggttgtgagcagggtctgcacgaaataaagctcctgggcaaggggacgtctgcagctgatgccgtggaggtcccagcccccgctgcggttcttggaggtccggagcccctgatgcagtgcacagcctggctgaatgcctatttccaccagcccgaggctatcgaagagttccccgtgccggcttttcaccatcccgttttccagcaagagtcgttcaccagacaggtgttatggaagctgctgaaggttgtgaaattcggagaagtgatttcttaccagcaattagcagccctggcaggcaaccccaaagccgcgcgagcagtgggaggagcaatgagaggcaatcctgtccccatcctcatcccgtgccacagagtggtctgcagcagcggagccgtgggcaactactccggaggactggccgtgaaggaatggcttctggcccatgaaggccaccggttggggaagccaggcttgggagggagctcaggtctggcaggggcctggctcaagggagcgggagctacctcgggctccccgcctgctggccgaaactgagtatgtgcagtaggatggatgtttgagcgacacacacgtgtaacactgcatcggatgcggggcgtggaggcaccgctgtattaaaggaagtggcagtgtcctgcgaacacacactccaaagtacc

SEQ ID NO: 264057 - DNA, 415 bp, Homo Sapiens
tcagctgtgacatgaaagacttaccggaccactgaaggtcttctgtaaaatataatgaagctgaaacctttggcctaagaagaaaatggaagtatgtgccactcgatttgtatttctgattaacaaataaaacaggggtatttcctaaggtgaccatggttgaactttagctcatgaaagtggaaacattggtttaattttcaagagaattaagaaagtaaaagagaaattctgttatcaataacttgcaagtaattttttgtaaaagattgaattacagtaaacccatctttccttaacgaaaatttcctatgtttacagtctgtctattggtatgcaatcttgtaactttgataatgaacagtgagagatttttaaataaagcctctaaatatgttttgtcatttaataacaa

SEQ ID NO: 264058 - DNA, 1080 bp, Homo Sapiens; identical to SEQ ID NO: 9226
  misc_feature (464)..(472): n is a, c, g, or t

SEQ ID NO: 264059 - DNA, 1404 bp, Homo Sapiens
  misc_feature (39)..(39): n is a, c, g, or t
  misc_feature (153)..(212): n is a, c, g, or t
  misc_feature (753)..(828): n is a, c, g, or t
  misc_feature (1373)..(1373): n is a, c, g, or t
caccgaggcgcgggcgacgctcgcgccccgcggggcgcntggcgccgcgggtggcggaggtaggaggtagagcatcgcgtgggggcgcgcgccctgcccctctcacaatcacgcggacgcggcgggaggtgctccgcaaaagactggtggatnnnnnnnnnnnnnnnnnnnnnnnnnnnnnnnnnnnnnnnnnnnnnnnnnnnnnnnnnnnntcaggagggcgatgaaagaacggctgcgcgggtcaatgctgttccccggctcaacagaggggtcggcaggacgtcggctcgccgggcgcctcgtcgctctcgacggccgctacgccaaccgcggcggcgggagcacacgttgcgttctggcggcgatctttacataccacgtgggctaagcgcggacggcgggcgccccaccaccccacgccccgggccggattcagcgcgtgcagacagggggtagtggtgggaaagcaacctatccggggtgtgattggggcgcggtgggcggaccggccggggacgcgcggtcatcagggaaatgtgttttgaagaaagcgctcccgggggggcgcccccggagagtggtgttttctttgggggcggaaggccaccgcggctatctccagcgggccggcggttttctcgtggtaaccagggctacggcccagggttccctcttccttggggggaggcccggggccaaaagaaaggttctctcaaagcttttgcgggggccgaacggggcgaccaacgnnnnnnnnnnnnnnnnnnnnnnnnnnnnnnnnnnnnnnnnnnnnnnnnnnnnnnnnnnnnnnnnnnnnnnnnnnnngttgttgttgttgtagcattttgttaaatggctttattaaaggctacaagtataaaatatgactaagttacaagtcgtcagtaagaatttattacttttgaaaatgttaattaaagaaagggagacgcaaagaaagggaggctcttcctgaaatccacacaggggggtgcggctcagacgggtgacagacccccgctgttcccagtagggcagcacccccaaacccagggggccaagggaggggctcccagatgaaacagaggctggttgctgatttcttgggggaacttttgtaaaaatgaagacactgaatccttgagctgaatcccaggtgcagagactggggggaggtggagaatccaaaatcatgctcaggtttctcctgaaaagtgtgtattttctaaaaaataaatataaactcctggtttgagaaactccctcatgatgaattgggaggaaaatcatggcaaatggagagctaaagaaacccatctttccgcatagacttttgcccaaggtgttagaggaagatctgcccggtcagnggaatgaagacccacacatgagcctgtgtcc

SEQ ID NO: 264060 - DNA, 862 bp, Homo Sapiens
  misc_feature (380)..(380): n is a, c, g, or t
  misc_feature (643)..(807): n is a, c, g, or t
ggacctgtgtcctagagagtaggccaaggtgatctccctcttctattgggagaaactctaatttctttcccaccctctcaacaagcccaatattccctccaagttcttcttggtgctgagggctgtaggaattattgaaagcttctgcctcacttagtatcgtctggggcccagcacccagcaataactctaataatgtttcttaatggtatagcctcctgagattaaatgtaaaatcaaaaattaggaaatcttggagggagtcctcaagttgtattgctttgctgtgcttttggaagaagggacgacctggaggacacaggctcatgtgtgggtcttcatcctgcctgaccggcagatcttcctctacaccttgggcnaaagttctatgcgaagatggtttcttagctctccatttgccatgattttcctcccattcatcatgagggagtttctcaaaccaggagtttatatttattttttagaaaatacacacttttcaggagaaacctgagcatgattttggattctccacctccccccagtctctgcacctgggattcagctcaaggattcagtgtcttcatttttacaaaagttcccccaagaaatcagcaaccagcctctgtttcatctgggagcnnnnnnnnnnnnnnnnnnnnnnnnnnnnnnnnnnnnnnnnnnnnnnnnnnnnnnnnnnnnnnnnnnnnnnnnnnnnnnnnnnnnnnnnnnnnnnnnnnnnnnnnnnnnnnnnnnnnnnnnnnnnnnnnnnnnnnnnnnnnnnnnnnnnnnnnnnnnnnnnnnnnntttttttcgccggggtgttcctctcccccgccgccttccgcgctcctgtcccccc

SEQ ID NO: 264061 - DNA, 1318 bp, Homo Sapiens
  misc_feature (33)..(33): n is a, c, g, or t
  misc_feature (388)..(443): n is a, c, g, or t
  misc_feature (645)..(655): n is a, c, g, or t
  misc_feature (823)..(831): n is a, c, g, or t
aggtcccccctatccattaggaatggtcctggnccttttatggtaaccatttttggtggggcatcctcctcaatgcctaacaccccacatgtttgcccctatgacaagtttcatagagtgaaagggtatcctcctgggttgaaataattcacaaattgggtgaatgtcatccttgcaacacaccctgtacagtcttccttaaaggaacactacagtatatttttagtatctacatgctgaatgactgaatacagacctaaagacagcagtgctcctggtacagtatttaagtgtcggcatacacaggcggaatccctgtataaagtagtgccaaactgatttcagttgtgtaactagtttaaaacccaataaatggattctttttacnnnnnnnnnnnnnnnnnnnnnnnnnnnnnnnnnnnnnnnnnnnnnnnnnnnnnnnntaataaatttaaaagagaacaccaaaccccaaaataatacccaatattttcttttttgcccccctcggccttgttaaaaattttctaaaccatttcgttgggggcggggccccccaatagtaaaggaaatgggggcatttacctcgttcccaaatgaaaatctgggcacataaaaatgaggtgctggagattcccacaatgnnnnnnnnnnngccccgcggggggacccgactggggtgtgttgaaaacgttccccaagatgggatgttttgaggagggcctttttctttgtgctgcttcccaacgtggggtgggcccatgtgggagtcttcttagtattttgaattttgacagcctgcggcactctggtgacacctccnnnnnnnnncacggtggtggaaaaatatctagatatgaacgctcttctctcctacattctgggaatgaacctgtgttcaccaaagcggagatagtgtttggtcgccctcttaataattcgcaaagataggaaggtatcagaatacgagtctcttacgataacaactattgatgagaaaataattttattctgcccccacgcgtggcatgcactacatcgtggggagtaccgagaagatgtgtgttcgacatatgtgtggaggagcggagcacgtctcgcaaaagggtacagacttgtggataaagactcgcctacagacatgtgtactgttgtgtccggtagtccagcacgacatatatgcattttctttcgcacgtaatgataacacccgcaggatatatatgaagtcgaagatgatgaacactgatgattatactgttcatcgaatgatcgagcgcactcggcgagctatgatattagcccggctaagagtgtc

SEQ ID NO: 264062 - DNA, 320 bp, Homo Sapiens
gcataggccccagcaccatcagggaccttgctgtggctgggcctgagatgcaggtaaaactgctccagtccctgggcctgaaatcaaccctcatcaccgatggctccactcccatcaacctcttcaacacagcctttgggctgctggggatggggcccgagggtcacccctgggcagaagggtgccagtggcccagccctggggagggatatccccccagtctgctcaggcccctcaagctcctggagacaaccacgtggtgcctgtactgcgctaactcctgattaatacaatggaagtttctgggcatttacaattgc

SEQ ID NO: 264063 - DNA, 414 bp, Homo Sapiens
aatacgtggctgaagataacagccaagaattggtctttcctaaaaatgcaacagataatgctgctagattgttattttgtttgcactttttttgattggcattttaaaatcggtatttaaactgaagacattgtcatgttttattaatttaacaaagttgaaagtgactgctctgtacatcatgaccttaacaatgttaatgctgtaagtgaaagttcactgtcgtctgtatactaaatttattggtgtttctaacttaaaagtaagactgcagattatcccccaccagccttagtccaggggtgtggctctgtccgggtgcagtatgcagtcatgtggaaccttgctttctagtcctgggaaaaaaagatgtctctaattactggcttcaataaacacgaatccagactgaaa

SEQ ID NO: 264064 - DNA, 1402 bp, Homo Sapiens
  misc_feature (692)..(702): n is a, c, g, or t
  misc_feature (961)..(969): n is a, c, g, or t
  misc_feature (1107)..(1124): n is a, c, g, or t
  misc_feature (1182)..(1213): n is a, c, g, or t
aaacctgcactgctctgcccttagtcatgacatctcgctgagccagacccactctgttccttggaacctagagctggagtgaggagtagaggtctccggctattccagaaagaaaagtgagccacatgcaggctgatgaatgccgacacttccaagaatgtatagaaatagtccctgtcctggcctgccactgaccctgtctgtattttctcggaggttgtttttctccttctccttcccaggaaggtctttgtatgtcgaatccagtgcactcaagtttggccaagggactccacagcacccagaagactgcatgcctcaaggtttatgtcactcctctgctgggctgttcattgtcattgctgtgttcagggacctttggaaataaaacctgttctgtcccaaataaaaccagcctgtgatgttcaagggactggaataaagtggcttacgacctgaaggattctacagagtgctcaactgttcatacatcattcagagtgggagggagctgggggtgctgtcccatcccatctgtatgcccacggtggatttaataatatataatttataaatcatagcctatggagtggcccgtaaatcagttgactgtgtagctcttgcctggcattaaagcatgtttttggtctttcatgaatcacaactatgtcctacgtccgcccaacaaacgnnnnnnnnnnntcttgtcgggccgcctcggccctcaaataagcttttctcaaaaattaattttagagcgcgggcgcccctaaggaaaataaacatggataatgattgattttttaggccaaccctgggccctcaacgaaagttttcaaacccctccccttggcgccacccgcgccccgtgcaacgcaagcgcacctggggaccaatccccttctcgcctaaaaaaaccccgcgtctattggaaataaggccggcggtgtactcccccagnnnnnnnnnccccccgccgggtgtaaacccccaaggcttttcctaaaaaaattccaaagaaaggggttgcgtaggggccccttaggcggggttcttgtccaacatgggaagaccccaccgcccaagcccggaaattgaaatgaaatnnnnnnnnnnnnnnnnnnggggagccttcttcccacaccagtgtgggggcgttaattcttatataaacactttctnnnnnnnnnnnnnnnnnnnnnnnnnnnnnnnnacaaaaaagcggtgtgcgagtaaatcccgggaaaacccctctagcagggcaatatcaccgagccggagatagcccccccttgcgggggatatttatttggggcgccccgtgggtgagatataatacgggggcggaaaaaactcactgttcgcgccaaatattggggcccaccctggttatataactgcc

SEQ ID NO: 264065 - DNA, 371 bp, Homo Sapiens
  misc_feature (338)..(338): n is a, c, g, or t
gtgtgggtgccaagtgcttgtgtagaaacttgtgttctgagcccccttttctggacaccaactgtgtcctgtgaatgtatcgctactgtgagccgttcccgcctagccagggccatgtcttaggtgcagctgtgccacgggtcagctgagccacagtcccagaaccaagctctcggtgtctcgggccaccatccgcccacctcgggctgaccccacctcctccatggacagtgtgagccccgggccgtgcatcctgctcagtgtggcgtcagtgtcggggctgagccccttgagctgcttcagtgaatgtacagggcccggcacgagctgaacctcantgtgttccactcccaataaaaggttgacagggt

SEQ ID NO: 264066 - DNA, 400 bp, Homo Sapiens
  misc_feature (379)..(379): n is a, c, g, or t
ggtgaacgaaccgcagaagaatcgcattctggagcactcctgcccaggaaattgagaaaagcaaggccaaccacttcctgatcctctttcgcgactcgagctgccagttccgggcgctctacacgctgtcgggggagacagaggagctgtcgcggtctggcagggtatgggccccggaccgttcacgcccgccatggtgggaaggcatctacaagtacaactcgggaccgcaagcgctttcacccagatccccgccaagaccatgttccattgaggcgttcgatggcctttcaccattccaggggacaacttttgggcaggggcaaaggaaacccaccaatttcccaagaaggggcgggcgggaacccccaaattaggnccccaacccggggggtttcca

SEQ ID NO: 264067 - DNA, 564 bp, Homo Sapiens
  misc_feature (15)..(15): n is a, c, g, or t
ttgctgcctggcggnaaggtgaacgaaccgcagaagaatcgcattctggagcactcctgcccaggaaattgagaaaagcaaggccaaccacttcctgatcctctttcgcgactcgagctgccagttccgggcgctctacacgctgtcgggggagacagaggagctgtcgcggctggcagggtatgggccccggaccgtcacgcccgccatggtggaaggcatctacaagtacaactcggaacgcaagcgcttcacccagatccccgccaagaccatgtccatgagcgtcgatgccttcaccatccagggacacctctggcagggcaagaaacccaccactcccaagaagggcggcggcacccccaaatagccccacccgggcggtccaacggccgggccctgtgtgctgcggccgccatcccctggaggacagtcagtcggtattcctgggtcctgtctgtccccaaccgtgtctgggtggggctggagtctccaccctctgactttgagttcagtccccttgtctgtcctcccccacttcttgaataaaataatttaaagaga

SEQ ID NO: 264068 - DNA, 456 bp, Homo Sapiens
  misc_feature (39)..(39): n is a, c, g, or t
  misc_feature (97)..(97): n is a, c, g, or t
  misc_feature (191)..(191): n is a, c, g, or t
agctccgtctctgctttatgtcccccatggtgttcgcanaaccccacctccgtcccgccaaaggaaagggagagcggcctcttgcctgtgggaggcnaggagccacctgctgctgccaccagcctcctcctgcccatacagagcccggagccctccgtgatcaccagcagcccactcaccaagctccagcnccaggaggcactgctgtacctcattcagaatgatgacaacctccttaaatataatcctatgaagcctatctcttcagcatgactcaagcagccatgaaaaagactatgtgacagcaaggccttttaaaactgattttcaaggtccttctagaactccggcacaaggttctttcatgttgagtgttgtttccttcaatgtttctgccttttttaaaagaaaagtatgtgtaatatgaagtaaaatgtttcagactttttttatagg

SEQ ID NO: 264069 - DNA, 877 bp, Homo Sapiens
gggggcggcgacaggaccgaggggccttagttggtgggcaagtcggggatcccagaaagagaagcgtgacccggaagcggaaacgggtgtccgtcccagctccggcctgccagtgagcttctaccatcatggacctattgttcgggcgccggaagacgccagaggagctactgcggcagaaccagagggccctgaaccgtgccatgcgggagctggaccgcgagcgacagaaactagagacccaggagaagaaaatcattgcagacattaagaagatggccaagcaaggccagatggatgctgttcgcatcatggcaaaagacttggtgcgcacccggcgctatgtgcgcaagtttgtattgatgcgggccaacatccaggctgtgtccctcaagatccagacactcaagtccaacaactcgatggcacaagccatgaagggtgtcaccaaggccatgggcaccatgaacagacagctgaagttgccccagatccagaagatcatgatggagtttgagcggcaggcagagatcatggatatgaaggaggagatgatgaatgatgccattgatgatgccatgggtgatgaggaagatgaagaggagagtgatgctgtggtgtcccaggttctggatgagctgggacttagcctaacagatgagctgtcgaacctcccctcaactgggggctcgcttagtgtggctgctggtgggaaaaaagcagaggccgcagcctcagccctagctgatgctgatgcagacctggaggaacggcttaagaacctgcggagggactgagtgcccctgccactccgagataaccagtggatgcccaggatcttttacacaaccctctgtaataaaagagatttgacact

SEQ ID NO: 264070 - DNA, 373 bp, Homo Sapiens
tggaaccctggacgacttgcagagcgctggcgcagtcatggcggactactggaagtcacagccaaagaaattctgtgattactgcaagtgctggatagcagacaataggcctagtgttgaatttcatgaaagaggaaagaatcataaggaaaatgtggcaaaaaggatcagtgagattaaacagaaaagcctggataaggcaaaggaagaagaaaaggcatcaaaggagtttgctgcaatggaggcagctgccctgaaagcataccaagaggatttgaaaagacttggcttagagtcagaaattttggagccaagcataacaccagtaaccagcactatcccacctacctcgacatcaaatcaacagatagaa

SEQ ID NO: 264071 - DNA, 177 bp, Homo Sapiens
gccacattggcagagatgggacctaagggtcccacccctcaccccacccccacctcttctgtatgtttgaattctttcagtagctgttgatgctggttggacaggtttgagtcaaattgtactttgctccattgttaattgagaaactgtttcaataaaatattcttttctacagtt

SEQ ID NO: 264072 - DNA, 323 bp, Homo Sapiens
  misc_feature (137)..(137): n is a, c, g, or t
  misc_feature (282)..(282): n is a, c, g, or t
tggttgtaaattcgcttggttgaagatgaaatctttgaaatctgcctgccaaccccgggcaagatccctggagctggcctccttccagcccagtgccagaaaccagcactccatgaagataaactctgggcccgccnaccagcaggacctgtcgacctgaggtgaccctgggccttgcccccagccaactgggccaccagcttccctcccttgactctgggggtccacatccactccaaggggactattcccccgaccccaccccagtctccccacacggancctttgctgaattaaagtttgtaagtaaatggttttaaagg

SEQ ID NO: 264073 - DNA, 432 bp, Homo Sapiens
gggaattgtctgatatttaagagaaacattcaggacctcatcattatgtgggggctttgttctcccacagggtccaggtaagagatgggccttccttggcggcccacaatccagaaatccacgcaggcattttgggtaggcggcctcccagttttccctttgaggtcgcgaacgctgtgcgtttgtcagaatgaagtatacaagtcaatgtttttccccctttttatataataattatataacttatgcatttatacactacgagttgatctcggccagccaaagacacacgacaaaagagacaatcgatataatgtggccttgaattttaactctgtatgcttaatgtttacaatatgaagttattagttcttagaatgcagaatgtatgtaataaaataagcttggcctagcatggcaaatcagatttaa

SEQ ID NO: 264074 - DNA, 536 bp, Homo Sapiens; identical to SEQ ID NO: 4505

SEQ ID NO: 264075 - DNA, 1608 bp, Homo Sapiens
  misc_feature (107)..(162): n is a, c, g, or t
  misc_feature (164)..(223): n is a, c, g, or t
  misc_feature (236)..(269): n is a, c, g, or t
  misc_feature (989)..(989): n is a, c, g, or t
  misc_feature (1387)..(1387): n is a, c, g, or t
  misc_feature (1521)..(1521): n is a, c, g, or t
  misc_feature (1542)..(1542): n is a, c, g, or t
  misc_feature (1573)..(1573): n is a, c, g, or t
  misc_feature (1575)..(1575): n is a, c, g, or t
aggcaggaggattacttgagcctacaagtttgaggccagcatgcacagcatagcaagactgcatctctacagagagtaaaaaaaattacccgagtgtggtgatgtgnnnnnnnnnnnnnnnnnnnnnnnnnnnnnnnnnnnnnnnnnnnnnnnnnnnnnnnntnnnnnnnnnnnnnnnnnnnnnnnnnnnnnnnnnnnnnnnnnnnnnnnnnnnnnnnnnnnnggaccctgtctcnnnnnnnnnnnnnnnnnnnnnnnnnnnnnnnnnntatttttatgaggtgaagtgcatcaaacttgggaaagatttgaggaggctgggaacctcctggaaaaccactccttgaagaaagatatgagagacatttagaagtgattcctgctttcagaaggaggcggattcaaatacatcaaaagtcccttcctctgctaagtgtttatagttcaatgaataatttcaatatttgtatgtgttcttgtcattttatttttttctgaaaaacttccaaaaatttgaaaataaaattacagccttttcttcttaacgggcggggacaaaacgagcgagaagatcaataaataacccgcgtttcccctcgccccccctcttcacgatgatttaccccaccccgccgttgcgcgcgcgtggagtgagcggagacgccgactttccaccatcggcggatacccgccagcccgtaccgcgtgcccgcggccctggcgttacgcccgcggataaacgcgttttccgcgcataacctatgctcgccccgcctcgcgggcatctggttccgcgtcggtgaagaaacaccccgcggcgacacggccgggccgtggcctaaaagagataactggcgcatccccacacaccacaccacggtgttttgcccggctcccacccccgcctcataaataaaccacgccgccccccattggtcgcgcggccgcctcgcgccgcccggacttctattcatcccaccacacgacgngtgtagcggtcgtcgtgtcgcctccccccccgctctctcacaacaggcgttgtctgcggcttccacgagattatgagcggagggggaggccgcgtacagccccgcgacacctagatcaccacaccccacgtgcgcgggcactgtgccagcactcctccatctcatatctggggataaagagcggccctccacgcccgcccgccgttgctttcatattttttttctccccgccgctcggtgcttgctttcccgccacacaccgccgcgcctgagttataacaatcacatccgtagtgagtcagcacccccgcgcggcagtagaccggcaatttatgaggagtagtaggcgcacggtacgcatcgctcgtacccatgtgacgcaaggtcgacgcggcctnacttactaggtgactgacagcgggatgggtgtgtcgtcacccggtccgcgccccaccacgcccatggtgatatgacgtttcactatagtcctagacagacgtactcgtatttgcccacgggtctctgatgctanacacccacgctgttgctccancgttattacccataccacaagaatgacgagncncccctctattttattacacagcgacgccacggg

SEQ ID NO: 264076 - DNA, 455 bp, Homo Sapiens
  misc_feature (64)..(64): n is a, c, g, or t
  misc_feature (83)..(83): n is a, c, g, or t
aagtggagggtagaaggagaaaccagaccatgtttaccccacgcgtttcccccaaagccccccngaaccttcccccaagattngtaacctgaaaacggcctgtcctcttgttttggtccgttttggggggtggtggtgccggctgggccatgcttgtgaagtgatgtgtgtctctgatttaacggattcactgttttctctgctaattgagagagcgttatttacattatttatttgttttgacacaagtgctttcagtgttttatcctagctaatggcttcttaaaggtaataaaacccttccaacgtaattggtcagataaaactttttttcttgtatgcttaaataaagcaattagtgaagcacttctatccaaaatgacttttttgtccttttttaaaaccaatttactgttactggaaactttttgtacaataaagcaatcacgcagatt

SEQ ID NO: 264077 - DNA, 763 bp, Homo Sapiens
  misc_feature (50)..(50): n is a, c, g, or t
  misc_feature (105)..(105): n is a, c, g, or t
  misc_feature (346)..(478): n is a, c, g, or t
  misc_feature (480)..(480): n is a, c, g, or t
  misc_feature (484)..(485): n is a, c, g, or t
  misc_feature (489)..(489): n is a, c, g, or t
  misc_feature (497)..(504): n is a, c, g, or t
  misc_feature (514)..(514): n is a, c, g, or t
  misc_feature (542)..(542): n is a, c, g, or t
  misc_feature (545)..(545): n is a, c, g, or t
  misc_feature (572)..(592): n is a, c, g, or t
  misc_feature (599)..(650): n is a, c, g, or t
  misc_feature (659)..(676): n is a, c, g, or t
ccccaagtgtccctatggggagatgataggatgtgaccaatgaacagtgncccaattgaatggtttccaccttttccatgtgtttcaccttaccctataaacccnaaggggaaatggtattgcccaaagtgcaggggagataatgagaaaacaatggacaaaagtactgaaaagacaaaaaaggatagaagatcgaggtagtaaaggccatccacattttaaagggttatttgtcttttatataattcgtttgctttcagaaaatgttttagggtaaatgcataagactatgcaataatttttaatcattagtattaatggtgtattaaaagttgttgtactttgnnnnnnnnnnnnnnnnnnnnnnnnnnnnnnnnnnnnnnnnnnnnnnnnnnnnnnnnnnnnnnnnnnnnnnnnnnnnnnnnnnnnnnnnnnnnnnnnnnnnnnnnnnnnnnnnnnnnnnnnnnnnnnnnnnnnnanaaannaaanaaaaaaannnnnnnnaaaaccccanaaccccaaaaaccaaaacacaaaccccnaancgcgcggtgcggggcggcgctccccannnnnnnnnnnnnnnnnnnnnccataannnnnnnnnnnnnnnnnnnnnnnnnnnnnnnnnnnnnnnnnnnnnnnnnnnntcccttttnnnnnnnnnnnnnnnnnnaatatgccatcttttttgtcttttgttccaccctccccccctacgaaaatatcgccgcgcggggcgccggacttcccgtctgggttt

SEQ ID NO: 264078 - DNA, 295 bp, Homo Sapiens
  misc_feature (23)..(23): n is a, c, g, or t
taggcggttccgtccaggagctngaaagcatcccagcggtgcacctgttcagtctgaggacctcaagcttgggtcaggccagcatgttttaggtatggatgtggtggacttaaagtacttgatggtccttgatttcaccctgaaagctttggcaaaccaagtttcaacccttactttaaaaatctgacactgctttactccatatcaatttggaagcttctaattcataaatatacctaaacgttggcattttatctctccaggagttattaaacatttcttcctttttagcaaa

SEQ ID NO: 264079 - DNA, 482 bp, Homo Sapiens
tggcttccaggacagagcatgctcatttgctggcggacagttcccagaaacagaccctgttagtccttctacttacctgctggatttttcaagcactaaatttataactttttgaaacaaaataatgtgtaattttccatttgggggcaaactctattcttgtgagcattattaaatcttgtttgtaaatatattgtctttctcttaatatttgctctgggtcaggaagaagctgttcacggtgtgataatactctttagattgtgctttcattattatagatgcatcatgccttctgctttcacgtgtctgggatggggtcagaaatgcatcctccagctgacagaaaaatccaggatgagatcagaaggatactggtgttttctgacttttacaaaattacttgtttgttttcatttaaaaaaaagcataaactatgtttcttattactattagaattattaaatttcaaaatgaatcca

SEQ ID NO: 264080 - DNA, 1232 bp, Homo Sapiens
  misc_feature (513)..(597): n is a, c, g, or t
  misc_feature (921)..(921): n is a, c, g, or t
  misc_feature (1124)..(1132): n is a, c, g, or t
tttcacaggtggaatcggcactcaggggtctggaaagaaggtcataagggagcatgataggatttggggcagagggacaggctcctctgggaaaccccccagagctctttaccaaggatgaaagaggacccaggccttgggctcctgatgaggagaaagggggcaccaccggggtctaatggtgacagtccaaaccactccactggccttcctggcagaagccgagtgtgctggggtctccgaagagggtccctcctttttgggggaaggtcagcccagcccctccaaaggtctgatgtctccactttcacccgcaggccttaccgctctgtttatagtgacccaccctagatcttccccaagagggactggggtttctggggtccattctctgagtcagtggttatttgaaaatttgattttgattttattttttctctgtaaacttccaagctggcttttcccatttcaattcctgtgatttatgccaataaagtttgcccatgattttcnnnnnnnnnnnnnnnnnnnnnnnnnnnnnnnnnnnnnnnnnnnnnnnnnnnnnnnnnnnnnnnnnnnnnnnnnnnnnnnnnnnnnttattttggtgggcccggcctcgcccctcaaaaaagttttcaaaaaccattcgtttgggccggggcggccccagaagggaaaatgaaacagggttcaaagtgggttccccaaggaaaactccgggcaaatgaaaaagggcgctgggattctcccccccaaataacaaaacccccgcggtggggaacaaagaaagggtgttttgaaaaaaataccccaaggtgggtgttttgagagggttcttaaacgggggactctatttacaagggggggcgccccaatggcgagcacctccaataacaccaaaattttgacgcccctccggnccttggggcacttcttattcagaaagaaacacgtggtgcgaaaactttcattttaaaaacccttttccgggctcggaacagtggggagagaacccttcccccaacacggggggtggggagtgagaaccgtgaaaatccgcgaaagagggggattaacaagcccctttgtgggccgcagtgtggaaaataaaataatttttcgnnnnnnnnnggcgagcaaaaccaggggagcctcaaaaaaaccaactatcctcttttttcgttgccggccccccctaccaatatcaacgccgcggtgcgtgaaaaccctt

SEQ ID NO: 264081 - DNA, 1274 bp, Homo Sapiens
  misc_feature (502)..(512): n is a, c, g, or t
  misc_feature (596)..(729): n is a, c, g, or t
  misc_feature (795)..(806): n is a, c, g, or t
  misc_feature (915)..(947): n is a, c, g, or t
gatgttggcaaacaacttctcattttgaatagagtttgtgtgtacctctccatatttaatttatatgataaaataggtggggagagtctgaaccttaactgtcatgttttgttgttcatctgtggccacaataaagtttacttgtaaaattttagaggccattactccaattatgttgcacgtacactcattgtacaggcgtggagactcattgtatgtataagaatattctgacagtgagtgacccggagtctctggtgtaccctcttaccagtcagctgcctgcgagcagtcattttttcctaaaggtttacaagtatttagaactcttcagttcagggcaaaatgttcatgaagttattcctcttaaacatggttaggaagctgatgacgttattgattttgtctggattatgtttctggaataattttaccaaaacaagctatttgagttttgacttgacaaggcaaaacatgacagtggattctctttacaaatggnnnnnnnnnnntccttattttgtataaaggacttccctttttgtaaactaatcctttttattggtaaaaattgtaaattaaaatgtgcaacttgnnnnnnnnnnnnnnnnnnnnnnnnnnnnnnnnnnnnnnnnnnnnnnnnnnnnnnnnnnnnnnnnnnnnnnnnnnnnnnnnnnnnnnnnnnnnnnnnnnnnnnnnnnnnnnnnnnnnnnnnnnnnnnnnnnnnnntacaatggccaataactgtttcccaaagagcaccggaccagaaagcggtgcttgggctcccccccnnnnnnnnnnnnccgttttcaccccaaaccgctcggagccgcgcccgacaggggagacgtgagggcatttattgatatgtttcccccggagagccccaggggggctgaaatatcggcgtgnnnnnnnnnnnnnnnnnnnnnnnnnnnnnnnnngtaatcgccccccacctttttttacaccacttccccgcccggtggattgttaccgccgtacccgcccacgggggttttgatggccaacccggcgccccgccggaaaggggggttctatatcaacttttcttttttcgccccccgcgagagctgttagatatcttccgccgccctgggggtgcgacacagcgatggtctcattagaacacctgcgcccccatcaatgtgtggcccatctttcttcataccggcggagttgtgggtggaactactcgctctccgcgggcaggcgggtgttagaaaccacacaggggcggtttgtcggcg

SEQ ID NO: 264082 - DNA, 1347 bp, Homo Sapiens
  misc_feature (441)..(450): n is a, c, g, or t
  misc_feature (818)..(925): n is a, c, g, or t
  misc_feature (1035)..(1035): n is a, c, g, or t
  misc_feature (1038)..(1149): n is a, c, g, or t
  misc_feature (1151)..(1151): n is a, c, g, or t
  misc_feature (1153)..(1153): n is a, c, g, or t
  misc_feature (1164)..(1164): n is a, c, g, or t
  misc_feature (1172)..(1172): n is a, c, g, or t
  misc_feature (1184)..(1184): n is a, c, g, or t
  misc_feature (1193)..(1193): n is a, c, g, or t
  misc_feature (1201)..(1201): n is a, c, g, or t
  misc_feature (1240)..(1240): n is a, c, g, or t
  misc_feature (1248)..(1248): n is a, c, g, or t
  misc_feature (1289)..(1289): n is a, c, g, or t
  misc_feature (1312)..(1312): n is a, c, g, or t
  misc_feature (1320)..(1320): n is a, c, g, or t
  misc_feature (1337)..(1337): n is a, c, g, or t
ttctttttgccccataggaaacccggtgaacaaggggttaaacggggaccgttttttaccccccttttttgcaaggagttcccccggagagcattcttggaaaaggtttttagagagggttttgggggcggaaatttcttccggcggtgttttcatgcacaactgtaaattccccttattacgttaaacagcgttttttgcggtataaaaaaacggtggacagatgtttgggccccaaaattccccctgagggggggtatttaaccgggagactgttggtttattgccgcgtctctccctgccggtatgcgctttcggaattgagtttttcccccccctagatttttatgttttcccagaggtttggggcccaaatttttttgttccgaagcgctccctatttgtgccgcccccttggtttcccacccatgtggtgtaaannnnnnnnnncccccaaccggcgttcaaagggggctttatttttttgtggggcgaattccagggttcaattttgacaggttttcggcggggggtccgaatctggggaaaaaagtttaaaataatttccaccattttttggtaacgactggggaggaacctggacttaaattcatcttgagcccccttgggattcctcccggaaaattctttaaagaccccgcagaacaccattgggaaaggtccaaccccctttggtgaccccgggcgtttttaattcgtgtgaatcccagcgctccccacttccaggggtatcctttgaaaacaattttttgtcaagtttctttgcccggccgggcccacggatcaattttaattgnnnnnnnnnnnnnnnnnnnnnnnnnnnnnnnnnnnnnnnnnnnnnnnnnnnnnnnnnnnnnnnnnnnnnnnnnnnnnnnnnnnnnnnnnnnnnnnnnnnnnnnnnnnncatgataatgaagttccccgttttaatcattattaaaaagtaacctgaagaaaactgatgtcaaccaccctgttccggccgcatatagaaagtaactttgaaatgatgantcnnnnnnnnnnnnnnnnnnnnnnnnnnnnnnnnnnnnnnnnnnnnnnnnnnnnnnnnnnnnnnnnnnnnnnnnnnnnnnnnnnnnnnnnnnnnnnnnnnnnnnnnnnnnnnnntntntccacaaaaantacaaaanttagccagggtntgggtggtntgctcctntagtcctaggcttacttggggggcttagatggggagggntcactttnagcttcagggaggtgggtgggctgcagtgaggccatgattntgggggattgggactttcagccnggggttgnacagagtgaggttcccntttttcaaaa

SEQ ID NO: 264083 - DNA, 1176 bp, Homo Sapiens
  misc_feature (657)..(801): n is a, c, g, or t
  misc_feature (814)..(825): n is a, c, g, or t
  misc_feature (851)..(860): n is a, c, g, or t
  misc_feature (921)..(982): n is a, c, g, or t
  misc_feature (1052)..(1060): n is a, c, g, or t
  misc_feature (1108)..(1134): n is a, c, g, or t
cagtctacagagctctctgacatttctcatgacacttgaaagaagggcttgagggagtctgggtgtgggggtggcctcctcttcctctttctatccctggctcagagtcggagctgcagattgccctcattgccctcttctctgagatgctctatcggttccccaacatggtggtggcgcaggtgacccgggagagtgtgcagcaggcaatcgccagtggcatcacagcccagcagataatccatttcctaaggacaagagcccacccagtgatgctcaaacagacacctgtgctgccccccaccatcaccgaccagatccggctctgggagctggaaagggacagactccggttcactgagggtgtcctgtataaccagttcctgtcgcaagtggactttgagctgcttgctggcccacgcgcgggagctgggcgtgctcgtgttcgagaactcggccaagcggctcatggtggtgaccccggccgggcacagcgacgtcaagcgcttttggaagcggcagaaacatagctcctgagagcgcgggacttggacacggacctcggcgggcgggactgggcggggcggggcatcagaactcaggtgttttttatttacgcgtcagggcttttcttgtttaataaagttatgatagctnnnnnnnnnnnnnnnnnnnnnnnnnnnnnnnnnnnnnnnnnnnnnnnnnnnnnnnnnnnnnnnnnnnnnnnnnnnnnnnnnnnnnnnnnnnnnnnnnnnnnnnnnnnnnnnnnnnnnnnnnnnnnnnnnnnnnnnnnnnnnnnnngctgtgggggggnnnnnnnnnnnntaaaaaatttttaaaaactttttgtnnnnnnnnnncccccaaaggtaagggaaagggggcttacttttttccaaaaaaactccgggcatgaaaagnnnnnnnnnnnnnnnnnnnnnnnnnnnnnnnnnnnnnnnnnnnnnnnnnnnnnnnnnnnnnnggggggcccggggggcttccggggtctttttccaggggtggccccgccgcgcccccaaaaataaaatttnnnnnnnnngtgggcgtattttttgaaaaaatgggggggaatcattttaaacacctnnnnnnnnnnnnnnnnnnnnnnnnnnnacacggggggggagaacactcgaacgcccccggggggattaa

SEQ ID NO: 264084 - DNA, 512 bp, Homo Sapiens
caggactccaggcaagccccggcatcttcttgctgccgtcccagacaacagaagttaccagatgaacagacttggatgggccacgggggtggagagctggaaagcttggctgtgcctctcgatgatgattaagatttcaatatttacagcaaaaccacaaagcaaatgatagaataaagcaaaacaatggaaaatctgagttcactcgtgagagaggtacgtatgtgagctctgaggaaattacagagggaacgcatgcagcaggacagctctcccaatcgcagcgtgcaaagtagacatccatagtgtcttttgaaaaatgaaaaacacattactttgaacagccaagaaaaaaattgcaatttattaagattcaataaagcgttgtactttcgaaagcaactttcgatgcatgttcttcaacagtcacattctatgaggaaaacattaagagccacgaacttgttgtttaatctcagagttacagacatattaagttcaaaataaaagct

SEQ ID NO: 264085 - DNA, 519 bp, Homo Sapiens
atatggtgtcaagttacttgtcctttgaaaacaaaacaaaacttccatacacagcactgcccagtaaagcagtgttgaatattgaaacctagacattcgaggatccttcttgctcacaagcattggaacagaatcctccactttaggactcagagaagctatggagtcccacaggctaggtatagcacacaacttagagaacggtagttaaagcacgtcaaccacaattgaatttaatgatctaaaaaatatttcttaactctgagggttaaactgaagatacgttttcaaataaaagcttttaaatttcttaggaaacaaactgtgacatcgcttttaaaaatgacattcaaatgtttataatgtgtgtttttgagttggcttggactagtgcaagttcactgctggcaatggttatgccagtagttaagttaaaataagttgttaccttcagattgatgtcttgtataaccagacaatcatcttcaagcaaaaaaattggccaggaaatgtcttttt

SEQ ID NO: 264086 - DNA, 506 bp, Homo Sapiens
ctgctcttacccccaccatagtggcctttgcgatgcctcctaccttcccccaacaactctcttgcgtgttagagagaagggccctcccagcacaaagttgcattcctcccccctaatttattctaatttattaactttgacccaccctttctgagcctgcagccttcccgtgtggcctgagggctgtcgagtgagctgccccagcccctcccagcccttgcccagcctgggggagtggggaaggctttggcatggccccgttggaggttgatttgctgttttgtttcttgtctttgtgttctgtggtacttgctgagagaaaagaaaagtgagccaagcagaaggaggtgggaaaacggacccaaaccccagtgtgccctgccccatgcctttcctttagtggtgggaaacccttatcttgcaaagtgaatgtgtccccttccccaccctctagtgtatttcacagaaaacaaaacctcccaataaaacggttgaaacctgaattt

SEQ ID NO: 264087 - DNA, 1012 bp, Homo Sapiens
  misc_feature (24)..(24): n is a, c, g, or t
  misc_feature (29)..(29): n is a, c, g, or t
  misc_feature (81)..(81): n is a, c, g, or t
  misc_feature (171)..(171): n is a, c, g, or t
  misc_feature (237)..(237): n is a, c, g, or t
  misc_feature (314)..(314): n is a, c, g, or t
  misc_feature (317)..(318): n is a, c, g, or t
  misc_feature (337)..(337): n is a, c, g, or t
  misc_feature (345)..(345): n is a, c, g, or t
  misc_feature (431)..(585): n is a, c, g, or t
  misc_feature (593)..(609): n is a, c, g, or t
  misc_feature (634)..(643): n is a, c, g, or t
  misc_feature (681)..(802): n is a, c, g, or t
  misc_feature (828)..(838): n is a, c, g, or t
aactcctaaaaccccccttccggnaaaanatcccccctgctggacccgaggaagcgctgtgcccctgagcctaagaaaggnaggtggccggatggaagtgggaaagtgaagaagacactgatttttaaaatatcaaaaatttccccttcctgaagtcgttcgggatgtgtncccttaaaaagaagatggaattctctgtagagcgtctcaatcccacttttaacccatggatgagancagactcccatttaccctgaaatagcagcttctcttgagaggagagtgacatggaagcaactccgtctgctgccgcngannccctcacactgagttcagntgtccgcnctccctccctcccatctgggggtagtgccttatgctgggtgttggagcagagtgagggagaggaaaataaagacctgcacatctgnnnnnnnnnnnnnnnnnnnnnnnnnnnnnnnnnnnnnnnnnnnnnnnnnnnnnnnnnnnnnnnnnnnnnnnnnnnnnnnnnnnnnnnnnnnnnnnnnnnnnnnnnnnnnnnnnnnnnnnnnnnnnnnnnnnnnnnnnnnnnnnnnnnnnnnnnnntctttggnnnnnnnnnnnnnnnnnaaaaattttttaaaacctttttttnnnnnnnnnncccccaaaggaaaaggaaatgggcaaaattttttcccnnnnnnnnnnnnnnnnnnnnnnnnnnnnnnnnnnnnnnnnnnnnnnnnnnnnnnnnnnnnnnnnnnnnnnnnnnnnnnnnnnnnnnnnnnnnnnnnnnnnnnnnnnnnnnnnnnnnnnnnnncccccgggggtttttttttatatttnnnnnnnnnnngggcccttctttggagaaggggggggaaatttaataaaaactcccccgcccggtgggaaccctccccaaacgggggagtgtaaaacctgtttttccccgggggggattacaaccccctgtggccccccttggggaaataatatttccccccccgggggaaaaaaagggggggag

SEQ ID NO: 264088 - DNA, 828 bp, Homo Sapiens
  misc_feature (51)..(51): n is a, c, g, or t
  misc_feature (83)..(83): n is a, c, g, or t
  misc_feature (85)..(85): n is a, c, g, or t
  misc_feature (250)..(419): n is a, c, g, or t
  misc_feature (427)..(443): n is a, c, g, or t
  misc_feature (481)..(562): n is a, c, g, or t
  misc_feature (741)..(749): n is a, c, g, or t
atgggcaaacggggcctccaggccacgcagctggcccggaatcttggatanactggggctcgcaactacgctggagcctatananaatggttggagaaagagagttaggcaggaggcagcttactgattgccaccccctggccccttaatggccaccttaactaagggtgtgaacgggctgacttggtgaattgggcaactccttatagtgttgtgcacacaaaagcatcaaataaagaacatttaatcnnnnnnnnnnnnnnnnnnnnnnnnnnnnnnnnnnnnnnnnnnnnnnnnnnnnnnnnnnnnnnnnnnnnnnnnnnnnnnnnnnnnnnnnnnnnnnnnnnnnnnnnnnnnnnnnnnnnnnnnnnnnnnnnnnnnnnnnnnnnnnnnnnnnnnnnnnnnnnnnnnnnnnnnnncctggcgnnnnnnnnnnnnnnnnnaaaaattttttaaaacttttttggggggcggggccccnnnnnnnnnnnnnnnnnnnnnnnnnnnnnnnnnnnnnnnnnnnnnnnnnnnnnnnnnnnnnnnnnnnnnnnnnnnnnnnnnncccccgggtgaaaaaggggggtgtataaaacaacaaaggggtgcgtccggtgcttttttgtgttttcacaaaagagggtccccccggatccttttttttatttatgccccccccgcggtgagatattaggagagagtgggggggaatattaaaaaaacccctctcccgccgaggggcannnnnnnnnacacagtggtggtgtaaataatttttcacccccgcggggaacaaacacccccgggtgcgcggggggcaaaaaataatat

SEQ ID NO: 264089 - DNA, 361 bp, Homo Sapiens
  misc_feature (327)..(327): n is a, c, g, or t
ggatggatcacaccgtggtgctgcagctggcagaggagaatggctacgtgactgtcagtgagatcaaagccagtcttaaatgggagaccgagcgagcgcggcaagtgctggaacacctgctaaaggaagggttggcgtggctggacttacaggccccaggggaggcccactactggctgccagctctcttcactgacctctactcccaggagattacagctgaggaggccagagaagccctcccctgactgcatgtggaagggcacacagcagcaggcagggaggaggcggaggtggcaaataaacctgggcaattttgtttatacnctgaatggaactgaaattatataaaaatacttgt

SEQ ID NO: 264090 - DNA, 356 bp, Homo Sapiens
agccgtgctgccaggtcacccagacctccagacagccggctagccccactgcccgttccttttacgcccaagttttgctccttgagagcagattagctgatgcccctgcaaccccagcccaagctctgcctcaaagaccgagtgacataagccattcccaccctcctaggttcacatccagggctgtgtcttccttgggggagaagatggtgtcgtttagatcagggtaaggcagtcaggcgggtgttcaccactgccttttcttcctctgagcgtgagaacactgaacccagccactgcccctgggtccctgtcctggaaatgatctaataaatccttttcccttcttgagctac

SEQ ID NO: 264091 - DNA, 561 bp, Homo Sapiens
gggactctccaaaaagcagagacagcaggaagaggggagtggaggcagcccattcacctggggaaatgactgggttgtcgatggacggtggcggcagcccaaagggggacgtggacccgttctactatgactatgagaccgttcgcaatgggggcctgatcttcgctggactggccttcatcgtggggctcctcatcctcctcagcagaagattccgctgtgggggcaataagaagcgcaggcaaatcaatgaagatgagccgtaacagcagcctcggcggtgccacccactgcactggggccagctgggaagccaagcatggccctgctctggcgcctccccttcttccctgggctttagacctttgtccccgtcactgccagcgcttgggctgaaggaagctccagactcaatgtgacccccaggtgcatcgccaactcctgcctcgtgccacctcatgcttataataaagccggcgtcagagaccgctgcttccctcacctgcctgcctgtctccctcctctgtcaccaccagcctctccaagctcaagtacaaatac

SEQ ID NO: 264092 - DNA, 463 bp, Homo Sapiens
tagtgcaacaagagctccatgttatgcttgtaataaattatttacacgggagctgggctggtgtgcagtggcaggtcccgtcagaagagatgaggctcctgggacaggtcagcgtcaggggcagcctgctgtctgctctggagggcggcgctcacctctgggtcgcagtccccacgatcagccagcagctgtgagagaggagcaggtcctcagcccatgccgcccactaggcctcagaccacaggggaggggctctggcagaaatagtcgagttgtattgccagccaggcaggcacatggcccaggcagctgtcaattctcatgtcccccacgtggcccaaggtgggcatcttgacgttacctctgccacgtgtgagaagctctttttcgggcaccgaggtattaactgcagcagaaaaagacgagcttttgttatcagttccacggggttgccctagagaga

SEQ ID NO: 264093 - DNA, 473 bp, Homo Sapiens
ctgcctttggctttttacagtcttctctcctacttccatgaagacgcggccatcagggaagaggccttcctgcatgttgctgtggacatgtacttgaagctggtccagctcttcgtggctggggatacaagcacagtttcacctccagctggcaggagcctggagctcaagggtcagggcaaccccgtggaactgataacaaaagctcgtcttttttctgctgcagttaatacctcggtgcccgaaaaagagcttctcacacgtggcagagctgctggctgatcgtggggactgcgacccagaggtgagcgccgccctccagagcagacagcaggctgcccctgacgctgacctgtcccaggagcctcatctcttctgacgggacctgccactgcacaccagcccagctcccgtgtaaataatttattacaagcataacatggagctcttgttgcactaaaaagtggattaca

SEQ ID NO: 264094 - DNA, 560 bp, Homo Sapiens; identical to SEQ ID NO: 73860
  misc_feature (354)..(378): n is a, c, g, or t
  misc_feature (386)..(386): n is a, c, g, or t

SEQ ID NO: 264095 - DNA, 1528 bp, Homo Sapiens
  misc_feature (46)..(92): n is a, c, g, or t
cctaccatcagaaagtgtgctttgctcacagaataatggtatgtcnnnnnnnnnnnnnnnnnnnnnnnnnnnnnnnnnnnnnnnnnnnnnnnataaattaaattttcagacatatcaaatacagttctgagggtaaggtcatgggggagctcggacccagtggcgttgggtgcggttgagggggacgctgctgtaagaggagagagatgacagtggtcctcctctgagagcctgagctgtctccccgtctcccgcccccaaggagacagagaggatcctacttcttcggggacagtggctgtatggctgtgctgccccacatcagggaccctttccccctgggactatggggcagtttgggagcaaaaccagaaggacaggcccccctctacccgcctaccctgagcaagcgagttgttcctctttgtacaagggcaggtctgcggttactttcaacactgtttattccagcggaagcagccgggtggttttcccacccccgtgtatgtagatatatcgactttgtattaaaggaagatcgtctgactcaaacacaaaacaccaccacaatacaagtccaacaaaccataaacacaaacagtgcacaccactatcacaaaaccccccaccatacgccgcaatatgtgctttcaacgggaagccctcgtgaccgcacatgcgtatttccttgggtacgctggcacaaagagaaaagaggttccgcctgcccccgcctctacccccacaatgtcttcccaaatgcccaccccacaccccgcccgcaccctgtcgtcttatgcgcatccctttcccaccttcctccgcccctcctccacatacttgctcacaacgtacggtggggccggctcccccaccaaacacaaaacccggcacccgggcggcgcaagctacccctcgtttgtcgctgcttcccccccacgacgacgtccctgggtcctccccgcgtagccttgggcccgctgcacccgcgccgccggggagcccccgtctgctttccccctcttgccggcgactatatggctgccactcgcgcccctactacactctagtgctctctcccgcttccgcgcatcccagtccctggcgtgcgctactgccccggcttacgtcggcgagcgctccgctcgcgcgccccgctaacgagcgatagaccccgccgctgctattttctcctccttcacttagtccgactgtagccacatccctgttctatggcgccgctccgggccgcccattacaactcacacacctcggtcgccgcgcggctgattatcggcgacacttaacactaattcattccctcggcgcgccgtggccccccactacgccgtgtcctctcctccctacacctccgtgtctgtattctattgcagtcctccccccctactgccctctacgctcccccctttgtatcccactttctccgctgtctcgggtgggaccctccccctgcctcgtgccttcgatgactattatggccagatatgtttgacactttctcgccctg

SEQ ID NO: 264096 - DNA, 856 bp, Homo Sapiens
  misc_feature (15)..(15): n is a, c, g, or t
  misc_feature (54)..(54): n is a, c, g, or t
  misc_feature (59)..(59): n is a, c, g, or t
  misc_feature (67)..(67): n is a, c, g, or t
  misc_feature (78)..(78): n is a, c, g, or t
  misc_feature (410)..(520): n is a, c, g, or t
  misc_feature (527)..(543): n is a, c, g, or t
  misc_feature (568)..(578): n is a, c, g, or t
  misc_feature (601)..(693): n is a, c, g, or t
  misc_feature (697)..(747): n is a, c, g, or t
  misc_feature (763)..(772): n is a, c, g, or t
cgaacttgttagggngggagcagccctcacacaagcagaaacacccccgtgganggtantgtagcanttattgtttantttagtcaatagacccctccccctataaatggtgtttagtccttccctgttgcatttccatgggcccgggggtttccctagcagaggatattggagcccccttttgtgacattacccaattacatcctttgtcccacgtttaatactttgttttggaaaatttaaatgctgcagatttgtgtagagttctaataccaaagacagaagtaaatgttttccatatactttgtcttgcctgtatgcagcccttgtgtaatatggtgaattagagtggtatttcactttgtattattttgtaaatatgtcaatataataaatagtgactaaattgnnnnnnnnnnnnnnnnnnnnnnnnnnnnnnnnnnnnnnnnnnnnnnnnnnnnnnnnnnnnnnnnnnnnnnnnnnnnnnnnnnnnnnnnnnnnnnnnnnnnnnnnnnnnnnnctttggnnnnnnnnnnnnnnnnnaaaaattttttaaaacctttttttnnnnnnnnnnnccccaaaggaaaaggaaatgggnnnnnnnnnnnnnnnnnnnnnnnnnnnnnnnnnnnnnnnnnnnnnnnnnnnnnnnnnnnnnnnnnnnnnnnnnnnnnnnnnnnnnnnnnnnnntccnnnnnnnnnnnnnnnnnnnnnnnnnnnnnnnnnnnnnnnnnnnnnnnnnnnttctattttaatttannnnnnnnnnggcccctttttgaaaaatgggtggttttctttaaaattttcgcccaaggggaacccctcccaaacgggttgtgaaaccttaatc

SEQ ID NO: 264097 - DNA, 684 bp, Homo Sapiens
cagtcactgatgcgccccccgagtgcttcctcaccctcagggacacggtgctgctgcgtaaggaatctcggaagctcattgttcagcccaacactcgccttgaaggctcagacgtgcagcttctggaatacgaggcgtcagtgctggcctcatccgatccttctctgagcgtttcccagaggatggacccgagttggaggagatcctcacacagctcgccacagccgatgcccgattctggaagggccccagtgaggccccatctggccaagcttgaggaagatgtgtggccttgcccccaattccatcagaccaaggctgcaagtggccctccattcgtgtgtgtatttaggggctggggagggggaggggcaggagcttggaccttggtactacctcagctgagggtggtgacacaaccccttccatttgtcagcactttccagcctgccaattgcttcccctctgtgatctcatttcatctgcactgccatacgtggagtgagcaagacagggcttaccatcctgtctaccagatgaggaaatggcagttctgagaagtcactggtctagatcccgcaggtggcacgtgacagctagggttcaaaacgttctcaccaaatccaatgctcctcacatattaattttataaccagacaaataaatattagagacaaccgaccg

SEQ ID NO: 264098 - DNA, 484 bp, Homo Sapiens
  misc_feature (387)..(433): n is a, c, g, or t
atcaatcccagttatcttgacgaatcagattacaacccatctgagtggagccctggttctcaggcagacctggtgtctccagctgatgatttgtccctgtctgaaggcacttctggatccagctgtgtgatagccgcactaggaaatacctggagtcacagtgtgaatacccggctgatcctccagtaccttgattcagagagaagacagattcttattgccaagtcccctctggctcccttcacctcatttgtctacaccatcaaggaggaaggcctggttcttcaagctggaaaatgaaaacattaaccttgattcaagactttgaaaactgtcgcaacccattggtgggtcatgaagtgaaattgatgaatcacaaccagcatnnnnnnnnnnnnnnnnnnnnnnnnnnnnnnnnnnnnnnnnnnnnnnntatcagattatatcacacatattgtttcatttcataaaatatttcttgtgt

SEQ ID NO: 264099 - DNA, 483 bp, Homo Sapiens
  misc_feature (104)..(104): n is a, c, g, or t
atggcttctggggattttcacagggcaaagtactgagctcatactagacacgaagctgttttaacagattggggaggcaagtgggtgtgagcagctttcatttntatctggaacaatatgcagggatgtcttgctgccgtgtccttaagaccaagtgttgtctttctcctcccaacttgactaaagatgctgcaggtatcgatgtgggtggccccagtggtttggtggtgtaagtgagtatttcccaggtgtctctaactctgaaagagtttcatttggaaggctggtacaggcagatccacgagatacatatagtttcttatctagaaaagaagaagaaaacattattggaactgaaatttctaggactaggttagagagtgcccagtagcattccaggggccccacattgcctggccctaagtttatgaataactagcatattctctcatatcagatgctacaaaaactgagaagcttctg

SEQ ID NO: 264100 - DNA, 585 bp, Homo Sapiens
catctggttccagagccacagcctgatgggaaacgtgagcctctcctaagtctcctccagcaagacagatgcctagcccgtcctcaggaatctgccgccaggagaatggcaaccctggccagatagctggaagcacagggttgctcttcaaccctgtcccggctcagttcactataagaaactatatgtatctcgtggatctgccagtaccagccttccaaatgaaactctttcagagttagagacacctgggaaatactcacttacaccaccaaaccactggggccacccacatcgatacctgcagcatctttagtcaagttggaggagaaagacaacacttggtctaagacacggcagcaagacatccctgcatattgttccagataaaaatgaaagctgctcacacccacttgcctccccaatctgttaaacagcttcgtgtctagtatgagctcagtacttgccctgtgaaaatcccagaagcccccgctgtcaatgttccccatccacaccctgcttgctcctgtgtaacagctcagatgatgaataataataaaactgtacttttttggatggtgctaa

SEQ ID NO: 264101 - DNA, 1893 bp, Homo Sapiens
gtataaaagaaatactgaacaagccagtgggatggaattgaaagaactaatcatgaggactctgtctgacacaggtcctcaaagctagcagagatacgcagacattgtggcatctgggtagaagaatactgtattgtgtgtgcagtgccagttgtgtggtgtgtgcacactcattccttctgctcttgggcacaggcagtgggtgtagaggtaaccagtagctttgagaagctacatgtagctcaccagtggttttctctaaggaatcacaaaggtaaactacccaaccacatgccacgtaatattttcagccattcagaggaaactgttttctctttatttgcttatatgttaatatggttttttaaattgggtaacttttatatagtatgggtaacagtatgtttaatacacacatacatatggcacacatgctttggggtccttccataatacttttatatttgtaaatcaatgtttggagcaatcccaagtttaagggaaatattttgtaaatgtaatggttttgaaaatctgagcaatccttttgcttatacatttttaaagcatttgtgctttaaaattgttatgctggtgtttgaaacatgatactcctgtggtgcagatgagaagctataacagtgaatatgtggtttctcttacgtcatccaccttgacatgatgggtcagaaacaaatggaaatccagagcaagtcctccagggttgcaccaggtttacctaaagcttgttgccttttcttgcgctgtttatccgtgtagagcactcaagaaagttctgaaactgctttgtatctgctttgtactgttggggccttcttggtattgtaccccaaaattctgcatagattattgagtatgacggtaggttaaaagatgttaaaggaagattgtatgaggaatctgaatgccgatgcactatagggcggcaagctcacgggtcagattcatttgcggtacacgcgacctggggtaatctggcctacgaatcggaaggatagagcgctactatttgctctcaacccccttcgatggccgacaacgtgattttttaacgacgagcgctcagtgggatttgtttatgcgcgcccgcgggaccggcgaaggagaagaaggcgcccgcggggagggctcccgtggggaagccttcgcaggacgggaacacccgcccccgcgacgcacggcgcccagcgcgccggcgccggcctggggtgtgcaggcgccggaaacccgccgccccgaaaggatgcaccgctaccacgcgtgaggggggcgaggtgtggaatctgtctcttagtcaccaggctttaacctctcggcgcccgagtgcgggctcgccccccaccgtgcgacggtgtttgtgggccgtccgacggacgggcgcggggcgaaggtcgcacactcttcgccccccttatcccatcctccctacgccccgtccccctcgcccgagtctcctcgccgccttttttccaccgcggcccggctcctaaccgcgtggcgccccattctgacacgtacgctcgccgccgcaacgcggggactagtacggacggctaccgccgcccgcgagtccgcgcgggaaaaagcatactcggcctgtgtccgttactaggtgctcccccccctcacatgaggcacgggtgtctccgtcggaggcgcgggccgcgccactctccgccgcgtcccgcgcccatgcgaagcaggccgcaggtccccataccgtggcggctggcatacgtttgtactataggtgtcgcccgcgtggtccaccctctctcggggcgtctggagactgggtttggatacgcgcgcgctgggggccttgagcccccagacgcccggcgagttacggcaccgaaggcggggcagaga

SEQ ID NO: 264102 - DNA, 825 bp, Homo Sapiens
  misc_feature (263)..(403): n is a, c, g, or t
  misc_feature (416)..(427): n is a, c, g, or t
  misc_feature (433)..(451): n is a, c, g, or t
  misc_feature (458)..(552): n is a, c, g, or t
  misc_feature (666)..(674): n is a, c, g, or t
  misc_feature (718)..(752): n is a, c, g, or t
ggctaactaagattattatagtctggttgtttgaaataccatttttttctccttttgtgtttttcccactttccaatggactcaagaaaattgaacaaatgtaatggatcaatttaaaatattttatttcttaaaagccttttttgcctgttgtaatgtgcaggacccttctcctttcatgggagagacaggtagttacctgaatataggttgaaaaggttatgcaaaaagaaattataataaaagggatactttgcttttcnnnnnnnnnnnnnnnnnnnnnnnnnnnnnnnnnnnnnnnnnnnnnnnnnnnnnnnnnnnnnnnnnnnnnnnnnnnnnnnnnnnnnnnnnnnnnnnnnnnnnnnnnnnnnnnnnnnnnnnnnnnnnnnnnnnnnnnnnnnnnttgcggcgcccgnnnnnnnnnnnnaaaaannnnnnnnnnnnnnnnnnngggcggnnnnnnnnnnnnnnnnnnnnnnnnnnnnnnnnnnnnnnnnnnnnnnnnnnnnnnnnnnnnnnnnnnnnnnnnnnnnnnnnnnnnnnnnnnnnnnncccccgcggaaagaaaacttcttttaaaaaaccaaaaaggggggtcggggcggattctcctgtcttttacccaaacaaagtcccagtcggaacccaaatttataattacctttnnnnnnnnngccctgttttaataaaagaaggggggggttttaatttaaaattnnnnnnnnnnnnnnnnnnnnnnnnnnnnnnnnnnnagtggtgtaaacctttatctcccacccgggggagtccccacccctgtccgccgctgggcgaaataaaatattt

SEQ ID NO: 264103 - DNA, 1400 bp, Homo Sapiens
  misc_feature (923)..(937): n is a, c, g, or t
  misc_feature (1051)..(1121): n is a, c, g, or t
  misc_feature (1273)..(1282): n is a, c, g, or t
tggtacggccggaatgttaggatatcgtcgacccacgcgtcggatctttgtgtcatttcagaattcaaagactgtgctacgggaggttctgaacatggctgggttcatgaaggcaaatgtatggatgagagtgtggtttaggaaagagggcactgatatcagattagacctatgtgtttgcacccatctttgttggcgatctgagtgcagtgtggcaagtgcacacctggcatccctgcgtcagatcgcgcaccttcaggtcgcgcaccttcgctgaaggaagatgacgcagagctttatctgaaatcagaggggagctatccaaaatgggagttgggggcagctaaagttgacatgcgaataaattgatactgaaacttagcaacttcttaaaagtgtaaagaagcctcataagatcataaggaaaatgtatatatgcttttcacagctttctagaatttttgacatttgattttcttgagacttgtaaacctggatatgttgaagggtattgttaattttacttttcaaagatactttaaaacagtagagctagcaatgacaccttgcatttcatttcaacactgcttcaagggtttcttttgtatataattcttagaatgctcatttcttttaaatggtttaatttgtacagcagaggaatgtgaacgtagtagtatgtaactattaactaatactgagtttttgcaaaaaacaatgaatgctcatatgtaattgaaatacttcagatcacatgaaaatgctgatttaacatttaagtatcacagcattaaaagaaaaagaaagtatgaaaccgaaaattttattatattgactcaatgttctagaaaatcattcttaatagaccaatgattgtacacccccccttgaatattttttctaataaaaccttccatgtcggnnnnnnnnnnnnnnnaaaaatttttcaaaacttttgtttgggcggggggccccaaagggaaagggaactgggccaaaatttgttcccaaagaaaacccgggcaaggcaatggggtttggaattcccccnnnnnnnnnnnnnnnnnnnnnnnnnnnnnnnnnnnnnnnnnnnnnnnnnnnnnnnnnnnnnnnnnnnnnnncccttttcgcggggtacttttccaagggggggccccaggcgcgaccctccaaaattaaaatttaaacccccgcgccccggggcactttttttgggaggagaggggggtggaaactctctttaaaccttctttctcggcccacctggggaaannnnnnnnnnaaaaggcgggagtggaggaaaccctggaacgtccccaggggggaatcccagccctctttggccccccttgggaataataaatatattctccccccgcgggggaaaaacagcgggggcc

SEQ ID NO: 264104 - DNA, 332 bp, Homo Sapiens
aaaaaaatggaacggagggcaaagaactccgtatttgggaaaggagatgggggaaaggagcgggtattataccctatgttgtatttgcaggcaaatgagatggagccctctctgtaaagaagagtcatttgtgcaagtagacggggtctgtgggtgcaagccctggaggggcacacaattgcctggaggcttctgtgagatcgggagagggaggagaggcagtctcttgacaaaataaagtatttttattcatttgtatttattaaatgaaaaaacaatcccatggtgtccctgttgtgtggtggaacctaatgactgttgaaataaagttc

SEQ ID NO: 264105 - DNA, 1570 bp, Homo Sapiens
  misc_feature (253)..(300): n is a, c, g, or t
  misc_feature (803)..(803): n is a, c, g, or t
  misc_feature (824)..(832): n is a, c, g, or t
  misc_feature (1109)..(1120): n is a, c, g, or t
  misc_feature (1174)..(1174): n is a, c, g, or t
  misc_feature (1236)..(1236): n is a, c, g, or t
  misc_feature (1238)..(1246): n is a, c, g, or t
  misc_feature (1363)..(1363): n is a, c, g, or t
  misc_feature (1368)..(1368): n is a, c, g, or t
  misc_feature (1398)..(1398): n is a, c, g, or t
  misc_feature (1401)..(1402): n is a, c, g, or t
ggcactgcttactgccttggggttgtggagatggacccgtgacctcgtggaggccgtgtgggggcagcagcctggcctgtgccatggtgggtgtcctggggcctgtgcggagggagccacctcaccctgcagcccaggttgcaggtgtggccttgtttctccttgcccagcagtgctgccttcagcggccgtgacggggccagctggacacacggtgagattttctcgtatgtaaataaaaggcaatttggtnnnnnnnnnnnnnnnnnnnnnnnnnnnnnnnnnnnnnnnnnnnnnnnnccttgtccggccgcctcggtccctcaaagaacctttcctaaacccattccgtttggccgccccggcgcccctgcaccgtaaaggtgacacagtggctcattacgctgcttcctcctaacgaaaaatcccccggcgtccactgaaccaaggcgcgcttggggattttcttccacctaactaaacaacaaccggccccgcggccgtctaaaccccgaacgcccccctctgcataccgacaatcaccctacacgcggcccccctcccttagaagggagtcaatctttcctggggcccatcctcctcactcccacaccaggtgctaattcttcttaccccgccggagagtccctccgcggttatactgtcagggtatttcacacggccccggcgcgggatactcttcatggcacataacctcgcacacagtctgagagaccaagggagaatacgtcggccgcgcgtgagataacacattttgtctcacctcctcctgacgccgagcnccctgtctttctctttctggnnnnnnnnngggaaatacaacattataatgtttagaataaaaacgccccccacttttttcacccacctgttgaaaaaatacacgggccgcttggcgttttttgttagccccacgggggataaatccccaccccctcactaaaaacttatttgggccccgtaccccccgggggacgcggggaacaaatcaacacgattcggccccaatgtcgtttatagtatgttccctccccccctcctcctctcgcaccacgaggggaccccacccgtggttcgatatgttccgnnnnnnnnnnnntatcatgatgagatgtgaccaacacccaacccaccccccgcctctcgtgtatantcctcaccacatcacactcacgtgtccatggtcttcttcccccccttataattatgcggtgngnnnnnnnnnaccgcatgctggcgcgtatacgataacgtgccctcaacacccggtgctgtgcgctgctggaaacaacacaatcgccccccacgccccctccgggcggcgatacacctgcgccgtcgnctggntgagcatcatcccccccacccacacacgcnganntctggtttccgccgcccaacaatataacagactacctcctgcttgcttctcagggcgggaccaatcacaatggagccgcacgacgcgctttcgtttacctacgcgccgccgcctaagcacatcatcctcaatacctatgtatttgcccgcaagcaaatcatccctggg

SEQ ID NO: 264106 - DNA, 251 bp, Homo Sapiens
  misc_feature (86)..(86): n is a, c, g, or t
  misc_feature (88)..(88): n is a, c, g, or t
  misc_feature (107)..(107): n is a, c, g, or t
aaattattttaagccaggtaaggctggggggagggtggggccgtggtcccctcagcctccatggggagggaagaagggggagctcntntttgacgttgatttttttntttctactctgttttccctttttccttccgctccatttggggccctgggggtttcagtcatctccccatttggtcccctggactgtctttgttgattctaacttgtaaataaagaaaatattattcaagttttgagttacctta

SEQ ID NO: 264107 - DNA, 247 bp, Homo Sapiens
tgagccactgctcctggcttgaattttcttataatcccatgaaaccatcatcagagtcacaataatgaatttatctaatctatcacctttgtattcacctggagcctttataaagtttttctctatgcagacaaccattgatttactctgctgtataatactttccattttctagaattttctgactgatgtaataaagtgtttcctcttacgcccgcccgcattcacaaaacaccaacaaccctgt

SEQ ID NO: 264108 - DNA, 1103 bp, Homo Sapiens
  misc_feature (71)..(118): n is a, c, g, or t
  misc_feature (867)..(875): n is a, c, g, or t
gaatctgagggtgatgtctggccgctggtcaagaagccaacagtcatgtggctcgcagatgcatcctgcannnnnnnnnnnnnnnnnnnnnnnnnnnnnnnnnnnnnnnnnnnnnnnnacatctttgccagaggtgtgacatggtcagggggcccatctgctactctttcccaccagctcccctgttccagttctggttgctgttagtttccctgaggtatttgcaaccaccatggctgggtaaccaccgatcagcacagctgtccccttggtctcctgtatcccagtcactagtcctccctggtccaccccaccctcatcctcaggagccacagccatttcttagagggtttcaaaaggacagcctttggcgccttttccttctaacctttgagtccagccctttccagttttcattcactcgaagtaactgcactcaagctgtgctcaaaatcggcaacgcatttatttacaccaagcccttcccataaaacacaactgctgaagaaaatagcagacgtttcccctctctctaactctgggtatcccacagatgcaaaagggagaataaacctgaatattattacccccccgcgaaaaccgcggcgtcaagtgtccacgaaaaagacaaggcgtagcccccgcagaactgactgtgcaccgcggtgagacagatttttggtggggccggccctcggccccctcgaaaaaattttttctaaaccccatttcccttttggggcgcccgcgggcccccccggaggggggaagagtgggacaaaagggggcacctataaatttgtttttccccaaagggaaaaacccttgtgggcaccaatgaaatagagggggcttcgggagattttnnnnnnnnnaacataaaaaaagaacacgcccccccgcggggggcgaaaacgcccaagggcggctttttctcagtaaaacaaaactccccccaaaacgtgggaagttttctctctcgggagggcccttatttgacccgggggcgttctctatccccaaccacgtgggcggaggctcccctaaggagagcgcgcgtcctctcgataaatattgcgcgacgacgtgtttcagcgcccccc

SEQ ID NO: 264109 - DNA, 1518 bp, Homo Sapiens
  misc_feature (88)..(88): n is a, c, g, or t
  misc_feature (277)..(277): n is a, c, g, or t
  misc_feature (369)..(369): n is a, c, g, or t
  misc_feature (500)..(511): n is a, c, g, or t
  misc_feature (541)..(571): n is a, c, g, or t
tatgtcggcgtgcatctccacacaacgcggtacgccacgaagcggtgcgaggggacgctcgacatgatcccgcacatagaagccgcanaacgaccgcgtgggcgcgcgggggatactcgcgcgtcgataggtcgagcataggggctaattccgcgcgagcgtgtatagagacacgctctctcctagaggagaacgtctcctccgcttgtccgctggggggttgtttctgtgttcccaccgtcagagccccgcactctggggaggggatgcgtatacngcccagacccagcgggcggggggagagaattactgtatctcatgcggcggctggtcgagtcgaagacagctcccccccgatgggccgtctcnttagagcggaccgagacaggcgtaacgcccccccagggggagcgttctctttcgcgcccctcgagggagggcaccatatcccgccaagaccctctcgactggggtggtccccacccagtaaagggcttcgnnnnnnnnnnnnatttgtatcgcgcggttgtagtgaaagtannnnnnnnnnnnnnnnnnnnnnnnnnnnnnnccggccctccccgaggcgtcggagagagagagagcgcctcgtatagacaacagcagagctctgcttctcctgcggtactggggacggcggaagccggtcgaggcccgcgacacccaagagggggtgtgcaaggggtaggtggggtgtaagggcatatctctgtctttggttaagagccaggacgccaagaatccgccccccattcctttgttaaatcgttgattaacctgtgtcccagcagccgttggtcccggggttaggagggcgcgaagaaggagctcgcgtcctggggaaagttttttctgggaagtgtgccagaaagggtcagggttggacttgcctgtgcacaatccctgaggaccgcagttaagccgttataagccattgtctctgacctgtattgtagcctgaaaaataaagcaaagtgagtcaaacctctggctcccacttcctgacccactgctccccacacccatcttcaaggacccctcccgccacagtcctgcctcctgatgaagcgcagagcttccagagtgactgtagcctcagcagggccggtccagacacggctgagtcctgtgctgccctggaggaggaaggttcctgggatcctgctgccccgggactcaggatccagcctctcagtgcagatggatggactgttcaacttcacaaacttccggtcccttcccctccccagctgcccttgtctaggaaggctcatgctttgcttcaatgaagcgaggagaccacagaaatacccatggctgtggggctgtgaccagcagtggctgattagggtggaaactggaaagcgtcactgtctcagcagaagaaagcaggaccccacacagcctggggaacggctgcccacccacgcctcggtgaagaccacggccctggcgaggccccaaggtgcttctgagagatgaacgagacacctcacc

SEQ ID NO: 264110 - DNA, 438 bp, Homo Sapiens
  misc_feature (20)..(20): n is a, c, g, or t
  misc_feature (99)..(99): n is a, c, g, or t
tggtaaacctacgaagtatncccagccgggtggcggatcctaggtgggataggttggtcccctcaaaaaagtagggtgagaactgggcttccctcattngcccccaggatgtcaaatactaatgacataagagcctcacttacgtgccaaaattcacttttatactagtttttcagtgctttaatatttgtaacttaaattttaaaactcgtatttacaaacactactgtaacttcagtgaaactgaattgtgcgattgaagctttttgcttatcatagtatttattacactacttaattcagtaaatatataaaagtagccttcaatttatttttatattattttacatgtttttacctgcagttgtgtatgtgaatttaccttggtaatcgagatgtcatgctaaggaccaataaactatcactgaacaagaaaaa

SEQ ID NO: 264111 - DNA, 931 bp, Homo Sapiens
  misc_feature (381)..(477): n is a, c, g, or t
ggaggctgagcaggcttctgaaacctggcgggatgatgcttctgcgagattacggccgctatgacatggctcagcttcggtttaaaaaaggtcagtgtctatctggaaatttctacgtgagaggtgatggaaccagagtttacttcttcacacaagaggaactggacacgcttttcaccactgctggactggaaaaagttcagaacctggtggaccgccgactgcaggtgaaccgaggaaagcaactgacaatgtaccgggtttggattcagtgcaaatactgcaagccccttctgtccagcaccagctaagaggcacctgctgccaacacgatgcaagcccattgtgtttccgagcttttttaaaaaaaatctgtagcannnnnnnnnnnnnnnnnnnnnnnnnnnnnnnnnnnnnnnnnnnnnnnnnnnnnnnnnnnnnnnnnnnnnnnnnnnnnnnnnnnnnnnnnnnnnnnnngaccctgaatctgaaagtaatgataaaataaaaagaatataaatgaggtctcgttgatgctggacaattcaagaattcagacttgaaccttaaacctaggaaaagttactttgtatcaggattctaacaattatgcttcatatttgtgaagtcctttaaaacataattttctcaagttctttctttgagacctcaatctgtcttagcattttgtaactaataactgaaattttattcaaaggaattgtaaaccttaaaccaccaatttatttccatgtgaaaaagtgttatatatgacaagtgttttttgatcgtaattgcgttaaatcttttgagagtgtaaatgccgggctaggcaattgcagttaatacatacaggggttagttgaagggcttattaaagtgtaggggaagcaagctggggaggaatcagatccagatatttttcctgacc

SEQ ID NO: 264112 - DNA, 422 bp, Homo Sapiens
gtgtgaaaagcctaattgtggaatgcacagtttcaccagatcagatgatgtctggttattctgtaaattatagttcttatcccagaaattactgcctccaccatccctaatatcttctaattggtatcatataatgacccactcttcttatgttatccaaacagttatgtggcatttagtaatggaatgtacatggaatttcccactgacttacctttctgtccttgggaagcttaaactctgaatcttctcatctgtaaaatgtgaattaaagtatctacctaactgagttgtgattgtagtgaaagaaaggcaatatatttaaatcttgaatttagcaagcccacgctcgatttttatgtcctttcctcttgccttgtattgagtttaagatctctactgattaaaactcttttgctatc

SEQ ID NO: 264113 - DNA, 713 bp, Homo Sapiens; identical to SEQ ID NO: 178746
  misc_feature (185)..(346): n is a, c, g, or t
  misc_feature (352)..(367): n is a, c, g, or t
  misc_feature (392)..(402): n is a, c, g, or t
  misc_feature (406)..(572): n is a, c, g, or t
  misc_feature (587)..(607): n is a, c, g, or t
  misc_feature (638)..(668): n is a, c, g, or t

SEQ ID NO: 264114 - DNA, 477 bp, Homo Sapiens
atttgccatgtatggagaggagtttattttctatgattacaataatccattggacttacccgaaagaattgctgcacatagttttgacatcgtaatagcagatcctccctatctttcggaggaatgtctcagaaaaacatcggaaaccgtcaagtacctgacgcggggcaagattctgctgtgcacaggtgccatcatggaagaacaggcagcagaactcccttggagtgaagatgtgcacgtttgttcccaagacacacccggaacttggcaaatgagtttcgctgttatgtgaattatgattctgggctggactgtgggatctgattacagacggtgacataacacaggaaggaaccctgtcacattcctctttttgtattttcgtagtagatttaaaagttataatctcttcccctccccccaaactggagctgtccctggcctggttttcaaaataaagtgtgcgatctcccc

SEQ ID NO: 264115 - DNA, 1201 bp, Homo Sapiens
  misc_feature (393)..(448): n is a, c, g, or t
  misc_feature (561)..(572): n is a, c, g, or t
  misc_feature (612)..(620): n is a, c, g, or t
  misc_feature (691)..(700): n is a, c, g, or t
  misc_feature (711)..(750): n is a, c, g, or t
tcccccgttagggcctggtgcctctggctggaggctccctcccttggccgtcccaatagagcccggggctacttccactggccaggctcccgggcatttggttgaccccagcctggggaggagggctggtctccgctcctcaggggcttagtccgtcccaccccttcccttccctggcgccccgggcccaggcccctcagctgtcagctggttttgatggcctcccactgccccacacgccgccggacctccaggggcgactttagtggcctgaggagatgtatttataggcccccagcagggctgctcccccctcggccggtgccccaggatgggctcctcccggcgggggcttggccaaagcttttttaataaaatgcctttcccctcatnnnnnnnnnnnnnnnnnnnnnnnnnnnnnnnnnnnnnnnnnnnnnnnnnnnnnnnngacccgcacaaaaaatcccacaaacgccaacgcccaaacaccgataatatacggaccccgaaagaccccttttccaacccccccgatctgggcgccgcgtttttgtgtggggnnnnnnnnnnnntaagaaaatttccccgaaccttcttttttgggcgcccggnnnnnnnnnagaaccagacaaatggggatacctttccttccccccccaccccgtaccacgagaacaaggtccttagtttnnnnnnnnnnacaaaaacctnnnnnnnnnnnnnnnnnnnnnnnnnnnnnnnnnnnnnnnngaggggttcccggacccgttcctctttgtcgcccccctcttcacgcggggggcccgtttccgccgggccgcttaccccttctcatttccgcgcccccgcccggcctttccccgcttgcgcccgcaggggaagagaggtgtggcgcgtcccccatccaaatgccccccacgcggccccgggtatggcgcgccccttcctatacgcgcgggggcgcagagaaccgcaccagggccgcgggaacgcgcggtttttccatattgtggggaggccaccccgcgttaattaaattttcctccaccgccggtgggtaaaaaacacggcgccccctcaccgataacattccccctccacttttcccgccgcattaatatatcaaccccgaagtgcgccggccacaccctcccgcccgcccgtttgttttctgcgaaccaatatacccgcctttcttgcc

SEQ ID NO: 264116 - DNA, 864 bp, Homo Sapiens; identical to SEQ ID NO: 3151
  misc_feature (685)..(686): n is a, c, g, or t

SEQ ID NO: 264117 - DNA, 574 bp, Homo Sapiens
  misc_feature (54)..(54): n is a, c, g, or t
  misc_feature (63)..(63): n is a, c, g, or t
ccgaccctggccccgcacaaacctgggtgtgatgctgggtgcttcccaggcatncgcctcgcntctcctgcctttaaggcacaagcaaggggggaaaacatccctcagtggctccccatatccgtgtaggccacgctggactgcaaaccactgggtcatgaaattaggtttgtaggccacaaccagccttgtgttatgaaacagaaaacagaaaacatgaggacatgtaacatgtaaaaaaggaaagtacttgttcacaaaacttttgagttatgtgtgtgagtgtgtaagaaccagatcagactggaaaaaactctctcccactgtgggttcactgtcaacaaaacatcaggccagccagtgtctaggctgtctcctcaatttccccaataatgtgcctcacattcctcacagaagcctcccaggcttcctgcacattctgtggcatttctcagtgacctagagggatctttaaaccgcaacgagcctaagtggctgaaaacctcaggaacgcctgtcagtgtcccagcaagttgagtctgagtgacacatctgagtttccactcctgagtga

SEQ ID NO: 264118 - DNA, 554 bp, Homo Sapiens; identical to SEQ ID NO: 9782

SEQ ID NO: 264119 - DNA, 506 bp, Homo Sapiens
  misc_feature (48)..(48): n is a, c, g, or t
  misc_feature (70)..(70): n is a, c, g, or t
  misc_feature (89)..(89): n is a, c, g, or t
  misc_feature (115)..(115): n is a, c, g, or t
cccatcctgatccaagtgcccttattcaaggtgttgctgatattttgnccttcactgccccactcatagngaggccaaattaccatttncctgggaacacagctcagattttggnctggaatggctatggcttatgcagtggcaacttcttgttgtagtcttattgcaaactctgattcttcagcaatatcaacgttttaacatgctcacctcagcaaaagttaagacagctgtaaatggacttgatctacaaaaaggccttacttttatcaaatgtttctcgacaaaagttttccactggggaaattattaacttgatgtcagcaactcatggacttgacagcaaacctcaatctcctctggtctgccccttttcaaatcctaatggccgtatatctcctttggcaagagctgggtccagcagtgttagcaggggtggcagtccttgtgtttgttataccaataaatgctttagctgcaactaaaataaaaaagttaaaggtaaa

SEQ ID NO: 264120 - DNA, 597 bp, Homo Sapiens
  misc_feature (506)..(506): n is a, c, g, or t
  misc_feature (523)..(523): n is a, c, g, or t
  misc_feature (527)..(527): n is a, c, g, or t
cctttaatgacaactcccaaggaaactgggtgttgagagggaggagctctagcaataggcacattttggaggggaggggccggaagaaaggaccagcgcccaggctgaggtaaatatggccaactctaagctgcttggagatgctgtttccccaacccctgctgccattccccctccaggggaggagctacaagggaaaggggctgagacctcaaggggatgggcgaggctggctgaggaagaacagagctggcggttttggacacagctggtggtagcatatgggctttcccttctaccagatggagtgggctctggcctagcaggtcacgactcaggcagcctgagacacctcctcgggctctctgggatcagggcactggccaggccagatgcccccaccgtgtcgtccatctccccttctgctccagtggggaacaaaggctgggccaggagcgcaaaggccacaaccttcagctcttttcaatgcagcctaggcccaagcncaaagcaggggtactcnagtngcagagggcacacacagtctccagtttagaaactgggtacagcataagagtgactccaacttgtaaaaca

SEQ ID NO: 264121 - DNA, 1446 bp, Homo Sapiens
  misc_feature (719)..(719): n is a, c, g, or t
  misc_feature (721)..(721): n is a, c, g, or t
  misc_feature (837)..(837): n is a, c, g, or t
  misc_feature (996)..(996): n is a, c, g, or t
  misc_feature (1022)..(1022): n is a, c, g, or t
  misc_feature (1192)..(1192): n is a, c, g, or t
  misc_feature (1195)..(1195): n is a, c, g, or t
ctaaaaagaggaaggagcccaaaccatcctctccttaccactcccatccctgtgagccctaccttacccctctgcccctagccaaggagtgtgaatttatagatctaactttcataggcaaaacaaaagcttcgagctgttgcgtgtgtgagtctgttgtgtggatgtgcgtgtgtggtccccagccccagactggattggaaaagtgcatggtgggggcctcggggctgtccccacgctgtccctttgccacaagtctgtggggcaagaggctgcaatattccgtcctgggtgtctgggctgctaacctggcctgctcaggcttcccaccctgtgcgggcacacccccaggaagggaccctggacacggctcccacgtccaggcttaaggtggatgcacttcccgcacctccagtcttctgtgtagcagctttaacccacgtttgtctgtcacgtccagtcccgagacggctgagtgaccccaagaaaggcttccccgacacccagacagaggctgcagggctggggctgggtgagggtggcgggctgcggggacattctactgtgctaaaaagccactgcagacatagcaataaaaacatgtcattcttccaaacccgcgcgccccgcacctctgatgattaataaagcgcttggtcggcccggcgctccgggccactgtagaaggtgtttattaagacgtgcttccgttttggagngncacgggtccctaactcaaggttaaatttcccacctttggtgccccataccgctgggatttccccctagagagagacaacctctctggggcccccattacacactaatcgcgcggcntttgacggaatagtgctctcgtccgctgtagtgaccagcactgtacctccgtcccctcggcctggtgcggagacctaaaaaacccgtcacacgcctctcatgtacgctcgctgcgaagaaaacagtaagaagggttccccccacggaaaaggtgttggnaatctggctctcccccccactaatanggttccaaattatacacgtgccgtggaagatcattcccagttactgccccgccgcctcgggggagacaggctctatccgccacctccacaacggactcttcatacaccttcatgcacacaatgtctgtatggggggcacgcccttcgccgctcttcccgtcgcccggtcnttnttacatcccacaagatagaagtccactgccggtctagctgaaaagagggtaaaggcgcggctcgagagagtgatgctcttggacggcggctcatgtcgggtggtgcctctcatcatttcccccccacctcgatcctcccctcatcttgacttcaacagcctctgcgcactgctcccccccgacagcgcggacagtcagcaagacaacgttagcgggcacaacacctgggcgtacataacacaagccgtccg

SEQ ID NO: 264122 - DNA, 1274 bp, Homo Sapiens
gggacatctccgaggacggagacacgctggtccacctggcagtgattcatgaggccccagcggtgctgctctgttgcctggctttgctgccccaggaggtcctggacattcaaaataacctttaccagacagcactccatctggctgtacatctggaccaaccgggcgcagttcgggcactggtgctgaagggggccagccgggcactacaggaccggcatggtgacacagcccttcatgtggcctgccagcgccagcacttggcctgtgcccgctgcctgctggaagggcggccagagccaggcagaggaacatctcactctctggacctccagcagcaaaactggcaaggtctggcttgtctccacattgccacccttcagaagaaccaaccactcatggaattgctgcttcggaatggagctgacattgatgtgcaggagggcaccagtggtaagacagcgctgcacctggctgtggaaaccaagagcggggcctggtacagttcctgctcccagctggtgcccaggtagatgcccgcatgctgaacgggtgcacacccctgcacctggcagctggccggggtctcatgggcatctcatccactctgtgcaagggcgggtgctgactccctgctgcggaatgtggaggatgagacgccccaggacctgactgaggaatcccttgtcttttgccctttgatgacctgaagatctcagggaaactgctgctgtgtaccgactgaagccaggcagggtctgggatcctcagggctccacctctccatctggaagccggagccataactgctgcagtttgggcccaggctatgtgctcttctggtgccctagggactgctgtggccagagcctggggccagccagtacagtcctgagccgaggaggagggactgcaagtggaagagagccagtctggaaggaagagctttccaggtggacagggcttcttggaagacccccaaagccccaggtatcctgggtgaagcctgtttgcctctcttgaaaatggcaggtgctcttgttttacccatgttgggtcagcctgaaactgccaaccagtaggaagcatggactctcctgagtgagaagagactgaaataggagcaagcagaaccctgagaggtgtcccatcttattgctgttgaggaccctgaaacaccgttgtttaaagacttcacacagaaggctctgaactgagccactggggaagggaaagttcagtaacatgacactaaaatggcagagacgttaaaa

SEQ ID NO: 264123 - DNA, 780 bp, Homo Sapiens
  misc_feature (755)..(755): n is a, c, g, or t
ggatgaaaagaatgaattgagagtttaacatgccaagagatgtgaaatgtggccaaagagatgtgagggtaaggggaaagccaaagctacactggaggaatttttatagcctttgaatgcatgcatatacatgaaaatctgaaagataaactcatatgcactaaacatgctattcaagtctaccaaacatccaggcagtgaaagaagaaagtaacagaaaatgatgaaataaagagaccatcttacaataatctcagtttttgtttctttctgatccagaaataatctaaatttaggagaatatttcttaatttccacattgttacattgttttatgtgactggcacagacaaccattggttgtcatcccaggcagccatacccaattccccttgttattgggcagcatctgtgtcttgccttggactctgagaatatctagatgctaattttcccagtctcctgtgcagcacagtatggccagtatctcccagtgttgctcagtggaatctgccggggcttctgggaaagattttcctcattcagaagagacaggtttatcatgaagacttcctcctctctcacttcctgcttttaaacatttttatataagaacatgatgcctgaagctgctgcagctgtcttggaaccaagaagagaaaaaagtggacctcagagaagctgacccagagcctgagaagactcagctactaggccaattctggaactgcctttttgatgccttgttatctganaaaaataaaacttgattgctcagtt

SEQ ID NO: 264124 - DNA, 386 bp, Homo Sapiens
  misc_feature (160)..(185): n is a, c, g, or t
tgacacacgcgcccggccatcctggctccttgagtgggagtgatatcacctctatcctaactgtccttgtccctcctctccccacagctggattatcaccgaggcctcttggtggaccgtccctctgaaactaagacagaggagcagggaataccacggnnnnnnnnnnnnnnnnnnnnnnnnnnggtccagccaccacagcacccccgggcagagcagcgggagcaggaacgggcagtgcgggaacagtgggcagaacgggaacgggaaatggagcggcgggagcggactcgatcagagcgtgaatgggatcgggacaaagttcgagaagggccccgttcccgatcaaggtcccgtgaccgccgccgcaaggaacgtgcgaagtc

SEQ ID NO: 264125 - DNA, 779 bp, Homo Sapiens
  misc_feature (647)..(672): n is a, c, g, or t
  misc_feature (674)..(674): n is a, c, g, or t
ggtgtttcttttaggtacttgtgcttattaatctacttactaaattttcacattgacatttttggggatgatactaccatatacgaaatggaaaatgtaatatgctcagtgcttctgtaaaatgcagcaatactggtattactttacatcagtaggcatctttgacatgagcatataaatattttgttgactcagcaaaggtgacactttgtgactaaagtatcccattatatataatggtttttgaaatgttggaaattttggggaattatcaaatgtatagaagttgcatgaagggtatagagaggtgtaactgtttgttaactattacatggatttcatactaggcagtgacaactaacatgttacttcaactaaaagtgtataatgggttgtctttttatttatgaaaataaaagtaattttacttcccccacaaaagccgcccaccgcgagcccgccccacacaagcacacaacgcgcgaccaagcccaaataaatttggtgggcccctcccggcccctccaaaaactttttcaaaaccattttcttttggggcccgcggcgcccattatggtaacggaaacctgggccacaagtgtgcttcccaaaaaaactccgggaccctggactaggggctcgggatnnnnnnnnnnnnnnnnnnnnnnnnnngnggggcaaaaccgagagtgtttttaaaacaaaattccaaaagaggggtttctcggaggcacttacccgtggcttacatcaacccgggatctccaagcgcggctcct

SEQ ID NO: 264126 - DNA, 455 bp, Homo Sapiens
ggattatccccctcaggcaaaagggcgttgtgaataccagctgtgtcctggcagcagtcccaagctggttcgggggcagagggaagagggaactcctaacaaaggggagcttttggttgggggcgacagctgctccctggctacatagctcccaggctatgggaacacccatatgggttaacagcacagctgcccctgcctatggtttacccaagagaatggttctgttacccgttatgaaatttccaacatatcctgttccccactactcattcttttagcaaatgacagaagctaattcctattgaacaacaatacagtacaacacagaatgttagagaaaaagcctttttatcctgctttctttgaacacatacttgatcaaaattatttgtaaagaacatctttcctactttttgattttaacaaatgcaaatttagttctctaaaacttg

SEQ ID NO: 264127 - DNA, 402 bp, Homo Sapiens
  misc_feature (24)..(24): n is a, c, g, or t
  misc_feature (65)..(65): n is a, c, g, or t
  misc_feature (81)..(81): n is a, c, g, or t
agtgaaaaaagtttcaattttttncaatttcctggaaaaagtgccccccccaggttactgaaagncctcctttgtggggtngctgggcccccggaatatttaacccattgcctcttggcccctccttgttcctcaggattcccagctttccccccctggcccagaaatgttcacccctggactcattcagaaaagcatcccctggatgtgaatgaggaccctccttaaacaggaatggagaggttgagctggtcatttccaaccttagcttcaaggcagaactggaattagtttcaaaataaaccttgatcctaggcacttagttctagaagatcctacaagcacgtctgctgtaactctatgtatgttttctgtaaaatcacatacctataaaataaaaag

SEQ ID NO: 264128 - DNA, 469 bp, Homo Sapiens
  misc_feature (33)..(33): n is a, c, g, or t
  misc_feature (69)..(69): n is a, c, g, or t
  misc_feature (261)..(339): n is a, c, g, or t
tagatcctcccttgtggtgtgagatgttcctgnaactcagccaggccctcctcctcctgggcttgcaangcacccaccctattcccagcattgcccgaagaccaaccagtttgggtgaacagtggcctcctcagcttcctccccatctgggtgccccaccggcggcggagggagctgtggcgattggtggggtgtggggagggacgaggagggaagcctctgtgctgctcaccttgcccaaagcccagctcagcgggtacnnnnnnnnnnnnnnnnnnnnnnnnnnnnnnnnnnnnnnnnnnnnnnnnnnnnnnnnnnnnnnnnnnnnnnnnnnnnnnntaagcttaaaaaaactgcttttgccatggctcatcggagtttatacttatttcttagaaaatgtttcctgttatttgctggacaagtcccaaagaacaggcagatgttcttattaaaagatcagcctata

SEQ ID NO: 264129 - DNA, 781 bp, Homo Sapiens; identical to SEQ ID NO: 9823

SEQ ID NO: 264130 - DNA, 954 bp, Homo Sapiens
  misc_feature (322)..(322): n is a, c, g, or t
  misc_feature (449)..(449): n is a, c, g, or t
  misc_feature (461)..(461): n is a, c, g, or t
gatttccaggcccctgaggactggagaccgcttcacgcctgcacttcagcacaccgtttgtcccccggggcaaggtctccttactctgagcccaggccgttccccttggcttcctccatccacccaggctgcactgcagtgatggcgcgggaggcaccagctctgtgggcctgtgtccagcagctgcgggtctgaaggaatagccagagaggagcacctggaaccccatgggcttgggacttcctggggggccccgctgggatttcttcgctgctctagctggcaggacacatcccgggctcttccacccattcccccatgnggctgaagacattccaacaatggggcgggcccataatagttagccctcagtcagttcccggagcacagccctgggagggggctatttctctccccactgaaaacatttcaaagctgagttacttgtntgaggcctcatncctcggaagccgtctgactccagagtctgagcccccggctagtaccctatagagagggggctctccaaaggggctgctggggcatgtgtgcctgtggcagaaaagaggagaccctggaattcagcaccctgggtgccattcccagcgtttagtttctagaggcctcagtttctccatcagcttatgggatccttgtctttactgacaagaatggaatagaaatgtaaaagtactctgaaaagcaattgccctgtaacttatctagaaagaaaagaccctgagactccagaatctgctgttgccatagccccatatgtgtgaattctgcaactagccaaggctagttcctttcaattccatttaaaaaacaaaaaccagcaggtgtggtggctcatggcgtaatgggcctgcccaatgctttgggagccaaggcagatagatcgcttgagcccaggagtttgagacaagccctggcaacatagtgagatcccat

SEQ ID NO: 264131 - DNA, 451 bp, Homo Sapiens
cttagctttgtttgttggagacaaatagagaatgcttgttaagtatgtcaaaacaatcttatcttgtgaatttttgttaatgtattatacgagctatatttttcatttgcccagaaagacagcttgtataacgcttttggaagtttctgctctgtaatgtctttagagctgacagtctgttaggtttgtttttttcttcatgctaaagtgtcagttggtggttttgtgaactggtcaaaaattcacaggtcttaaatgttttgggggaaatttatattggacactgctctttgtctagcaaataaaagatgttaatatattcctgttactggcatgtgcacgactatgttattagaagccactttatcattttcctgctttaaatagaaatgtctatttatgaattctgcttgtagttttttcacaaataaaatagtaaaatttacattgg

SEQ ID NO: 264132 - DNA, 483 bp, Homo Sapiens; identical to SEQ ID NO: 9853

SEQ ID NO: 264133 - DNA, 520 bp, Homo Sapiens
  misc_feature (65)..(65): n is a, c, g, or t
caatatttaatgagcataaccttctcagtctcctgctctcaaatttaggacaaacccgctaaggnacaaaaaaatccctcccgtgcctttatgaagggcagcaggggctggggagcctctgagggactctttcattctgcagttgtctggaagcctgggtggcgtcatgagctgaaggatcatgctttcctgtcctggctccataggttataggctggctggtgaaaggttcacgtggcccaggctgaacttcattgcctagctttggatgtgctttctgccataaagactgatttttgttcgttctgagccttcaaggaatttgttttttacaactggaatatgctcctgtgtgtgttaacagatcatggatgttttatgttttcactgatcatttaaagagtttgacctcagagctccaggatcatcagtaaatttgtcatgttatatatttatttttttataaatcaagacttctgtgtgctcttaaatatattaaaaacaatttacatttcaggaa

SEQ ID NO: 264134 - DNA, 483 bp, Homo Sapiens
  misc_feature (49)..(49): n is a, c, g, or t
  misc_feature (64)..(64): n is a, c, g, or t
  misc_feature (78)..(78): n is a, c, g, or t
  misc_feature (88)..(88): n is a, c, g, or t
cctaaggacaaaaacaaaccccctccccggccttaatgaatggccaacnaggggcctggggaancccccctgaggganctcctttcantcctgcagttgtcctggaaaccccgggtggccgtccatgagcctgaaggatcatgcctttccctgcccccggctcccataggttaaaggctggctggtgaaaggttccacgtggccccggctgaacttcattgccctagctttggatgtgctttctgcccataaagactgatttttgttcgttctgagccttcaaggaatttgttttttacaactggaatatgctcctgtgtgtgttaacagatcatggatgttttatgttttcactgatcatttaaagagtttgacctcagagctccaggatcatcagtaaatttgtcatgttatatatttatttttttataaatcaagacttctgtgtgctcttaaatatattaaaaacaatttacatttcag

SEQ ID NO: 264135 - DNA, 584 bp, Homo Sapiens
  misc_feature (352)..(352): n is a, c, g, or t
agcgaggcctgggtggcgaattcggcacgaggaaaacagacgccgaggtgatcagtgattccaaaggctgacgctcagcagcgccacctccatgccagccaactaggctacgggatggaggggcggtctgtgaaacaccagccatcccgtgaaagctcagcttgccactgtcatgtaacagggtgggtggtggcacagcagaggctcacacttgtcaccttcagcctctagaagctccccgtggggcacgaaggctggggacagagtgtcctgaggttttgttacaaggctagactttaaaataccctttcaaagtttcatcccgcctcatgtcgcaggactgctgtgtttntgaaagcgcgtttgtttccacaagacaagctccgtgtagtcgccagcgggtgcctggcccaggagctgccctgtggagccagcgttgtccccgagctgctccctgtggccgtggctccttttctgaggctcctgactccattcttgcagattctggtggatcaggagcttacattctaaatgctacatagaggtgttgaagaaaatttcataggttctgtaatagtggatgc

SEQ ID NO: 264136 - DNA, 1125 bp, Homo Sapiens
  misc_feature (109)..(109): n is a, c, g, or t
  misc_feature (381)..(381): n is a, c, g, or t
  misc_feature (468)..(489): n is a, c, g, or t
  misc_feature (570)..(596): n is a, c, g, or t
  misc_feature (704)..(832): n is a, c, g, or t
ttgtaaaccagccttttaaaaaaattgaaagccggggtattttggtttaaaaccaaaaaaagccccctagaccctgggtccatgtttccccccttttaaaatggatttncctgaaaccaaagtaatcccctaataaaaacccccacaggcacccaaacaggctgccttaaaatggtctgttaaagacattttttggttatggaatataacctaagaaaagttttgcacatctgtaagggggaaaaacagtatatcacccattgggtagagtggacgggactcatgtaaggactcaatttggggaagagcattcagtggcatgctgttagaggactagtgtccgagaatctcctcacagtatcatgttgcaggaattccccnattgctctgcaacttccaaaccagtttgagtcatacaaatgttttctaaacttttattgtattactgcaataaatcttttaacggtnnnnnnnnnnnnnnnnnnnnnncaggagaaagaggacaggacaaaaagcgcaagacgaagaaagcgccaccaaaggagcgacgaaaccaaagggaaagagggnnnnnnnnnnnnnnnnnnnnnnnnnnngcctttgggggcccccccggccccaaaaaatttttaaaacactttctttgggggccgcggccccccaaggaagggagccggggccttctttgttcccaggggaacccnnnnnnnnnnnnnnnnnnnnnnnnnnnnnnnnnnnnnnnnnnnnnnnnnnnnnnnnnnnnnnnnnnnnnnnnnnnnnnnnnnnnnnnnnnnnnnnnnnnnnnnnnnnnnnnnnnnnnnnnnnnnnnnnncccgatataaaatttcccccccgcccgtggcattttttgggggtgggggttgggattccattaaagccttcgcgccgggagggggacacccctcccaaccgggggtggggaaaaccggaaacccgccgccggggcttccaccccaccttggggcccttggcggtaaaaaattctttcgccccggggaggacaccggggggggcaaaaaaatttttgcccattttgtggcccgcgttttaaattcaaaacatgggggagacaatcccccccgggaggtggtgggggggagaaag

SEQ ID NO: 264137 - DNA, 732 bp, Homo Sapiens
  misc_feature (702)..(702): n is a, c, g, or t
ttttttttgattggattaaaaaagtgtattggatttccaatactaaataaaaacatgaaatcgtttttaaaaagccatagagtttacagcatcaactacagaaaaggccaaacaagtgtgtacagacgccagtcccagcagccctctggaccctcccacaggcagtacggcgacagacacaggtgttccaaatccccccgaggaagctgctgagcggcagtaaaaccaggacactacaggacacacaatggtttagtttcgaaaatcacaggaaaatgtaagaaaatgtattaaattgtgaaaaggtgcaatacagaatagctttcctttttcttaattttttaaaaaacccccaactttgaacagttattttatttaaaaataggcccctcccccacccgccccaattctgtggcagtatccaggtaccaaggccctgaggtaacagaagcagtcagggtttgtgggaggaaatgccccaaatactgagcatgttctttgggcaaaaggtagtttctggggaatctggccctcctggtggccagagtgctgggacagctctcttcaggatcagtttaagtgcactggttttccagaatcccgcctggcacccccatgtgaccagcgagctcggcagcagagttcctgcattgcacctttcattgccccccaaatcataaatacaaagagttcatcttgtanaaaagcaagtatgtgacaagatcaaacatg

SEQ ID NO: 264138 - DNA, 484 bp, Homo Sapiens
  misc_feature (31)..(31): n is a, c, g, or t
  misc_feature (60)..(60): n is a, c, g, or t
  misc_feature (69)..(69): n is a, c, g, or t
  misc_feature (76)..(76): n is a, c, g, or t
  misc_feature (94)..(94): n is a, c, g, or t
  misc_feature (100)..(100): n is a, c, g, or t
  misc_feature (117)..(117): n is a, c, g, or t
  misc_feature (139)..(139): n is a, c, g, or t
  misc_feature (158)..(158): n is a, c, g, or t
  misc_feature (185)..(185): n is a, c, g, or t
  misc_feature (207)..(207): n is a, c, g, or t
  misc_feature (219)..(219): n is a, c, g, or t
cccatggggacctttggggccccccctaatncccccagcctaccctttgggaagaacccnccaggcatnccaggtnacccctggaaacctgtanccacanttttgcattttaaaaantttacagtatccaaaaaacccnaaatcctgccttatgaaanaaaacatgaagcaggacatatttggantcctatttatttaaaattaaantctttgcaaaantgaacttctcaactaaaacgtgtccatgtcagaattttaactgttagcaggtagtttgtggcaaagatggctaaataatgaagcaaattagaatctgtgtgtatactaatgagctgctttttttctgttgagactatcattatttgtcttattacccaagaggcaattacctgaatttggatgtctgaattataacttatgcaggaatagttctgtaaatacatttaaataaactgtaaagatatttaaaaaatatagtatttgc

SEQ ID NO: 264139 - DNA, 817 bp, Homo Sapiens
  misc_feature (567)..(567): n is a, c, g, or t
  misc_feature (689)..(706): n is a, c, g, or t
  misc_feature (732)..(745): n is a, c, g, or t
ggtcttaatctgaataaaccagaatgatactctcagcacagaagaataaagggagcgagtcattaacgttttctttttaaacctttatgatgacttccttatgaattactgaacgaacactggaatgggactcaggtatcctgaggacatctctcaactctggcccttagttccccctctgtaaaattagggtgcccaactaaatgatctaccaaggtcccttcccagcgccgcccattctgtaattacatccatgtgtaactgtaattaaaccatacaccaagtgactgcccaggccatggggaatgtaactcccgagtaaatgctttggtttgttcagaatacactatgaacttctttccaaagacgggttgtggtaaatagtggatattttgattataagaaatagagtttccttgaagctttagctggagatacagcaatagtgtggtgttcctacaaatatcacagtgtattcaaacatatttttctatcaaaaatcatttttgtaaaagctgtgtgtttttatccaacttgtgataataaatgttctttattttagaattncggacggcaaggcgcgcccggtatccggaggacgtggcgcatttatcaaagccaatatgccagagcagccgcgaccgcccactggcaaggcgcaagacactaataaaaaggttgtttggggnnnnnnnnnnnnnnnnnnaaaaaattttttaaaccccttctttnnnnnnnnnnnnnnccccacaaagggaaaaaagaaaaccagggggaaaaagggtttttttcacaaaaaaagaaaccccccgggggg

SEQ ID NO: 264140 - DNA, 1042 bp, Homo Sapiens
  misc_feature (187)..(187): n is a, c, g, or t
  misc_feature (189)..(189): n is a, c, g, or t
  misc_feature (198)..(198): n is a, c, g, or t
  misc_feature (217)..(217): n is a, c, g, or t
  misc_feature (490)..(492): n is a, c, g, or t
  misc_feature (495)..(630): n is a, c, g, or t
  misc_feature (642)..(712): n is a, c, g, or t
  misc_feature (745)..(800): n is a, c, g, or t
  misc_feature (824)..(873): n is a, c, g, or t
aacgcgtgctctgagatctacattcacggcttgggcctggccatcaaccgcgccatcaacatcgcgctgcagctgcaggcgggcagcttcgggtccttgcaggtggctgccaatacctccaccgtggagcttgttgatgagctggagccagagaccgacacacgggagccactgactcggaattttntnccccccccngccccaaaccaactcagcncatccacatccgagtcttcagggtcacacccaagtaattgaaaagacactcctccacttatcccctccgtgatatggctcttcgcatgctgagtactggacctcggaccagagccatgtaagaaaaggcctgttccctggaagcccaaaggactctgcattgagggtgggggtaattgtctcttggtgggcccagttagtgggccttcctgagtgtgtgtatgcggtctgtaactattgccatataaataaaaaatcctgttgcactagtaannnaannnnnnnnnnnnnnnnnnnnnnnnnnnnnnnnnnnnnnnnnnnnnnnnnnnnnnnnnnnnnnnnnnnnnnnnnnnnnnnnnnnnnnnnnnnnnnnnnnnnnnnnnnnnnnnnnnnnnnnnnnnnnnnnnnnnnnnnaaaaattggggnnnnnnnnnnnnnnnnnnnnnnnnnnnnnnnnnnnnnnnnnnnnnnnnnnnnnnnnnnnnnnnnnnnnnnnggggcaataatttttcccaaagaaacacccggnnnnnnnnnnnnnnnnnnnnnnnnnnnnnnnnnnnnnnnnnnnnnnnnnnnnnnnngaaggtttttaaaacaaaacccgnnnnnnnnnnnnnnnnnnnnnnnnnnnnnnnnnnnnnnnnnnnnnnnnnncccaacggggggcctttttattaaaaaaattagcccccccgccccgtgtgggctttttttggagagaggcggggggggaaatattctaaaaaaacaactccccccccgccggggtgggagccctccctccacaaccgggggtggtggaacaccccttgaatcccgccgc

SEQ ID NO: 264141 - DNA, 909 bp, Homo Sapiens
  misc_feature (216)..(216): n is a, c, g, or t
acggaagccgggaaggcgattcatagctcgcggggtacgggcgcgcgtgcgcactccgcagcccgttcaggaccccggcgcgggcagggcgccaacgagctggctggctgcttgcacccacatccttctttctctgggacctggggtcgcggttacttgggctggccggcgaacccttgagtggcctggcggggagcgggccttcgcgcgcctggnagggccctgtggaacgaagagaggcacacagcatggcagaaaaccgagagccccgcggtgctgtggaggcttgaactggatccagtggaatacacccttaggaaaaggcttcccagccgcctgccccggagacccaatgacatttatgtcaacatgaagacggactttaaggcccagctggcccgctgccagaagctgctggacggaggggcccggggtcagaacgcgtgctctgagatctacattcacggcttgggcctggccatcaaccgcgccatcaacatcgcgctgcagctgcaggcgggcagcttcgggtccttgcaggtggctgccaatacctccaccgtggagcttgttgatgagctggagccagagaccgacacacgggagccactgactcggatccgcaacaactcagccatccacatccgagtcttcagggtcacacccaagtaattgaaaagacactcctccacttatcccctccgtgatatggctcttcgcatgctgagtactggacctcggaccagagccatgtaagaaaaggcctgttccctggaagcccaaaggactctgcattgagggtgggggtaattgtctcttggtgggcccagttagtgggccttcctgagtgtgtgtatgcggtctgtaactattgccatataaataaaaaatcctgttgcactagtaaaa

SEQ ID NO: 264142 - DNA, 885 bp, Homo Sapiens
  misc_feature (310)..(326): n is a, c, g, or t
  misc_feature (444)..(444): n is a, c, g, or t
ccccttggggaaaggaaagttcactgggcaaagtgcccaacttactacaggaacccctagaggccttatcctggcaaagggtagtcatgcaaccttgcaaaaacatagaatcaatcacactcttacacacaaaaatcccttccttgaggaattttgggaatctccgccttccctaaatttagcgttaattaaaggcttaaatggcttttgcctgggaacagagaaacttttcgagcagatgacctatggggggttgaagaaagtgaagtgcccgattggctattttgccttgcagagctgggaatttcannnnnnnnnnnnnnnnntgtttctctccttacctttggcaatcctttggcctggtggggaaaacagaggccccagggtgagtactaagacgggtataaagaccaggtggcctgctccttttctgggccctagcancaggtgggtaacccccacccaacccagctcctgctgctgtcccagtcttgggctggggcctggaaagaggaaagaggcttgccctggggctgggcccagcccgctgtgcactttgaccccagttccttgccagcacggctgctaacagactgccacttgagttgcccttgcaggcactcccagagcagccatggaaggagctggccctcacaccatccacctccacactgcctcctggccagctgcccaccccagtgccaggtgggagagggagcagaacagccagccccttccaggtggcagtcggaagggtttttgtttttgtttctgttgccatttgtgtaaatactagtctttttggaaaaaaaataatgtaaagatgttttgtataaactctgaattattttcttgttgcttttttcttagaaaaaaatgagaact

SEQ ID NO: 264143 - DNA, 409 bp, Homo Sapiens
  misc_feature (15)..(15): n is a, c, g, or t
  misc_feature (47)..(47): n is a, c, g, or t
tcccttcctccttantctcccatactgtcttcctacacctttaaaancctgagaactatacaacctttccccagactccccaagaagagaagagattggcaaatggggctccctgggcccagtcctgcctagtggcaagtttctttgaatcaggaaggcaggtgaggtaagggccaaatcactctcctccatagcaggaagccatttgggcagctcctttggtgattacatctttccatatcttttacacttaccaccttccagctctgttttgctgtgtatttttcttacaataatttttttcagctatagctgcagtttaatcaggatgggtagagagctgtcctcataaggctgggggtgggaagatggaatactgacctaatgtataaaacttaaaacaattctc

SEQ ID NO: 264144 - DNA, 1104 bp, Homo Sapiens
  misc_feature (92)..(107): n is a, c, g, or t
  misc_feature (136)..(136): n is a, c, g, or t
  misc_feature (326)..(334): n is a, c, g, or t
  misc_feature (426)..(446): n is a, c, g, or t
  misc_feature (575)..(588): n is a, c, g, or t
  misc_feature (602)..(602): n is a, c, g, or t
  misc_feature (604)..(619): n is a, c, g, or t
  misc_feature (624)..(624): n is a, c, g, or t
  misc_feature (665)..(717): n is a, c, g, or t
  misc_feature (740)..(740): n is a, c, g, or t
  misc_feature (743)..(749): n is a, c, g, or t
caaagattgtttttctctctccaaggcggggcccaaccgagggggcgcgtaataataaccccgcggggggggcgagtcacggggtgttccgnnnnnnnnnnnnnnnnttgtggggaggggtgtcttcccccccctncggggcggcggaggagggaggagttttataagagagaatatttacccacaccccctctcttcttctcttacacaaagatatatttgcgcccgccgggccggcgggggggcggtgagtttatttgtgttattattctcgggaggggctcccgccctggagggagctcccccctcccgctgttgtaaaacgnnnnnnnnnggagagggaaccctcccccgggagcgccccctcttcgtaggttttttgttcttcaaacacacccctccggttttcccccccccgggggcggnnnnnnnnnnnnnnnnnnnnnaggccccaaccccctttttctcgtgccccgcgggttttttcttggggaaaacaaaatttggccccgttggcgcctttccccttggggggccccccgcgcccacaaaaaagggttagaaaaggttttttnnnnnnnnnnnnnncggcgccaaggggntnnnnnnnnnnnnnnnnggttngtgaaagtgttttgtgtgtttttgttggtgtctggggtggnnnnnnnnnnnnnnnnnnnnnnnnnnnnnnnnnnnnnnnnnnnnnnnnnnnnngggttgtttggttgcggtttttngtnnnnnnntcagcaggtcatctttaatgcagaggaggagatgggatgtcactcgctgtctggaggcacgtgggtggtgtgcgggccctcactggccagcctctgggtggccccgcctatcccagtatgaacgtagccaactcaagccctctactgtgtctcctcgaggctgatactcacagcccacgaagcctttgtagccttcatcttccagcagttgaaacagataggggaaattcagctctccggggctgctgggctcccctcggcctgggacctgtgccacctgcacatgcccaacaatgggcaggaactcccggatgtttcctgtcaggttcccatccatgatctgccagtgggaata

SEQ ID NO: 264145 - DNA, 439 bp, Homo Sapiens
ggggccctggtcgcgtgtcttccgaactctgctgcttcgccccggcaagagcacttccttccgcggctgctaaaactggtgcgcgggttcccaacttcgcagaagcagcttcatcggccccccgctagagacctcagaccgcagccatcgacgcctcgcctcggggatctgtccccaccctcggggccagctcaccatgagtcaggccctgtgctaggtgctgggatgaagcagtgactgacacaggcctgggacctgtccttgggaagagtgcgtctgtgacacagatactgtgccatgtggcaaaacttgaatgggagacatcagctctttgtggggtcttcaagtctactgggcttttcaatcagctctttcttgctttgacagctggcaggtcttggggattgcccagcccccataaaccctgtggagtggcatt

SEQ ID NO: 264146 - DNA, 925 bp, Homo Sapiens
tctcaaacacaaacccacagtaagcttaggtgaaacaagtctttcttccggcgggggagcccttcaaaggaagggcctcttttctaaggtgttttcccccaaccaattgggcaatggtaaacccgtcggtttctcccgtgcaattgtcaaccaaccattaacctagcgtccgttcatacgtgcacggacattgttgtccaaccctctgcgaaccaagggggcaaggcaaaggcactaatagggcccagttacacaaatgagttggcccacaactgatgtccccgaatgttgtccgttaacctgtttcttacgcctatctttccctttacagtgcccttctctcagcttcccaggccaaacagtagcctaacctcctagagacagtgatgtcttgcccccacccttgcctggttccttgttcttcacttgccgccttttccgaagtctccagggggcctggagcatggacagtgtgggcgatctccctaccctgcctccttttttcttaaagcaaagtcacttctccatcacaaccagatttgaggctggttttgatggctgggtccttgggcctggccagtcttcctcttagcctctggatctagaagggaccataagaggagtaggccctggttcctgctgtcctggtggcctggcccagcaggggccctcactcttgaagtccaggactgggtctgacctggtgggagcacctgccagaggatgctctttcccaggacggatgggccctgtgtctcaggagtggggttgggggacagccttcagcagcagctcacaccctaccttccccagacttgcactggggtgggatttggagtgatgggaaggtttttaagggccggggatggatcttttctaaatgttattacttgtaaataaagtctatttttctcccgtgaaatct

SEQ ID NO: 264147 - DNA, 556 bp, Homo Sapiens
  misc_feature (405)..(445): n is a, c, g, or t
taaaaaataaaagacagaaagcaaggggtgcctaaatctagacttggggtccacaccgggcagcggggttgcaacccagcacctggtaggctccatttcttcccaagcccgagcagagggtcatgcgggccccacaggagaagcggccagggcccccggggggcaccacctgtggacagccctcctgtccccaagctttcaggcaggcactgaaacgcaccgaacttccacgctctgctggtcagtggcggctgtcccctccccagcccagccgcccagccacatgtgtctgcctgacccgtacacaccaggggttccggggttgggagctgaaccatccccacctcagggttatatttccctctccccttccctccccgccaagagctctgccaggggcgggcnnnnnnnnnnnnnnnnnnnnnnnnnnnnnnnnnnnnnnnnncaaaccacctctacatattatggaaagaaaatatttttgtcgattcttattcttttataattatgcgtggaagaagtagacacattaaacgattccagttggaaacatgaa

SEQ ID NO: 264148 - DNA, 679 bp, Homo Sapiens
gtaaaccgtcgcaatcatcctttatacaagaacacaagagtcccgtgtttgtgacaagagagaggaagcttctcattatgcttatttgtttgcaattgtcgctctttttaagacaccaagaaagtgtctctaattttgtttgcactgcccaaccccgagtaatgctgctccctgacagaaacacacacacagccacagttgccaaatcccgtactcctgtcgcaccggcttcctagagcagcgtagacagctggtaaactgaagagcacaactatattcttatgaaggaatttgtacctttggggtattattttgtggcccgtgaccctcgttattgttacagctgagtgtatgtttttgttctgtggagaatgctatctggcattatggtaatatattattttaggtaatatttgtactttaacatgttgcataatatatgcttatgtagctttccaggactaacagataaatgtgtaatgaacaaagatatgttgtatgagtcgtcgtttctgtcagatttgtattgtttccaagggaaaagcttgggggaggactcagttcacaaaatgcaaaactcaacgatcagattcacggacccagagcttttccatgtgtttatattgtaaatatttttgatttcatcgaaattatttattcattaaaagaaatttttgtg

SEQ ID NO: 264149 - DNA, 419 bp, Homo Sapiens
  misc_feature (36)..(36): n is a, c, g, or t
  misc_feature (45)..(45): n is a, c, g, or t
  misc_feature (57)..(57): n is a, c, g, or t
  misc_feature (211)..(239): n is a, c, g, or t
cccagaagcatgctgctgaattatcaacgaggattnccaagttancttttaaatacnggttattatttaattttatacccctttgttgttttctagtacacagagatatagagatacacatgcttttttcccacccaaaattgtgacaacattatgtgaatgttttattattttttaaaataaacatttgatataattgtcaattaactgnnnnnnnnnnnnnnnnnnnnnnnnnnnnnccttggtcggccgccttcggccccttgagaaagctttctaagaaccattccttttgggccgccccggcccccaggaagggtaaagtggaaacatggggccaaaaacctggttttcccctagggggaatccccgggggcccagggaacctaaggggctttgggaaattttttccccccaat

SEQ ID NO: 264150 - DNA, 901 bp, Homo Sapiens
  misc_feature (56)..(56): n is a, c, g, or t
  misc_feature (71)..(71): n is a, c, g, or t
  misc_feature (137)..(137): n is a, c, g, or t
  misc_feature (362)..(482): n is a, c, g, or t
  misc_feature (614)..(623): n is a, c, g, or t
cctctgccccaattgagatggaggacgctaagagaaaagtgctgagtgtccccganagagcccccgaagcnagtgcatgggaaggccctcggccctggctaagctgggctgcaggatgccccactttgaggaggganggcacagggcttgggcgaggggcagaggccatcagaactgcccggcttttttggaaactgaggacccaacaactaaccacgtttacacgacttgagttttgaaccccgattaatgtctgtacgtcacctttcctagttctgaccctgagccctggggaacaggaaagcgtggctggcctcttgcactgctttgtctccaaaataaactactgaaatcaaaccgcnnnnnnnnnnnnnnnnnnnnnnnnnnnnnnnnnnnnnnnnnnnnnnnnnnnnnnnnnnnnnnnnnnnnnnnnnnnnnnnnnnnnnnnnnnnnnnnnnnnnnnnnnnnnnnnnnnnnnnnnntttggggcccccctcgccccccaaaaattttttaaaccctttctttggcgccggggccccaaaaggaagaggaactgggccaaactttttccaaagaaaacccgggcaaagacaagggttgggttccccccnnnnnnnnnnccccggggggaaacggatgttttgaaaaaatcccaagggggttttggggggcttacgggattttttcacggggagtcccaggcgggcttcaaattaaatttcccccccggcccgtgcattctattgggaaaaggggtggaaattctttaagccctccttgcgcgctggggagcccttcccaaccgggtttgtgagaaccttgaaatcccgccagcggttaaaacacccgttgcccccctgtgggaaaaaatttttgccccgggggaaaaaaggggggc

SEQ ID NO: 264151 - DNA, 679 bp, Homo Sapiens
aacaagaagaaaaaaaccattggttcaccaaaaaggattcagagtcctttgaataacaagctgcttaacagtcctgcaaaaactctgccaggggcctgtggcagtccccagaagttaattgatgggtttctaaaacatgaaggacctcctgcagagaaacccctggaagaactctctgcttctacttcaggtgtgccaggcctttctagtttgcagtctgacccagctggctgtgtgagacctccagcacccaatctagctggagctgttgaattcaatgatgtgaagaccttgctcagagaatggataactacaatttcaggttggcttggcctgtgttaagatggcccaaggctgagatgtagtcgtctcatgatttgagaacataaacagactaaactatgcagatttaacccatttctctaactctgataagcttaaagcagctacccccaaatcttttaaattctgggacttgctttgaaaagtaacaaagcccattcctttgatagctgttagtgacatagttgtagaaatgcagttttcctttatccatgcagatctctgactttctccttcaaaaagactggtcctcatttgaagtttttcccccttcctagatccaatggaagaagacattctccaagttgtgaaatactgtactgatctaatagaagaa

SEQ ID NO: 264152 - DNA, 1271 bp, Homo Sapiens
  misc_feature (793)..(804): n is a, c, g, or t
gggttttgttttttaaatactttagggtccctgatttgtgggaacagaccttcttgtaaataacccactatttgagttgtggcaggaggatgataaagcacgcggcccctcccaaaggagcccttgagctagggaggtggtgcagtcagcctcgctctcaacgtgacccggggaatgaccacccagagggatgagctagcctgtagaggggaactggggtccaaaggtctttggggagggaggcagagctggctggctcagctaagtggcacgatgacgcatgaaggagattatgttgtgctctttattgccaaaaataaacacttttagaaagacgaggaagaacatgccgccgcagccacgccagcccgacggacaccgacaacaccgaaaacagtaaaaaacacctgtttgcgagcagacccccccaagagacaagcgcgcgcccttgtgggcgcgccccggccccctcaaagaaagtttttccgaacccttctcttgggggccggcgggccccctgaggttaaaggcgaagcgggggcctagaccggtttctctaggggaaatatccgccgcttaggcatacgtgcgtgggaattctcccaccaagaaaaacaaccccccggggggggacaccgcggagggcgttttacaacaacactgcgcagaggggcggggccccgggcggcccttacgcggggcgctactacgcagcgaggggtgccccaccggccgggctcaagaaccgaaatttagcgccccgccggccggtggccccatatagaggagggannnnnnnnnnnnaagccccattacaacctgctgttcgcccgcgcgcgtgaggatgccctacccacagaggcgggggagggaagcgaaccgcttacagccaaccgacggcgccacccccggcgcacccccgttgccgcccatgctgcgagcatgagagtacttagggcaccgcgcgggcggccgccagacgcgggggggcgagacaaaccagctcgggcctgatttttgtgcgccaccggtgcaagaacaccagaagatggcgggcagcacatccccctccccccgtgaggtttcgggccgcgagccggcctagctgcgtcgtctgtcccttccgagaaacccccctttctgggaggcccacaatgcgccgcagagtgtttttcgcccggcataaacaccttctcgcccattgtatccgcgcaaaaaagattcggtgcgaaagaaaatacgtgctcacaatctatactcgttccgtggcg

SEQ ID NO: 264153 - DNA, 1132 bp, Homo Sapiens
  misc_feature (22)..(22): n is a, c, g, or t
  misc_feature (36)..(36): n is a, c, g, or t
  misc_feature (184)..(184): n is a, c, g, or t
  misc_feature (573)..(582): n is a, c, g, or t
  misc_feature (739)..(786): n is a, c, g, or t
  misc_feature (1099)..(1099): n is a, c, g, or t
  misc_feature (1105)..(1105): n is a, c, g, or t
  misc_feature (1112)..(1112): n is a, c, g, or t
cggcgcggctccatatgtttcntctctctatataanaaggggtgatcttatgtgtagagagaatatagtagtgtgtttgtgtgtgtttgccacagggcgcgatactcccctcgggtggtgggagtgtatctcttcacagcacacgtcgtgtgtatagtattataatagaggtgtgtgggcccanaataaagtcggagaacgaatgtctgtgtgtacggcgccccgccggtttgtttctctcgcacgtggggcgaaatatatgtttatttgtccgccaagggcgacacaaatggtgttcttatattcctccccccgggcgaatttcaaaggtttattccaaacccgcgtttggtgggggggcgtcttcccacgttccgggcagaaaatcgcttttatttaatatttacaccacctctatttcccatatgaatgggccaacggccgggggggcttaaatttttatattcgaagcctccccttgggcacccccgtttgataaaatcccggtaatgaccctccgaaactcccatcgggaatttgtttcaaaaaagcttgggtttcccccgggggggnnnnnnnnnngggggaaatcccaagcccttttttcatggcccaggatttcttttagggaaccagcttatggcccaagtttcccttttccttttggggcgccccgccgccccaacagaaaggtgtttagaaaaatgttttgagggggcggaggcggccgaccaaggcnnnnnnnnnnnnnnnnnnnnnnnnnnnnnnnnnnnnnnnnnnnnnnnncctggttgtggtttggttgtttggttgttcctgaatctgctttatttctctgcataaggaaccctgaacaggcaattcaaattaaaacaaaataaatatatgaatattcatgtaaaactgtcctttctaatgaacaattatacacaatgtacaatttcatgttcactgggtggatttacaaaaatgtaccattcccaactaaaaatgcaccaaaatggtttcatgcaaacttatcaaaagtgaccaaaaatatggagggaaaaacctgactgagagcacttcgtttttgttgtttttgtacaatcacaaaaanaaaaancatctantttctttgttacatttgggg

SEQ ID NO: 264154 - DNA, 537 bp, Homo Sapiens
gcatcccccacacacgcctatgcacaaacgtggattatcgcacagactgggaggtttagtggtgcatttctcctctgttttctttttaatatacatttaaaatacagtattatcactttataaaacatacattaagcctaataaatggaccaataagccaaactatcagtattttgtatatcctgcataaactctaatttagttcctcaacatattttcagtgtttatgcagacctttagagttaagcctttgtatttccatgttattccacaatatgcaatatttctctgagtagcttctgctatgatattcttatgaagaaaaggggcaactttctgtccactataggagagaattcagccgaagatatgagagtaatgagagacattttccagtcattggatcgtgttttcttttgtccattattgtactgtgctgtaccacatttatttctatattcattttgtaaaaaatttaaaagtgctattttgtttgtatttgaaaatctctgtaaataaattctctctttgatcaat

SEQ ID NO: 264155 - DNA, 775 bp, Homo Sapiens
  misc_feature (529)..(529): n is a, c, g, or t
  misc_feature (531)..(531): n is a, c, g, or t
  misc_feature (545)..(545): n is a, c, g, or t
  misc_feature (551)..(551): n is a, c, g, or t
  misc_feature (566)..(566): n is a, c, g, or t
  misc_feature (589)..(589): n is a, c, g, or t
  misc_feature (749)..(749): n is a, c, g, or t
  misc_feature (751)..(751): n is a, c, g, or t
cggggtctcgttgctgggcgagggcgtggccccgtcctcggccttgggcgaagaagtcgaggaggcggccgacgcggcctctccctccgcggccgtgggcgagccgggctcggcagcctcgccttccgcgggggcctccttctctaccgggctggccccggcctcgggggcagcggcggcggccggctcacctttctcggccgcggagggcgacgccgccccgctcccggcggccgcgggctcctccttgtcggcggccggggcgctgccgttggcctgcagctcctccttggcgcccgactcggcggccgcgggcgaagcgtcgccgtttaccttcacgtggccattctcctgtccgttcgctttggaaggcgacgaggccacagccgcctccccaggcctctccgcggcggcttctcccttcgctgcgggcttggagaactgggcacccatgctggcttcttcaacaaagaaactcaacagatccaagaggggaaacaaagagcctcgggttggtgtaacgacgggncnagcagcagcagcancggcgncggcaacagcggcancggcacacacaccggagggaggngggtgggggaggtggagaggacagaacagaaccgattaaatacactccggataaaaaaattttagtcgaagagatcaaaaagcagcagcacaggagggagggaaaaagggtggaaaagtcgagcacaaaaaaaggagcccaagtgtagttcgaaaaaaananaagtaataaaaaaatcccagattt

SEQ ID NO: 264156 - DNA, 342 bp, Homo Sapiens
gatcagatggactcagatgatcacagatgtcttcacatgcctatgactaatttgtacacaaactaatgctcgtgtttcccaagcacctggaagacatgccagatccatgtgcagtaatgcctggtggctccaggtctgccccgccgtcctgtggggctgtgagctttcccagcctcctgcccgtgtttgtgaatatcattctgtcctcagctgcatttccagcccaggctgtttggcgctgcccaggaatggcatcaattcccctgtttctcttgtagccagttactagaataaaatcatctactttacccacgaaaataaacggcgcaaaaacgaacctgt

SEQ ID NO: 264157 - DNA, 646 bp, Homo Sapiens; identical to SEQ ID NO: 177649
  misc_feature (383)..(383): n is a, c, g, or t
  misc_feature (385)..(385): n is a, c, g, or t
  misc_feature (387)..(406): n is a, c, g, or t
  misc_feature (417)..(501): n is a, c, g, or t
  misc_feature (511)..(523): n is a, c, g, or t

SEQ ID NO: 264158 - DNA, 1510 bp, Homo Sapiens
  misc_feature (21)..(21): n is a, c, g, or t
  misc_feature (37)..(37): n is a, c, g, or t
  misc_feature (143)..(143): n is a, c, g, or t
  misc_feature (670)..(670): n is a, c, g, or t
  misc_feature (771)..(771): n is a, c, g, or t
  misc_feature (964)..(964): n is a, c, g, or t
  misc_feature (1079)..(1079): n is a, c, g, or t
  misc_feature (1135)..(1135): n is a, c, g, or t
  misc_feature (1148)..(1148): n is a, c, g, or t
  misc_feature (1168)..(1168): n is a, c, g, or t
  misc_feature (1346)..(1346): n is a, c, g, or t
  misc_feature (1389)..(1390): n is a, c, g, or t
  misc_feature (1423)..(1423): n is a, c, g, or t
  misc_feature (1430)..(1430): n is a, c, g, or t
  misc_feature (1440)..(1440): n is a, c, g, or t
  misc_feature (1450)..(1450): n is a, c, g, or t
  misc_feature (1462)..(1462): n is a, c, g, or t
tgtgtttgctttggaagaagntgggcactgtgttaanttgacagttgtgggctcatgtaagtcttttttgccatgagtagggaaccctagtggggctggtggacagctttggaagaggtgtcctgctgctggtaccagccatngtgggccccataggggcactgcgcctgctgcccttccctgccagggctggtggagtcttccctcaaagcatgccttacccagctgggaagtctctgccctgatctggtactccttgtagtaagctgctttctgctcagccactgggctctttcacttttctaggtctgtagaattgcatttttgaagttctgaaagagaatacagaataacgttcttggaatttatgtcttttgctgaaataaattgcccttgggtcaggcgcgaccgcgcctgcccacccccgcgcacccccccgggggcccatccgtgcgcgtacggcgcacggtccagccgtcgcagggagggtggaaacgcgccgcggggcgggcccgcttgggggcccccccgcaaaaccgctccccctaagcagagtgttggggtcggcgcgcgggtgggggggccacggagaatccgcaacggcacaagcccggggggcctggagccggtggttttgctccgcggaggaaagcccgcgcgtgccgcacgnggacggcataggcccgcgtcctgcgggtggaccccctccccgccaaagtgacgcaggagaatatctccgctccgtcgagggggcgatacaaacgcgccgancaagtgcggtgtgcgacggcggaaggcaggaatatggactccgccggcggcgagggagaggatgctggctctgcctgaggcacagactagggtcgacactccactgccctctgccggcggaagggacggagcgccgaccctcggcccaacgagaatgcggtgccgtaatgcgccctcccccgcgcgccccctnatacgaacgcaccgggccgcttgcgcataagacccgtgcagccgacggcatttattatggtcccgccacccgccccgcgcctgcttggtcgtgagagcgcgggttgggaagtctncggacgaccggcccgggcgcgtcaacgcgcgggggtgtcgcgcgttccggcgcctnggcggcaggcgtngggtatcggggtgacggagnccggcgcagccgtcaggcgcctacggggcggggacaatacgcggattgggtgggtagtgataatggcgtagtgcggtcagccgcgagacgagggcgcgggagtatatttggtaacctgcgtgtttatagaccccggcggactcgctgtgcgcttgcgccgcatcgtgtcggcagggancgcgctgaggcagcgcgcagcgcgggcttgtggcggattacannacaatccatgcgtctttctgtgctggtgggttngctagcncgccgccgcncaccgcgtcnggcctgaacgtnaccgtcgataaggcgagatgattgataagtgcgtgcctgtcgcattcc

SEQ ID NO: 264159 - DNA, 363 bp, Homo Sapiens
  misc_feature (13)..(13): n is a, c, g, or t
  misc_feature (37)..(37): n is a, c, g, or t
  misc_feature (58)..(58): n is a, c, g, or t
  misc_feature (61)..(61): n is a, c, g, or t
  misc_feature (69)..(69): n is a, c, g, or t
  misc_feature (80)..(80): n is a, c, g, or t
  misc_feature (99)..(99): n is a, c, g, or t
tggggaaaacccnagggaaccctactgcaaaaagatngtcccaaaagcccaagaaaanacncctctgangcatttagccntcaaccctacctgtcttgnctgaagggagaaaaatgttttagtacattataggcccagcagcttttattcatgtccaccagctagttgcacagagaatcatgtgtacctaactaaggatgatctaggataagtaactcctgttttatattgagtattttagggaagtctttaaaagacttgttttatatctataaatctaggttattacaaatacaagaattttgtaccttaaataagcctcatttctatttcttcttcattaattctccatctagtcttgcg

SEQ ID NO: 264160 - DNA, 410 bp, Homo Sapiens
  misc_feature (36)..(36): n is a, c, g, or t
  misc_feature (94)..(94): n is a, c, g, or t
  misc_feature (142)..(142): n is a, c, g, or t
ctacaaccaccaccaccaaaaaacccccgtggggcnccctgaattgagaattgccattggaatttataataaaactgttgggagaattgaccanccttaataatattgaagtccttctggccctataaacaaggtctgtctnccctaggtattaatgttttgtcttctatttctcttaataatcttttgtagttttcagtgtacaggtctaccatgtcagcatttcatagttttgatgctaaatggtattttaaaatttcaaattctaaccacttgttgctagtaaatagaaatacaattgatgttgaacttgtatccttcagccttgctaaactgtgagttctcatggtgtttttgtaaattacatcaacagtcatgtgttctatgaataaagagttttactccttcca

SEQ ID NO: 264161 - DNA, 965 bp, Homo Sapiens
  misc_feature (242)..(274): n is a, c, g, or t
  misc_feature (502)..(625): n is a, c, g, or t
  misc_feature (631)..(647): n is a, c, g, or t
  misc_feature (654)..(672): n is a, c, g, or t
  misc_feature (686)..(766): n is a, c, g, or t
  misc_feature (867)..(877): n is a, c, g, or t
ggtacggtccggaatcctcgggatatcgtcgacccacgcgtccggggaaaaactgggtgtactcccacgacggcgtgtccctccatgagctgctggccgcagagctcactaaagccttaaaaaccaaactggacttgtcttccttggcctattccggaaaagatgcttgatgcccagccccgttttaaggacattaaaagctatcaggccaagaccccagcttcattatgcagctgaggtcnnnnnnnnnnnnnnnnnnnnnnnnnnnnnnnnnattcctgcttttgaggacagttgggctatgtgtcacagctctgtagaaagaatgtgttgcctcctaccttgcccccaagttctgatttttaatttctatggaagattttttggattgtcggatttcctccctcacatgataccccttatcttttataatgtcttatgcctatacctgaatataacaacctttaaaaaagcaaaataataagaaggaaaaattccaggnnnnnnnnnnnnnnnnnnnnnnnnnnnnnnnnnnnnnnnnnnnnnnnnnnnnnnnnnnnnnnnnnnnnnnnnnnnnnnnnnnnnnnnnnnnnnnnnnnnnnnnnnnnnnnnnnnnnnnnnnnnntttggnnnnnnnnnnnnnnnnnaaaaaannnnnnnnnnnnnnnnnnngggccccgggcccnnnnnnnnnnnnnnnnnnnnnnnnnnnnnnnnnnnnnnnnnnnnnnnnnnnnnnnnnnnnnnnnnnnnnnnnnnnnnnnnncccccgggggaaaccgagggttttaaaaaaatccaaagggggtttggggggctttttgggattttttaaagggggcccaagcgggttctaatttaaattannnnnnnnnnntgcccttttgggagagtgggtggaattttttaaaattttccgcccaagtggggacccctccccaacggggtttgtgagactttatacc

SEQ ID NO: 264162 - DNA, 525 bp, Homo Sapiens
aaccaacgtggcctcaaccagatttggaatgtcaaaaagcagagtgtctatttgatgaatttgaggaaatctggaactttgggccacccaggctctctagatgagaccacctatgaaagactagcagaggaaacgctggactctttagcagagttttttgaagaccttgcagacaagccatacacgtttgaggactatgatgtctcctttgggagtggtgtcttaactgtcaaactgggtgggagatctaggaacctatgtgatcaacaagcagacgccaaacaagcaaatctggctatcttctccatccagtggacctgaagcgttatgactggactgggaaaaactgggtgtactcccacgacggcgtgtccctccatgagctgctggccgcagagctcactaaagccttaaaaaccaaactggacttgtcttccttggcctattccggaaaagatgcttgatgcccagccccgttttaaggacattaaaagctatcaggccaagaccccagcttcattatgc

SEQ ID NO: 264163 - DNA, 381 bp, Homo Sapiens
  misc_feature (225)..(225): n is a, c, g, or t
  misc_feature (261)..(261): n is a, c, g, or t
  misc_feature (288)..(288): n is a, c, g, or t
  misc_feature (312)..(312): n is a, c, g, or t
  misc_feature (323)..(323): n is a, c, g, or t
attgttctattgctactcttaaatgtagagaggaaggccaaaggttgtagtgaagattgtagtgaagactctcttcaatttgagtttgaagctacccaaattatcattataatggtttggttttagagctcaatcctatacatacttatacaaaaacaaagtaatttatttgcttattattgcattttatagaacccgggcaaagatattacaagaatgtaaaantacaggccaatttctttcattaacatagatgagacncaaaatctaaacaatacgttatcaaantaaatccagtattgcatacaacanataataatggngtatttcagcaagttgtgggtaacaaattgaaggtaaatcaatgtactaaggccacat

SEQ ID NO: 264164 - DNA, 1234 bp, Homo Sapiens
  misc_feature (583)..(584): n is a, c, g, or t
  misc_feature (586)..(593): n is a, c, g, or t
  misc_feature (595)..(597): n is a, c, g, or t
  misc_feature (600)..(601): n is a, c, g, or t
  misc_feature (786)..(798): n is a, c, g, or t
  misc_feature (808)..(816): n is a, c, g, or t
  misc_feature (1032)..(1040): n is a, c, g, or t
gagcaggctggtaacggtccggaatctcgggatatcgtcgaccacgcgtccgcgacaggagggatgcgcgcctgggtgtagttgtgggggaggaagtggctagctcagggcttcaggggacagacagggagagatgactgagttagatgagactagggggcgggctgggggtgcgagaaggaagcttggcaaggagactaggtctagggggaccacagtggggcaggctgcatggaaaatatccgcagggtcccccaggcagaacagccacgctccaggccaggctgtccctactgcctggtggagggggaacttgacctctgggagggcgccgctcttgcatagctgagcgagcccgggtgcgctggtctgtgtggaaggaggaaggcagggagaggtagaaggggtggaggagtcaggaggaataggccgcagcagccctggaaatgatcaggaaggcaggcagtgggtgcagggctgcaggagggccgggagggctaatcttcaacttgtccatgccagcagcccctttttttccagaccaagggcttgtgaacccgcctggggatgaggcctggcaaanncnnnnnnnncnnnccnncaccaaaaacatggtcggccgccctcggcccctcgaggaagccttcctaaacccattccgtttggccgcgccgggcccccacgtagggtaaagtggaaacatgggttcataagcctggttttccctagggaagaacccctggggccatggaactaagagggccttggggaattccccccaccccnnnnnnnnnnnnnccgcgccccnnnnnnnnncaaaccccgaagggggtttccttgaaaccacaaattccccaggaattgggggatgttcccttggaggggcgcccttttatacctggggaaattcccaatccccacaaccgggggagaggttccccaaagcggcaggagcctccctcataatatatcaaaattttaacggcccccccgccgcccctgggccaccttttcattttgaaaagaaaactnnnnnnnnnaatattcctccattaaagacaatttttcttcgcccgaacattggtgaaaacaccccctctccaccaaccggggggattggagagagaaaccccgtgaatccccgcccccgcgggcaatttaaccccccttgtggcgcgcccctggtgcggaaataaatatttttccccccgggggggagaaacacggggcggac

SEQ ID NO: 264165 - DNA, 400 bp, Homo Sapiens
  misc_feature (40)..(40): n is a, c, g, or t
  misc_feature (56)..(56): n is a, c, g, or t
  misc_feature (111)..(111): n is a, c, g, or t
  misc_feature (148)..(148): n is a, c, g, or t
  misc_feature (396)..(396): n is a, c, g, or t
  misc_feature (400)..(400): n is a, c, g, or t
ccctgaagcccccctatgccctgtacccccagtgcagggnaagagtttcccccaancccccagggggaattgtattccctgcatggcaaaattccccacacaggagagacncccccttctgtgcgggcccagtgtggaaaaagcttcncccccagagagggagtctggctgtgcaccagcgaagctgctcacagaggctcaccctttgacccactttccctgaagagaagttctctttatgaattaagagtacaaaatcctctgagatgaagcaacctatccagttctatggaatgaatggagaatctttcagaaagaccatcattgggtagggcaaactgatttttttcctttcccccaaaagagtatgaaaaataaatgtcttgtttattatcnttan

SEQ ID NO: 264166 - DNA, 1086 bp, Homo Sapiens
  misc_feature (62)..(62): n is a, c, g, or t
  misc_feature (111)..(111): n is a, c, g, or t
  misc_feature (133)..(133): n is a, c, g, or t
  misc_feature (882)..(893): n is a, c, g, or t
cgaagaactcaatgcctctcagctccaggccttactaagcattgccctggagcctgccaggnccatacctccacccccagagagatcgggctcaggacctgtgagcagctnctgcagtgtttcgggcatgggnaaagctggccttacaccacttccagcagctctggggctacctcctggagtggcaggccatattcaacaagttcgatgaggacacctctggaaccatgaactcctacgagctgaggctggcactgaatgcagcaggcttccacctgaacaaccagctgacccagaccctcaccagccgctaccgggatagccgtctgcgtgtggacttcgagcggttcgtgtcctgtgtggcccacctcacctgcatcttctgccactgcagccagcacctggatgggggtgagggggtcatctgcctgacccacagacagtggatggaggtggccaccttctcctaggatctccggatgggcgcacctgctgctcagggcagggttgctgagcaagaccacctccctaggccttgcctggcatgggtgccactctctctggcatccacctgtctggggctagtctctggccctcactgctcacggccgggtgaccactctggcctgcgtactcctcactcagaaacaagaacagcgacagcccttctcgagcagatgacacgagctagtccacgttgacagcttaagacagtgctagctctgccctggctctcctagaaggtggaggacagacacaggagaaataaaaaaagatgatgctgcaggaatccttcttaaaaatattacatgttttattatcctgtccccagagggtggtttatccagaaaccaagaaaaaaaatcaatcagaataaactcnnnnnnnnnnnnggcagggggagcaaaaccatcaaccaccaggcagccaggccatcagcccacctccacctctggagggtccccagagacccacgcccgacgcagacccggaggagcatcagcaaggggcccgggcagagaatcggctatgtcttcattatgagagcaggagagacggcagagatatgttgctaggtgaatatcc

SEQ ID NO: 264167 - DNA, 1350 bp, Homo Sapiens
  misc_feature (56)..(189): n is a, c, g, or t
  misc_feature (199)..(221): n is a, c, g, or t
  misc_feature (413)..(421): n is a, c, g, or t
ccccgccccaaaaaaaggtttgaaaaaattttttgggggggggggggcgcccaaannnnnnnnnnnnnnnnnnnnnnnnnnnnnnnnnnnnnnnnnnnnnnnnnnnnnnnnnnnnnnnnnnnnnnnnnnnnnnnnnnnnnnnnnnnnnnnnnnnnnnnnnnnnnnnnnnnnnnnnnnnnnnnnnnnnnnatgtctccannnnnnnnnnnnnnnnnnnnnnnaaaaaagcaggcataaaatacaattacattactacgaagatgcaacaaaattttaaaaaagaaaaaggggtgcaatttttttcagagaggacagctgatcaaatatttataattttctaaaccatgcagttcattacttattacaattccaaacaaaactcattattatggggatgggagtcagggagaggnnnnnnnnnaagcatgatatccagcgctgtcacacagtgcttatgttcaaagtgcttacaaatggtgtcttcacagcatagggaagctgaagccttattcccagggaaggagaggtgagtccagtagcagtgtcaatgccagactcagaagctcggcagtgacttgctcaaatcagattttagacacgatttaaagcatgtttcagtaaggttaatatagtgtccgagtttctctactttaccaccagaatcctagaagagagtaacagcagcagcataacttcttaaaactgtggtgtggcaacctagagtatttctgtttaagatctatatataaatggatgcaaaatagatactttagagccagattcatgtaactctaacacaggttagttttaaaggcactaacctttactttggctttactggtatgcttatccattagttagctggaacattttaaaactttcatatagatttttaaaacttgtttctagagaacatggttttttaaaattaatactttaaaaacattcactgtacattaatttcaacagtaataccggcaccagttttcctttcacttctgtctcgttatccccacaaaacaaaagtaaaaaatccaataagaaaatcccagtattcatgatttcttagttccccataggaggtatttatggttctaggagaaatcaggtgtgaaggaacaagcaaattttagtcttatatttatcttggaagcttcagggcctcaagaaaaatgagaaacgagcacaaaatcaggttgttttatatttaataagtgttgggaagaaaacacattgataggtgcatgcactcatgtatgtacatgaaagcggcaatgcggtaaaaagcgaattcttacccaaggtcagaattttttattaagcgcattttcattagttggacaaacaacc

SEQ ID NO: 264168 - DNA, 1059 bp, Homo Sapiens
  misc_feature (1006)..(1006): n is a, c, g, or t
  misc_feature (1037)..(1037): n is a, c, g, or t
gtctcatcgtcggctcctttgaaagggtaagtttttttctcccggtgaaacacgccatcacccgttgtttttaaggtactccaaaaaggtttccaggagtctcttctaataagcggggggggaaatatcttcccccccctttagaggggtcccataggcaattcgaaacgctggacaaaatattgtctgaaaatggatgtcccctatagcccaaaatataaggcgccattaaagaaaaatgactatgagtttatatgcacagttaaagtatgttctgaaagctgccggaattctttcaaaaatttcaatatactataaacttccaaagtggtttgtatcgctgattcctactcttttgctagatcacaccaagattacttcctaagttgagaacaacttggaacaagctttactgaaaaccaactgactactgatgtctcatgttggtgtatttaaaattctttttgaatcttgaatttcttcaagatcgggtactgatgttccttcaggaataaaacaaaaggggggaaatcttcaaagcattactctgaatttcttgtgtaatgtccttccaagcactgtttctgaccatgtctcatgtggtattccagaagagcatcagttatactgtgtatctaagtcattgaggaaactgtttttaagctggtttagattccaaatgtatacaaatgaagtcactttaatcctataaatacttcttaatttatttttaaaaaattgtgctgttaacccttttacggggcaacaagctatgtgaaaagtacaaaactttttgtcaaatgtaatattgagagtgcttttgacatagttcactggtttatcatctggatcagtatatactgcgcaacgggcaaggctagaatccatgaaccaagctcgcaaagatctcaagctaaataaggcggaaagatttggagaaacaaaagaaggaaattctttcctatccaatgtatactcttcaggactaatgcactctttctatcangccttctaaactgttaaataaaggttttccnaacaggcattttaaacttcatt

SEQ ID NO: 264169 - DNA, 336 bp, Homo Sapiens
ggattggttatcacttttctgtaacgcctgcttgtccctgcccagaattcccagctgtctgtgtcagcctgtccccctgagatcagagtcctacagtggctgtcacgcagccaccaggtcatctcctttcatccccaccccaaggcgctggctgtgactctgcttcctgcactgacccagagcctctgcctgtgcatggccagctgcgtctactcaggtcccaaggggtttctgtttctattctttcctcagactgctcaagagaagcacatgaaaaacattacctgactttagagcttttttacataattaaacatgatcctgagttatccgaaa

SEQ ID NO: 264170 - DNA, 413 bp, Homo Sapiens
atacttgcattttatttcaggccaaagcccctccactctgaactaaatgccatgacagtcccacagcataggctggttagtaaaagagcccacagacagggtaggatagccagaggagggaggagtgggcgacagggaggggaaggatcacacacacaaacctaagagtagagcaatgcagaatgcctgtggacttcggctcctaccagctctggctctcagtggagatgaagaatgggcagcaggaggacagaatgcctcattgtctgaaggagagcgtgttgtttctcatctccatccccagaggccctctctttcagggcagggcaggaaacaaaggcccttggcaccccactggcacttgcggcaacacaggcaggaggacgttgggtggccggaaccctgggggaggg

SEQ ID NO: 264171 - DNA, 955 bp, Homo Sapiens
agtttctgcaggtcatttgtatgtaggaccaggagtatctcctcaggtgaccagttttggggacccgtatgtggcaaattctaagctgccatattgaacatcatcccactgggagtggttatgttgtatccccatcttggctggcttcagtttttgctgtagccctagagcactttgtttgtgggaggctggcctcttgcctacctccttgcatggacagggggatgaatatttactttcccacctccttgctttttctttcactgataccactgaatggaactggtgctgtgactcctgctgctggggatttatgtcccgagaccttagcctggctgagtggagcctgagacctgcacaacagctcatggtcatgcatgagagagaagtggctggccacagccagagggaacagtaacagcccaggggcctttattttgggaaaggctgtccggggctgttactgtctcttctggttataaagcagacatgtggccatcttttccgcagggttagagtgggctcctttctttttggaatccttttcttctcctttggtagcagctccctgcctccagggcttccgccaccagcgtctctgctgtgttgcgcagtgcagtggggtgcaagggctttgtttctgcctgcctgaaagagagggctctggggatggagatgagaaacaacacgctctccttcagacaatgaggcattctgtcctcctgctgccattcttcatctccactgagagccagagctggtaggagccgagtgccacaggatttctgcattgctctactcttaggtttgtgtgtgtgatccttcccctccctgttcgcccactcctccctcctctggctattcctaaccctgttctgtggggctcttttaattaaccagcctatggttgtggggaattgttcatgggcatttagttcagagttggagggggttt

SEQ ID NO: 264172 - DNA, 467 bp, Homo Sapiens
  misc_feature (15)..(15): n is a, c, g, or t
  misc_feature (42)..(42): n is a, c, g, or t
  misc_feature (89)..(89): n is a, c, g, or t
acgcagggttagaantgggctccttccttttgggaacctttncttctcctttggtaagaagctccctgcctcccaggttccgccaccancgtctctgctgtgttgcgcagtgcagtggggtgcaagggctttgtttctgcctgcctgaaagagagggctctggggatggagatgagaaacaacacgctctccttcagacaatgaggcattctgtcctcctgctgccattcttcatctccactgagagccagagctggtaggagccgagtgccacaggcattctgcattgctctactcttaggtttgtgtgtgtgatccttcccctccctgtcgcccactcctccctcctctggctatcctaccctgtctgtgggctcttttactaccagcctatgctgtgggactgtcatggcatttagttcagagtggaggggctttggcctgaaataaaatgcaagtatttaaca

SEQ ID NO: 264173 - DNA, 402 bp, Homo Sapiens
  misc_feature (198)..(198): n is a, c, g, or t
agccggcgctggggagccgggcatgggctgggatgtgtttggattccaatctgggcctgacaccagttcagtgacctcgggaagttccccaaacctgcgggcctgtttcctccctctgaagtggcgacagtaatagaaccgacctcgtaggctcatcgggaggtcctgatgggagaacccatgcaacttgccaccacnagagccaggcccgcggcgactggctcctggtgggtattaaagacgagtcgggaaagaagagcaggctcaatcaaaccttcaatggccccgaaagacatcttgattgaaacctcatgagagactctgagccagaaaacccagcaacttagaacccagatacctgaccaacaaccactgtgtgaaataataaatgtttgttgtttt

SEQ ID NO: 264174 - DNA, 447 bp, Homo Sapiens
  misc_feature (46)..(46): n is a, c, g, or t
atcagtgtttggagaaacaagaagcggaagaatgagtgcaattgtngagcagaaagggggcaggaatcccggtgctccactgcttaaaccacaggacctggttaactcctcaccaagcttcccacgaccctggttgccaatgggcgcgggagacattgtatacacatcatgctatttaaaatacgttcaaactatagtgtaaatgctaattaaccatattggtatataaccggaattttatattaaaaggggcctcctttttaaatatatgccgtgtaaaaaatgtacttataggaacatctctttgaattgtatttcttgtatattacatacttagagagagactcttttagccaggcaaagtcttttttggctgtggctggaataaatcatttattacttgggagtcccattttggacactaataataaaatcatggcaatgcaa

SEQ ID NO: 264175 - DNA, 417 bp, Homo Sapiens
  misc_feature (32)..(32): n is a, c, g, or t
  misc_feature (39)..(39): n is a, c, g, or t
gaaaaccacatggagaagtttagtaaccatantgttacnggtaccaagactactagggaaatgccctttgtacctttagggaagtacttttggcattttactgtacagacagaaaaaactgagatgtagcccctctccctggaagtgcctaattttgaaaaactgctcatatgatgtacatgtactgattactgcctattttaataaacactcttgaaaaatgcatgttgccctgttgctgcctgccctattctcctcatctccccatcattggtacccacttgcttttaaaatccactttatcttgaataatgtaagacaaatatgttctgacataagtatttaattcatgttgccttgcataatggtcagaggcgcatgaatttgtgaaggtggaaataaactatttgtaaagtg

SEQ ID NO: 264176 - DNA, 919 bp, Homo Sapiens
  misc_feature (285)..(285): n is a, c, g, or t
  misc_feature (369)..(519): n is a, c, g, or t
  misc_feature (528)..(541): n is a, c, g, or t
  misc_feature (555)..(678): n is a, c, g, or t
  misc_feature (683)..(745): n is a, c, g, or t
  misc_feature (762)..(770): n is a, c, g, or t
cgcccacgctgctgtgctggaaatgccgctttaaaaagggatacccgtgggactctgcccgtctctttcataacgcaatatttatttgtattgggtgacgattgattctttcgacctaacattttgggttttaaccaaataaccggtcccaggagtgagcagctccgttctgtcagatgctactccaaatgttaccagaacgatgacaaaaggggagacgctctattttttcacagttaaatgacagttgtagattgatacgcagttgtgcatgggaaggggaancgcacagctttatttactgtaaagtggaatttcaggaaggcttgtgtgaaccgttgcgcataaataaaccctttctaccgggcnnnnnnnnnnnnnnnnnnnnnnnnnnnnnnnnnnnnnnnnnnnnnnnnnnnnnnnnnnnnnnnnnnnnnnnnnnnnnnnnnnnnnnnnnnnnnnnnnnnnnnnnnnnnnnnnnnnnnnnnnnnnnnnnnnnnnnnnnnnnnnnnnnnnnnnttttggggnnnnnnnnnnnnnnaaaaaatttttaannnnnnnnnnnnnnnnnnnnnnnnnnnnnnnnnnnnnnnnnnnnnnnnnnnnnnnnnnnnnnnnnnnnnnnnnnnnnnnnnnnnnnnnnnnnnnnnnnnnnnnnnnnnnnnnnnnnnnnnnnnnggttnnnnnnnnnnnnnnnnnnnnnnnnnnnnnnnnnnnnnnnnnnnnnnnnnnnnnnnnnnnnnnnttttaaataaaatttannnnnnnnngggccttttttgaagaaagggggaaaatcaataaaaattccccccaaatggaaacccttccaaaggggggttgataaccttaatcccccagggaattcacaccttgggccccttgggaaaaaaatttccccccggggaaaaaagggggg

SEQ ID NO: 264177 - DNA, 484 bp, Homo Sapiens
  misc_feature (20)..(20): n is a, c, g, or t
  misc_feature (54)..(54): n is a, c, g, or t
  misc_feature (60)..(60): n is a, c, g, or t
  misc_feature (73)..(73): n is a, c, g, or t
tgtgcctgaatgggaacctncatgaaagccttgtgaaatctttagggcaggaanccttancccccattttgcnagatgaaaaaccctgagtcaacagatttctgtgggactgtggatctcactggaagctatccaagagcccactgtcaccttctagaccacatgatagggctagacagctcagttcaccatgattctcttctgtcacctctgctggcacaccagtggcaaggcccagaatggcgacctctctttagctcaatttctgggcctgaggtgctcagactgcccccaagatcaaatctctcctggctgtagtaacccagtggaatgaatttggacatgccccaatgcttctatatgctaagtgaaatctgtgtctgtaatttgttggggggtggatagggtggggtctccatctactttttgtcaccatcatctgaaatggggaaatatgtaaataaatatatcagcaaagcaaaac

SEQ ID NO: 264178 - DNA, 909 bp, Homo Sapiens
  misc_feature (103)..(237): n is a, c, g, or t
  misc_feature (243)..(243): n is a, c, g, or t
  misc_feature (246)..(296): n is a, c, g, or t
  misc_feature (819)..(836): n is a, c, g, or t
gtacacatttttatccattttacattctaaagcagtgtaagttgtatattactgtttcttatgtacaaggaacaacaataaatcatatggaaatttatatttnnnnnnnnnnnnnnnnnnnnnnnnnnnnnnnnnnnnnnnnnnnnnnnnnnnnnnnnnnnnnnnnnnnnnnnnnnnnnnnnnnnnnnnnnnnnnnnnnnnnnnnnnnnnnnnnnnnnnnnnnnnnnnnnnnnnnnncccccnccnnnnnnnnnnnnnnnnnnnnnnnnnnnnnnnnnnnnnnnnnnnnnnnnnnnacgttagcggccgggtggcccccacaagggacccgaaactcccctacaaagaattccttggggggggcccggcccccggtttccgcgaaaaaaacaaaccccccctttagaatcccccgagggctgttccccacccaccccaaagagcactccctgacggcatatatagagacacctttccgcggggtgccttctaggggggggtccaaaaacccaaacacgggtccccggggtccggccccccttcctggcttttcttttttccggaacaattgcgcaggttttccccaacaacaagttggggccccctccacgagaacccccttctaacaagaggagtgtgtactccccccccaagaccaacaatgcggggacccgttagtttatatcccctctcgccgctatttatttcccccaccttggggcgcaaacgaagaacccccaacacatgttcccccccttttcaacacacaattttggggtcccccctcttcgcggcgaaggcccggcccaaaaaaagctnnnnnnnnnnnnnnnnnnaaaataaatctcctctctacacgagaaaatatttccccgcacatatggggcggcgccgttaaacaccaataaa

SEQ ID NO: 264179 - DNA, 392 bp, Homo Sapiens
agattttcttcatgtactgtgatgtctgatgcaatgcatcctagaacaaactggccatttgctagtttactctaaagactaaacatagtcttggtgtgtgtggtcttactcatcttctagtacctttaaggacaaatcctaaggacttgggacacttgcaataaagaaattttattttaaaccccaagcctcccctggattgataatatatacacatttgtcagcatttccggtcgtggtgagaggcagctgtttgagctccaatgtgtgcagctttgaactagggctggggttgtgggtgcctcttctgaaaggtctaaccattattggataactggcttttttcttcctctttggaatgtaacaataaaaataatttttgaaacatcaac

SEQ ID NO: 264180 - DNA, 444 bp, Homo Sapiens
  misc_feature (357)..(357): n is a, c, g, or t
  misc_feature (379)..(379): n is a, c, g, or t
  misc_feature (409)..(409): n is a, c, g, or t
  misc_feature (417)..(417): n is a, c, g, or t
  misc_feature (422)..(422): n is a, c, g, or t
tttcgaggatttcaaacaggtggaacccatccatccctattcccaagggccacttacaactctaagggtggttacaggattaactaccagttcattttcaaaatgctgctttgaactcagagggttgatacttttaatttgtaattttttgtaaaactttttacaaaatagtaaagtatttcaccagaataccagtttcaatccgtccatggtctgatttttatataatttagtggtgctttaggaaactttgtttttgttgtttctgaggctaaacagctcaatcctttttcgcctgtatctacctaaggaccaatgtggaacctttgtatttttggctcctaattttgggattcngtggaaagtgtactgtttacangtacaggtggcccccgttcccgtgtgtttnggcaggantgctntggggggggtggtggcacctca

SEQ ID NO: 264181 - DNA, 410 bp, Homo Sapiens
ggagataatgtggaggtcagaacccaaggaagggagtgagacctccactcccagtgggggacctggccacccatccttggggacctgagaaagcgtacttcaccttggggtgaaggctgggtggggccagagggaccagtgccctcctcagtgcttaggggcagagccacctgcagcaatggtatctgcatatcagcccctctccaccttctttctcccgctgaatcatttccctcaaagcccaagagctgtcactgcttctttctccctgggaagaatgcgtggactctgcctggtgatagactgaagccacaacagtgccacaccctcgccttaattccttgctaggtgttctcagatttatgagacttcttagtcaaatatgagggaggttggatgtggtggcttgt

SEQ ID NO: 264182 - DNA, 1478 bp, Homo Sapiens
  misc_feature (156)..(448): n is a, c, g, or t
gttttatagggaaaaagatctttgtacacctcctcaacctgttagtagaaatgttgacttcgattttttgcaccctcttcacaggacctcataagttgcctctgttcttggaaagcaatgggaataaaaatatgctgttgaaaatagtgcatgggnnnnnnnnnnnnnnnnnnnnnnnnnnnnnnnnnnnnnnnnnnnnnnnnnnnnnnnnnnnnnnnnnnnnnnnnnnnnnnnnnnnnnnnnnnnnnnnnnnnnnnnnnnnnnnnnnnnnnnnnnnnnnnnnnnnnnnnnnnnnnnnnnnnnnnnnnnnnnnnnnnnnnnnnnnnnnnnnnnnnnnnnnnnnnnnnnnnnnnnnnnnnnnnnnnnnnnnnnnnnnnnnnnnnnnnnnnnnnnnnnnnnnnnnnnnnnnnnnnnnnnnnnnnnnnnnnnnnnnnnnnnnnnnnnnnnngaaaatagtacatggagggcatgcattttagtttaggaaacccccctcccttcccagttccagagggagaaattataagctatactgtgccaaaagtgagtggggctgcagagagaatggtgccttttctcaccttctgagttaatgcccgacatctgccattggattcattgaccaaaggaagtcatttctactgtataaactcaggagtatcatagcccaacaagtaaataataaatgttcattggtttcggaagcgaaggaacaggtgagtattgaccccaccaaataccagcgaagagcaccctggctttggccatctttccaaggttcataattgctgtgggcctggtgagccctgttcccaggtatgcaacggagggcttctccaggccagacatttctgtaggttttcaggtagcaactcccccatcatattttgggtgtcattccccactatctctccccacttctcagcctgtgcccagaaacaaccacagcagcctcattctgcagacttaacatctgtcaaataaccttcctgaaaaggaaagttattggaggaatccaggccaaacaacaagtagaatagagccatctaaagttattaataatgagttcagggaaatagatgaattttttcctggcatagtcaatatttatatctcacaacaagtcaaaaataattttccatttggaaaacaaaacacaccatgactgtaatgttaaggcatataatcatgaacttcacatgctccctcaacaaacgttactgctctagggaaatcatagaaaaggaccctcttattccccagggatcaaagcaagtccccttaggaatttcatgtgtgccatgggtctgtttttatttcacagtgactagtcatatactggagtagctctgttgttcattatttgtaacaggtccatgtaacagtcaagttagcattcaagcaattatggatgtgatactatgatgtacttttgttatgattgtatatgattaataacaaagttatttttcttacta

SEQ ID NO: 264183 - DNA, 640 bp, Homo Sapiens
  misc_feature (86)..(100): n is a, c, g, or t
  misc_feature (109)..(224): n is a, c, g, or t
  misc_feature (240)..(240): n is a, c, g, or t
  misc_feature (253)..(253): n is a, c, g, or t
  misc_feature (596)..(596): n is a, c, g, or t
cccggggtttttttggaaaaaaatttggcccttttttctttccttggggggcccgccccccaaaagattgtttaaaaaattttttnnnnnnnnnnnnnnncccaaaaannnnnnnnnnnnnnnnnnnnnnnnnnnnnnnnnnnnnnnnnnnnnnnnnnnnnnnnnnnnnnnnnnnnnnnnnnnnnnnnnnnnnnnnnnnnnnnnnnnnnnnnnnnnnnnnnnnncactatagaaaaaccntttaataacaacnttcagatttacatgacccttctggtgctcagaacactatggattaacacacacactggaaagatacagacacaggaatctgctgcattaccccaaatggcaaagtcttgactggggcttcagctcctttcccaatccaaaattggcacctttttccatggaaattcaaactgcatctctaaatgatggggtacatgaactgtctgtttcaaaagtatttaaaaacaaacagggaggtacagcttccatttcattagggaaaacaccaccacaagacaggggtgcaggtatctactaggctttaaggttttatcactccattggggggctttatttgacaggcnggaatgtggatgtgggtaatgtggggaataggggaggaggaggc

SEQ ID NO: 264184 - DNA, 1167 bp, Homo Sapiens
  misc_feature (171)..(206): n is a, c, g, or t
  misc_feature (800)..(800): n is a, c, g, or t
aaaaggcaggctggtaccggccggaattgccgggatatcgtcgacccacgcgtccgctgatttttaaataaacttaagaaatttagattacagagtatgcatgactgtaagaaaaagaaattgagaggaagtgatcatagcaaattaaagaagtcttttcctcccagaacnnnnnnnnnnnnnnnnnnnnnnnnnnnnnnnnnnnncttttccacagagaaaggcaactgtgatgataaaatttaacgttcccccaaacactgagtcaatgagatttttctcaggagatactttacctataacaatgccgttaaatccaaatctcttctaaacgatggcattctatgtaatgcctttcctggacttttttggccactgccctggactagtgaaagaatggactctatctttatctgcaagaggaactaaggccttctatcagactgcctggccagcctggggcactgaaaatacggctcatgttaatgagttacattatcagccagcccagccttgcccaccatttaagaaatatcacagagccactagatctcatatgatcttcttcaagccattattttaactcaagaaaactctagagaagaaaagtgaagaagtcatgttgaagaagatgtaagaatgtgtcaagaccatccagaaatgatatgagaaatactgatattttaaatagtgacatcatccagcgaaatgaatctacattaaatgttgttttaactgcgctatgattaaaaccattcatatagagttagtctttacaactactattctgttattttttnttttaatctgacaacatttgtcctaagtaagataagcaaaaaaattcttcaactccttttggcaagaaaactgtaacagaaaataaattttgaatgtgtacttaagtctttattatatttgaaacaattttttttcaattttaaaagctgaatgaagacaacttaggttgctaacctagttcaaaatgaaattatttagataccaatttttaaaatactggagagaatttatatgtctttttccagagttctgatgataagcatttggagtgcatttattcctccagataataaatgtgtgttcagaactttttgtgttttttaaggcattaataaagccttcgataatattaaatacaaaatggaa

SEQ ID NO: 264185 - DNA, 890 bp, Homo Sapiens
  misc_feature (160)..(180): n is a, c, g, or t
  misc_feature (229)..(241): n is a, c, g, or t
  misc_feature (324)..(334): n is a, c, g, or t
  misc_feature (420)..(433): n is a, c, g, or t
  misc_feature (468)..(481): n is a, c, g, or t
  misc_feature (497)..(670): n is a, c, g, or t
  misc_feature (808)..(808): n is a, c, g, or t
  misc_feature (813)..(813): n is a, c, g, or t
  misc_feature (823)..(823): n is a, c, g, or t
  misc_feature (830)..(830): n is a, c, g, or t
  misc_feature (834)..(834): n is a, c, g, or t
  misc_feature (839)..(839): n is a, c, g, or t
  misc_feature (847)..(847): n is a, c, g, or t
  misc_feature (853)..(853): n is a, c, g, or t
  misc_feature (865)..(865): n is a, c, g, or t
ccccatgcgggggatcggggggtatgtggttcgcgccgccgggaaagtgaatgtgtttttcatccccctcctttgttttagggtggcttccccccccttgtcagggagaaaggggggttagtaaattttaaaccacacacaatcctttctaagatagtannnnnnnnnnnnnnnnnnnnngaagaatctttataattattaggccgccccgggatatgacacccctctnnnnnnnnnnnnngagaagaagaatggccttggaaaaacccccgatgggggtgtgttgtgagaaaaaaggtgtggtgtttcttcccgcccgggtcnnnnnnnnnnngtgggggagaagagacactactttgtttagtgccacggtttgttttttgtggagaaacaagattgcctcgtgatctaccccttttnnnnnnnnnnnnnnccccaacaaaaagtgttagagaaaatttttttgtnnnnnnnnnnnnnncgcacgggtgtgttgnnnnnnnnnnnnnnnnnnnnnnnnnnnnnnnnnnnnnnnnnnnnnnnnnnnnnnnnnnnnnnnnnnnnnnnnnnnnnnnnnnnnnnnnnnnnnnnnnnnnnnnnnnnnnnnnnnnnnnnnnnnnnnnnnnnnnnnnnnnnnnnnnnnnnnnnnnnnnnnnnnnnnnnnnnnnnnccataatcagatttattttcctctaataagacagtttagcatctccgagttttgcattctacagtcttacaaactttagttattagcatcagaaacacaaaaaaattgcaagacctcaaaacacaaataaataccaantaaanccacacatantatacantaancaaanctagaaancagtantgctatcaggangtcaggcatgttgctaactcacagt

SEQ ID NO: 264186 - DNA, 1210 bp, Homo Sapiens
  misc_feature (19)..(19): n is a, c, g, or t
  misc_feature (39)..(39): n is a, c, g, or t
  misc_feature (72)..(72): n is a, c, g, or t
  misc_feature (84)..(84): n is a, c, g, or t
  misc_feature (576)..(668): n is a, c, g, or t
  misc_feature (915)..(924): n is a, c, g, or t
aagaaggggaaaaaaatcncaagttgtctaacctcagtngaaaaatcgccaagccattgccagacaacttgnccaggggtaccngagaaaccggatgtacctgtttttccagtatttggggagggtggtttgagccagcatttattgacaatttcattaagtggggatgtttctattgaaaacagagttaggaagtcataaaatgttcctcaatataaggtaataataccaccagcgtttatcttactgttttcatgttctaagtgcatgcatctgagtaaaaggatctgggctgcagtccagtctgagagatgccagcaaaggcttcctaggccagttcagtccagtaaatccctcttcgatcttctcttccacacagacagcgagtgatgagcatgcccatgaactcacatgattattttggggaaaatgaaagagttgtattctttttgaggtagtaattccactttcaggggcaaatacattttgattattttatcacccttcagtgagttgtttttgttctttaatcaaggatgtatgtttgaagtaagaagtaaagcataaagtatatgnnnnnnnnnnnnnnnnnnnnnnnnnnnnnnnnnnnnnnnnnnnnnnnnnnnnnnnnnnnnnnnnnnnnnnnnnnnnnnnnnnnnnnnnnnnnncaagaagctcccccaaaacctccaaaaaagcttccaaaaccattaagttaggcgaacgtggcccaaaaatggaatccaaagagatcctgagttgttactagggcgagcctgcccacaaataaagacttgcctcccgcaactaaaagccccccgccgatacccaaggggttcgaaggaatctactggatctttcaaggggattccgggcaatctcgataggaatttacgcaacacccatccccttttnnnnnnnnnnttgtaattcatcaaaaatttggtggaattgaaaaccatctcggccgacatgaaaaccctcaaaaaggcgtaggataaatcgaattgccccctgggataaaaaaatttgcccctgtggggaaaatatattgcgcaacagggtgaacaaagggggcccaaaaagtgagtccaaaattgggccaaaatctcaacccccaagatggggggggaaacactcccccaggggaatttgtctttttacaccaccattttatggttaccctagggcacaacccctttttctggcg

SEQ ID NO: 264187 - DNA, 948 bp, Homo Sapiens
  misc_feature (39)..(39): n is a, c, g, or t
  misc_feature (71)..(71): n is a, c, g, or t
  misc_feature (386)..(492): n is a, c, g, or t
  misc_feature (502)..(517): n is a, c, g, or t
  misc_feature (566)..(580): n is a, c, g, or t
  misc_feature (621)..(633): n is a, c, g, or t
  misc_feature (691)..(700): n is a, c, g, or t
  misc_feature (806)..(815): n is a, c, g, or t
  misc_feature (873)..(881): n is a, c, g, or t
gtggtgtcctctggctttaaggagtgaaagaggtggctncttgagggaaatggtctggacttattcccagnactgtttcaggcaagaactttccctttcaacttcaggctcattttcttctcaactctggctctctcaaggagctggagggtggcagaagtgggacaggagaagttttccaagaggttcatgggaggcggaggtgactggctggctgtcttgcatcaagtcccagcctcggccaggggagccagcctttggtttcgtttacttgcctacaggtctgtacgcaataagatgatgatcccaaaatatggtaaagtgaacccatctgtctgcattttctactctgagcccatttgttaataaacacttatttttatatnnnnnnnnnnnnnnnnnnnnnnnnnnnnnnnnnnnnnnnnnnnnnnnnnnnnnnnnnnnnnnnnnnnnnnnnnnnnnnnnnnnnnnnnnnnnnnnnnnnnnnnnnnnttgatgaccnnnnnnnnnnnnnnnnttgatgtgaacaaacaacagcaagctaaacaaaaagtggtgtgttccgnnnnnnnnnnnnnnngaaactcttttaaaaccttttcgggggcgggggcccccccnnnnnnnnnnnnnggggatacatctgttttcccaaaaaacaccgggaataaaggaggttggtgaacccccnnnnnnnnnncccccggggaaaaccccgggattttaaaacaacccaagggggacctggggggtactattgggttgcctccacgggggatccccagggggctcttatatattttctnnnnnnnnnnggggcccttcgggggaggaggggggaataaatataaacatcctcccgcacaagaggannnnnnnnnacaaggcgttagataaaacctttaaacccccgcggggggttctccaccccccggggcccccgctggg

SEQ ID NO: 264188 - DNA, 542 bp, Homo Sapiens
ggtattggagtgattagtataaattcaatggaatttgagaagcaatggcagcgggataatttagagtcactgatattacgagaggggtctttttgtaaacctccttttcaatgtcaaagcaccaatttataaaacgctgcagatgtagaggttatgtgcaactgatctgtccagtttgtgtatgaaatggatttgataaagtttttgctagttatttactacattttgggattaataagtgatttatatgcatatttttctctaaatctacagttttttgtacaagatattctacaagttatgaagctaacggaagaaaatgccaaagatacctctagttatgttgaacacagccagcacagtttcgacaggtcaaggaagagctgtttcagtaaagaatgaagtggaaaaccttaattttaaggaaaatggtttcctcacccaaataaaaaggtattaagcttgttttcttccccccgaaccaccccgaccgcgccctaataaataataacccttggtgggcccccccctcgggcccctcc

SEQ ID NO: 264189 - DNA, 252 bp, Homo Sapiens
  misc_feature (211)..(211): n is a, c, g, or t
ggagactcaccaatttctggcctgttcaggagcctcagataagtatttgtacttgagaccacctcacacaatctgtatgggcccaaccctgatctcaaacctccttccctctgcccaaagctgtccttcctatggcaggaggggtgggggtcccaggacgtgcctcatacatgacttgagcttgtcagtccactgagtttccttctacganatcaacgcgtgggcctgatcttgaattaaaacctactcgct

SEQ ID NO: 264190 - DNA, 190 bp, Homo Sapiens
gggtccagttcacccctcacctccagcctgggggtctccagacactgccagggccccctcaggacggctggagcctggaggagacagccacggggtggtgggctgggcctggaccccaccgtggtgggcagcagggctgcccggcaggcttggtggactctgctggcagcaaataaagagatgacggcag

SEQ ID NO: 264191 - DNA, 563 bp, Homo Sapiens
  misc_feature (240)..(408): n is a, c, g, or t
  misc_feature (419)..(433): n is a, c, g, or t
  misc_feature (481)..(491): n is a, c, g, or t
ggacagttaccgcgtgtactacaatgccggccccaaggatgaggaccaggactacatcgtggaccactccattgccatctacctgctcaaccctgacggcctcttcacggattactacggccggagcagatcggctgagcagatctcagacaagtgtgcggcggcacatggcggctttccgcagtgtcctgtcttgagccactgcagtctgggccccatcattaaacgggctgcgtttannnnnnnnnnnnnnnnnnnnnnnnnnnnnnnnnnnnnnnnnnnnnnnnnnnnnnnnnnnnnnnnnnnnnnnnnnnnnnnnnnnnnnnnnnnnnnnnnnnnnnnnnnnnnnnnnnnnnnnnnnnnnnnnnnnnnnnnnnnnnnnnnnnnnnnnnnnnnnnnnnnnnnnnncccttgcgggnnnnnnnnnnnnnnnaaaaaaatttttaaaaacttttgtttggggggcgggcccccccaaagnnnnnnnnnnncggggacaaacccttttcctcacaaaagaaacccgggggcccaaaaaacaagggggtggggttttccccacc

SEQ ID NO: 264192 - DNA, 855 bp, Homo Sapiens; identical to SEQ ID NO: 10635

SEQ ID NO: 264193 - DNA, 936 bp, Homo Sapiens
taagagataaatgccaaatattaggacatgctatgtttgtgggaatgtggaggtgggatggagagtgactaatttggaagatatccaagaaccacttagggcgaaaggtggttagcatttcatttggagctgagaaaaatgttgtgagaagggtacatgacatttacactgttaggacaaatgctcagattctggaatcaatgtagtcttaaacagaagtgttactttgtggttatttttcctctgtagtgaaatatggttttgagtttgatttttcatatccaggaattgccacaagcagtctgtgagatccttgggcttcaaggcagtgaagttacaacaccagattcagacgttggtgaagacgaaaatgttgtcatgactccttgtcctacatctgcatttcaaagtaatgccttgcctacactctctgccagtggagccagaaatgacagcccaacacagataccagtgtcctcagatgtctgcagattaacacctgcatgatcactgttcttgcttttttgggaagagacactttgttgcaaccctttttcaagtacttgaaagttgaaaatttgaaatcttggtattgatcatgctttaaggtttatgtaaagaaagtgtactgatgttcttacattaaagctttacaaagatttaaactaattatttttgtagttacttctaccaaatagcctttccttttcgataacattcctcagtatttttatagccaagtacattttattttcttgctgatgaactggaattggataaatattgcaagtggatgagttggaaattatgcactttgaaaaacattcactttgtttaagcttattgggtttcagatttgattaaattaaatgtggaggctttctatagcattctaagctgagaagtagattgttacccagtaatgaaataaaaaat

SEQ ID NO: 264194 - DNA, 866 bp, Homo Sapiens; identical to SEQ ID NO: 10651
  misc_feature (631)..(669): n is a, c, g, or t
  misc_feature (726)..(736): n is a, c, g, or t
  misc_feature (772)..(812): n is a, c, g, or t

SEQ ID NO: 264195 - DNA, 810 bp, Homo Sapiens; identical to SEQ ID NO: 10653
  misc_feature (192)..(224): n is a, c, g, or t
  misc_feature (606)..(621): n is a, c, g, or t

SEQ ID NO: 264196 - DNA, 760 bp, Homo Sapiens; identical to SEQ ID NO: 10654

SEQ ID NO: 264197 - DNA, 836 bp, Homo Sapiens; identical to SEQ ID NO: 10655
  misc_feature (421)..(471): n is a, c, g, or t
  misc_feature (561)..(570): n is a, c, g, or t
  misc_feature (577)..(720): n is a, c, g, or t

SEQ ID NO: 264198 - DNA, 715 bp, Homo Sapiens; identical to SEQ ID NO: 10656

SEQ ID NO: 264199 - DNA, 972 bp, Homo Sapiens; identical to SEQ ID NO: 10657
  misc_feature (41)..(41): n is a, c, g, or t
  misc_feature (306)..(329): n is a, c, g, or t

SEQ ID NO: 264200 - DNA, 590 bp, Homo Sapiens; identical to SEQ ID NO: 10659

SEQ ID NO: 264201 - DNA, 787 bp, Homo Sapiens; identical to SEQ ID NO: 10671
  misc_feature (677)..(677): n is a, c, g, or t

SEQ ID NO: 264202 - DNA, 1071 bp, Homo Sapiens; identical to SEQ ID NO: 10672

SEQ ID NO: 264203 - DNA, 552 bp, Homo Sapiens; identical to SEQ ID NO: 10683

SEQ ID NO: 264204 - DNA, 1143 bp, Homo Sapiens
caagcttcttctggaggcagtaaggaaaaataaaacccaccaaggctcaagaagggaactatagaaaagttcaggtttttaggctatagcagagacagtgagaaagcatctgggcctttctcttcctcttggtccaggggactccattcaccaactagagcttggtgtacaggaacggggtcacagtgctgagggggcttgagtcccacctttcagcttgatggatgctcacctcttctcagccccagctcgtgccctgtttttctagccatagcccccagattactcacagctcctcatgccatttcctgtccagattgctatgtatgactctgacctctcttgtccagttggtctggtgctcacctcctctcactgctaagaatattcaccaagggtttgcatttgggaagtcccttaccagctcctgcttagagctggtagggccatacatgtccacactcccaactggtggctctcccgctgaatggggcctcagcaggtgcccaggctgctacaaccttggccactctgtttctccaccccagcactgggcatggtaattagcctttccccatgttaatttattcagttttttcaagggtcaactgaattccccacttcctgggtaagaagcatgatctccttttaatttcacgtctaagatcctgggcagcttcccctagctggttcctctgtagtcctgctgggactgtcagctcatttaaatgtgggtctgcagaaggctttaggtctcccccaacccccttacctttcacagaggaacctttcatccaggataaatgattattgctgccctgtgggtcttgctcaatactgttcatacctggagagagaaggtattgaaacatctcctttatgtgtgactttcccaaatttttaaaaattgtttatggtttaggccccttaaatactgtgtagcaggatgaagtctaccattaccagctgggtcaccttggatgggtctgtcaacatctaagcctcagttccctcacctgtaaaaatgagggtagtccctacctcataagggatattgtgaggatggaaagcgaaagtgtgagaaaatacctcccaagtgcctggtacatagtgggtgctaaataaaccactttttgtctgcaa

SEQ ID NO: 264205 - DNA, 542 bp, Homo Sapiens
  misc_feature (381)..(381): n is a, c, g, or t
  misc_feature (477)..(477): n is a, c, g, or t
  misc_feature (504)..(504): n is a, c, g, or t
  misc_feature (526)..(526): n is a, c, g, or t
acaagtaggtagatatgtatgtaattgcttttaaatcatttaaatgcctttgtttttggactgtgcaaaggttggaagtgggtttgcatttctaaaatggtgacttttattctgcaagagttcttagtaacttcttgagtgtggtagactttggaacatgtaaattttttgcttgtaatgttatcctgtggtaggattttggcaggtacacacactgccctattttattttgagtctaagttaaatgttttctgaaaagagatacatgcactgaactctttccactgcgaatcaagatgtggtaatataaaaggatccaagacaaatgagatctaatactactgtccagttttaatgtccactgtgttttatacagtatcntttttttgttcactttgggaaatttttactaaaaattgcaaaaaataaagtattgtgcaaagatgtaaggtttttggaactggaatgcctttatanatggcggttaaatcactgaagggtccntactcttggactctggggcctncccaggagcttcccct

SEQ ID NO: 264206 - DNA, 855 bp, Homo Sapiens; identical to SEQ ID NO: 10698
  misc_feature (534)..(537): n is a, c, g, or t
  misc_feature (539)..(540): n is a, c, g, or t
  misc_feature (547)..(547): n is a, c, g, or t
  misc_feature (719)..(719): n is a, c, g, or t
  misc_feature (727)..(727): n is a, c, g, or t
  misc_feature (760)..(761): n is a, c, g, or t

SEQ ID NO: 264207 - DNA, 388 bp, Homo Sapiens
  misc_feature (16)..(16): n is a, c, g, or t
  misc_feature (28)..(28): n is a, c, g, or t
  misc_feature (37)..(37): n is a, c, g, or t
  misc_feature (46)..(46): n is a, c, g, or t
aaattcccacctttancctaccccattngttatttanggggggtanaaatccttggtcctaatttgcctattaaaatccttattggttaaatagaaataaggaaaagtataattaagtttcttcatcctcaatgtcaactttatattgtaattaaatgtgtagcaaccaagctgacaatagtgattaagaaattaaagtacagaaatattttatttggggactcaaaatgaacaaaagatagataagattaaaatttcacttaaaaagctgccatctcttcctctcttgccctcccaccaccaataactttaaggggaagagaagctggttttttccctaaacatgtctttaaaataatgatacactgtatttattaattcttgatgc

SEQ ID NO: 264208 - DNA, 470 bp, Homo Sapiens
  misc_feature (22)..(22): n is a, c, g, or t
  misc_feature (34)..(34): n is a, c, g, or t
  misc_feature (41)..(41): n is a, c, g, or t
  misc_feature (58)..(58): n is a, c, g, or t
  misc_feature (82)..(82): n is a, c, g, or t
  misc_feature (111)..(111): n is a, c, g, or t
gacgtcccccgttgcacctttngaccagtggccncttaggngaatatatatttaaaangggtgaactgaattccgccataangaagcatgcactgcctgagtgtatatttnggattcttatgagccagtcttttcttgaattagaaacacaaacactgcctttattgtcctttttgatacgaagatgtgctttttctagatggaaaagatgtgtgttattttttggatttgtaaaaatatttttcatgatatctgtaaagcttgagtattttgtgatgttcgttttttataatttaaattttggtaaatatgtacaaaggcacttcgggtctatgtgactatatttttttgtatataaatgtatttatggaatattgtgcaaatgttatttgagttttttactgttttgttaatgaagaaattcctttttaaaatatttttccaaaataaattttatgaatgacaaccag

SEQ ID NO: 264209 - DNA, 360 bp, Homo Sapiens
  misc_feature (326)..(327): n is a, c, g, or t
tcatccgctgaatacacagcacttgttaatcctacagtcttctgtccccacagagtctgctagatcttcctcttctgagtcatcctcttcttcctcctctggtgctgacgaactggaggtgggccctttgcaggttttcaggtggcgggtgagatggtatttggttagataagcctttgtacatttttcacagacataatcccgttttccttcatgagaattgagatgcttctttaagtgatttgttctcaagaacagcttatcacacttgggacacttgatctggcgttcttgagtgtggaagagcacgtgctgcttgagggccnncctccgcataaacaacttgtcacagtaatcaca

SEQ ID NO: 264210 - DNA, 399 bp, Homo Sapiens
cccctggtctgccctccttcagccccccagactcccaggcccaacaccttgtggaccctagccctcccagtcctcactcccagcaccccaggttggcatgccatagacccccaagcttgaggcccaccccctgacagtcccagcagaattcaggatcccaggcctgccccaggaatctcagtaaccataacggtatgaatctagaaatcaataacaagaaaaattggagaattcacaaatatgtagaaattaaacaacatgctcctgaacaaagagtcaagaagaaatgaaaaggaattgaaaaatatcttgggacaacagaaagcggaaacaacatgccaaatgtatgggatgcagcaaaagcagttctaagaggggactttatagcaataaatgcct

SEQ ID NO: 264211 - DNA, 413 bp, Homo Sapiens
  misc_feature (380)..(380): n is a, c, g, or t
atttaaaatactggggttttttgtttaatggtgcctattttagagttggaagttgaacagctgttgccattacatacttttgcttttttattgaaattttgaaatcaaacgtcttgaattttctgttctgttgaattgctatgttcaggatgttctagggggtgggggcagggactcttttcgtaataagcacttgttttattttgtgtgtgtggagtataaaggctacacccttattgtaaaaaaataataataataaaatgaaagaaacaatcaccaccaccattattaaactgtaacttgtctagtaaattgtcactagaactatttgctgtgggcatttcctctattctgttacgtcattaacagtgccttacgtngcaaggcaccaaaggacataaatacgtacttgc

SEQ ID NO: 264212 - DNA, 974 bp, Homo Sapiens
cgcggcggaaagggctgtgcgacctagcgctggtgcggattctattccggtgagcactcgcggttctggggcgcagacggcttgttccgtcattaaaagcgagccatttagtggggcatcactcgctgttcgtgttgtttctctccttgcggggcctagcagcggtgccgccgttttttgtttcctgataggtgtccccaccgcccgtcggggtcgtaaggcttcggtgcgcgcacgacacgttgtgaggcggtgccgtgttgggatgtgcgccatggcgcggtgcgttttggttgcgaggggagagttagggggtaagatcgggcagcacgtgggtttcggtgtgtggtgtagggacgactccctgggcggctgggtcccaggtcgcggggggtggtcccggagggaaccaagcggggggcgccaggttccgattggcgtacagggagcccccggggcgcggagggggatgggtctcaggagaggtttctccggggggcggaaagcgggccacacagggaagtgttgtttggaaggggacagtgcgagttccccccagtccacacaacctttatttctctaccaaacagcaggtcagcaggtgggtacagggcccgctcctgctaagacctccccacctccccccaggaaagaagcagagaatctctgcaggcaccagactccctgcctcccccactgcgtttctctcactggccgcccagaacctgtgagagggaggaggggtgaggcgtaggggagggggctacagaacatggagcccattggtctgcaaggcaggctgaggggctttggatgtgggggactaggaaagggatgtgagtcttgatttacatataaaatcatcagtctgcacacgctctaggaggggccaagacatagggacaatccttggtgcaggtttctgctacccctcgctagtttttgccaaagtagcaaaagctgagttaagagaa

SEQ ID NO: 264213 - DNA, 194 bp, Homo Sapiens
atctaagattaattcctcaactgttttgcactcaacaaagacatacctctgagttggcaaccagcagggtggataacgggccagtggtgataaaatcaaagaataggtaatgaaacaatcatccagttaacaatcagcaaggttcttcagagcctaattaatgtttaattctaaataaattgcaacaattaaga

SEQ ID NO: 264214 - DNA, 415 bp, Homo Sapiens
ggcatccccatttgggacagctccccacacctccctgagggaccagcgactgcagctgagtcatgatctgctcggaatcctcctgctaaagaaggctctgggcgtgagcctcagccgccccgcaccccaaatccagtacaggaggctgctggtacaaatactgcagaaatgacaccaataatggggcagacacaacagcgtggcttagattgtccccacccagggaaggtgctgaatggcaccctgttgatgcccccatctggatgtaaatcctgagctcaaatctctgttactccattactgtgatttctggctggcccaccagaaatatcgctgatgcagacacagattatgttcctgctgtatttcctgcttccctgttgaattggtgaataaaaccttgctctttaccaaa

SEQ ID NO: 264215 - DNA, 415 bp, Homo Sapiens
aaaaagggtcgatgatatttcactgatggtagatcgcagcccctgcaacgtagcctttgttacatgaagtccgctgggaaatagatgttctgtctctatgacaatatattttaactgactttctagatgccttaatatttgcatgataagctagttttattggtttagtattcttgttgtttacgcatggaatcactattcctggttatctcaccaacgaaggctaggaggcggcgtcagaggtgctgggtgacagagccatgagccagccattttataagcactctgatttctaaaagttaaaaaaaatatatgaaatctctgtagcctttagttatcagtacagatttattaaatttcggcccttaacccagccttttccagtgtgtaacccagtttgaaatcttaaaaaaag

SEQ ID NO: 264216 - DNA, 631 bp, Homo Sapiens
  misc_feature (65)..(65): n is a, c, g, or t
gctgccaatagcaaatgaagttatgggtgacttgaaataccaaaacctgggattacaggcgtgcncgcgttgcccggcctgatgtttttgaatgattatgaaaatgggtatacagcattaaaaccttagactgattttaaatatattaatttcttttaaactcaatataatgttaatattactgtagcacttactagcatttctgaaggttggtcttgagataagattgaaaatgacagttgttgattttctgaggtaatatacccaaataaaatatatgtatgtgtacatgaatctaaactggcctcttctggtccccattttgctttacttaaataatccttcatattttttaagtgttttgcccatgtgcttgggtagccttgaagtcaccagaataactaggactcaaattcagaccaaaccaggactagctttttgtgccatgagttagccatggtcctggacccagcaaaaagaatgattatgatggtcagagtaagatgagcaattgcaacataatattctctaatattgtatactgtaaatttattcagctgccctcgtttactcacagtttgcttatttgccaccataagaaatggtacaataaaaattcatgtaatcagaa

SEQ ID NO: 264217 - DNA, 399 bp, Homo Sapiens
gggaaataataccccccaaattaaaaatatatggtatggtggtaccatggaatccctaaacctgtccttccttcctggttcccctcattttggctttaccttaaataatcctttccatattttttaaagtgttttgcccccatgtgcttgggtagccttgaagtcacccagaataactaggactcaaattcagaccaaacccaggactagctttttgtgccatgagttagccatggtcctggacccagcaaaaagaatgattatgatggtcagagtaagatgagcaattgcaacataatattctctaatattgtatactgtaaatttattcagctgccctcgtttactcacagtttgcttatttgccaccataagaaatggtacaataaaaattcataa

SEQ ID NO: 264218 - DNA, 1634 bp, Homo Sapiens
  misc_feature (347)..(355): n is a, c, g, or t
  misc_feature (981)..(1057): n is a, c, g, or t
  misc_feature (1105)..(1123): n is a, c, g, or t
  misc_feature (1125)..(1128): n is a, c, g, or t
  misc_feature (1130)..(1133): n is a, c, g, or t
  misc_feature (1135)..(1135): n is a, c, g, or t
  misc_feature (1140)..(1277): n is a, c, g, or t
  misc_feature (1284)..(1330): n is a, c, g, or t
  misc_feature (1365)..(1365): n is a, c, g, or t
  misc_feature (1374)..(1374): n is a, c, g, or t
  misc_feature (1586)..(1586): n is a, c, g, or t
tatcattattaataaataaagagaaaaggaatttttgtttaaatgagaaatgtttaaccagattctgttctatttgaattgtgacttgcaccttttgttcaaagtatttcctttaggcattgtaattgtgaacagctcttacttgtgccagtgacagatgcagtggtctcctttccccagttgaagcagtgcatacgcagtagctattatttgtgttatctttatttctcttcattgttagaaaccaaagtcttctctgctggctggggctgagagagggtctgggttatctccttctgatcttcaaaacaagagagagaccttgaatacactgactcttccacccnnnnnnnnnctggggaaaggagagcaagaggtcccgagtcccctcctagtctttcatcctgaatttgcacagaggaaagcgggtgcccggcatggccatcctgatgttgctggcgggatccccatgcaccttgtccttctccactgatactggcagctcggctcctggacccaagatcccttgagtggaattctgcagtgcaagagcccttcgtgggagctgtcccatgtttccatggtccccaggtctcccctccacttggtggggtcacccaactactcacccagaagggggcttacccaagaaagccctaaaaagctgttgacttatctgcgcttgttcccaactcttatgcccccaacctgccctaccaccaccacgcgctcagcctgatgtgtttacatggtactgtatgtatgggagagcagactgcaccctccagcaacaacagatgaaagccagtgagcctactaaccgtgccatcttgcaaactacactttaaaaaaaactcattgctttgtattgtagtaaccaatatgtgcagtatacgttgaatgtatatgaacatactttcctatttctgttctttgaaaatgtcagaaatatttttttctttctcattttatgttgaactnnnnnnnnnnnnnnnnnnnnnnnnnnnnnnnnnnnnnnnnnnnnnnnnnnnnnnnnnnnnnnnnnnnnnnnnnnnnncttgtcgccgcctcgctcaaacttcaacatctgcgcagaatgagtaannnnnnnnnnnnnnnnnnncnnnncnnnncnccccnnnnnnnnnnnnnnnnnnnnnnnnnnnnnnnnnnnnnnnnnnnnnnnnnnnnnnnnnnnnnnnnnnnnnnnnnnnnnnnnnnnnnnnnnnnnnnnnnnnnnnnnnnnnnnnnnnnnnnnnnnnnnnnnnnnnnnnnnnccgaatnnnnnnnnnnnnnnnnnnnnnnnnnnnnnnnnnnnnnnnnnnnnnnngcgcacgaaacaccgatagagacgccgggggcaancaccccaangccccacccacattctccccccttacttacttatctccaccccgcgccccattgttgataccacgcccatggtaaatcgaccattagcgagcccccccttgtgatacccccacaaacgatattccccacccgtatactaaccgcgctatctgtcacccgcatacgataatactcccaagcaccgcaatccccactgcgacatcactcatganctctcacccaatatattatccatccttcggcctctttgtcacactcat

SEQ ID NO: 264219 - DNA, 373 bp, Homo Sapiens
  misc_feature (43)..(43): n is a, c, g, or t
agtcccctagggcctggaagggtgggaggttatgtcttagggngccagtgtctcttcccagggggaattctcaagctcttgggaacccccttgctcccaggggaggggaaacctttttcattcaacattgtagggggcaagctttggtgcgccccctgctgaggagcaagccccaggaggggaccagaggggatgctgtgtcgctgcctgggatcttggggttggcctttgcatgggaggcaggtggggcttggatcagtaagtctggttcccgcctccctgtctgagagaggaggcaggagccccagggccggcttgtgtttgtacattgcacagaaacttgtgtgggtgctttagtaaaaaacgtgaatgg

SEQ ID NO: 264220 - DNA, 350 bp, Homo Sapiens
tacaagcctccatttttattattaaatttgtcagatattactttttaaattcctacacagtttctaaatggttactctcaacttccgtacttatctcattataaaacattaacaatttgtgaactggcactagtccatgaaccaaactttgagtacctctgctctagatttcaaaaacagatgtggatatatgtgtaaaaatttggtatataaaaaagatgcttttctagatgggtagaagaaaagattgttcaaatgtcctatggtctcacaatccagtggttataactgtaaaactcatccagcctttgggagacactgaaactccatttaaagataagaacttgaag

SEQ ID NO: 264221 - DNA, 843 bp, Homo Sapiens; identical to SEQ ID NO: 97955
  misc_feature (135)..(158): n is a, c, g, or t
  misc_feature (707)..(707): n is a, c, g, or t

SEQ ID NO: 264222 - DNA, 467 bp, Homo Sapiens
  misc_feature (164)..(175): n is a, c, g, or t
aatgtaactcttatttaaacttaacttgtcataatttgttattaatatacaaagacaacaaacttttaaaacattacatttactaagattctggcaataagacacagcataccaggcttgcactcaacttgttattgtaagtctcagcttcaatatgaagccgnnnnnnnnnnnnaatcaaaaccctgctttttacatgctaaatatcttggcaagtaggccattaaacatagtaatgaacttaagacagcaagagtgaggagttaacaaaagctaaacattgcagcctaaacaaaattcatacaaaaaaataaactatcactagttacataaaattttcctgactggttaaaacttagtataaaacatgcattttagaatctttagctatcaagttcaaaaagtaccaatgtctatttaaaataattcctctcccaagccaaagtgtaggtcaaaattaattcaaa

SEQ ID NO: 264223 - DNA, 462 bp, Homo Sapiens
  misc_feature (233)..(233): n is a, c, g, or t
tactccatagacaaagcagccccgaggactgctggttctccgtttttgtggaagtccagggaagaaggaggccccagccttaaatttagtaatctgccttagccttgggaggtctgggaagggctggaaatcactggggacaggaaaccacttccttttgccaaatcagatcccgtccaaagtgcctcccatgcctaccaccatcatcacatcccccagcaagccagccaccntgccagccgggcctgggatgggccaccacaccactggatattcctgggagtcactgctgacaccatctctcccagcagtcttggggtctgggtgggaaacattggtctctaccaggatccctgccccacctctccccaattaagtgccttcacacagcactggtttaatgtttataaacaaaatagagaaactttccttataaataaaagtagtttgcacagaaaaaaa

SEQ ID NO: 264224 - DNA, 336 bp, Homo Sapiens
ggctgagcgtgcgggctccggaaggggatgctgaggctgatgaagctgctccccagggctagggccactcaccggaggagggcggggcctgcacttgaagtcaggccgcacctgtctgtttttggaagggtagccgacaaatccttccagagggaaagttctttgtttaagtgttgtacttgaaaaggtcaatcttcagggcttcctgtttgaagtcaagtcagaggtaaaccggtcagttacagaagcaggatttctaggatttctaactccagctgttcccatactgtctagtttaaattatggctgttaaggccgggcgggtgactcaggcag

SEQ ID NO: 264225 - DNA, 356 bp, Homo Sapiens
  misc_feature (17)..(17): n is a, c, g, or t
gatgtcaaaaattcctncccattgtggggtaggtggtcggggatgggagaaagggaaaagtcagggaaaggggagaagaaagaaaaacacatttggccttaaaatagcattcattctcccagaagcccatagtaaagaaaatgacagatcgtggtcagcagactcttatcaaattggtatgtaaaagatttcttcaagctccattttgcagagaccaccacttagagaatcaaaaaattcctgttttgatacttctaagttaaaatatatgttacagtttatctggtacttcatttttcttaactaaaattactttttactttaagcttgaataaaaatcttcattggtaactgta

SEQ ID NO: 264226 - DNA, 455 bp, Homo Sapiens
ttgctataaaataagcaacatcttaaatgcttgatttgctttcgatgtttattctgtaataagatatttaaagatataattttttccctaaatgctttattagacttttctcataagttttgactggtactgttttcattgttatttaattttgtgttttttaacttctttcatgatttccttttaactgaaggttttcttagatatttagtttgctggtatattcttttaaaattgtatcattgctttctttctatattggattattgtcagagaacatgatttgcatgatattaactttttggagtatattgttgcatctttgtggcctagtacatagttaatttagtgaatgcttccagttgtacttgaaaagaatgtatattttctgattattgagggtaaatttctctatatatgttttcctgtttaataaatatgtagctatgtgctta

SEQ ID NO: 264227 - DNA, 534 bp, Homo Sapiens; identical to SEQ ID NO: 11144

SEQ ID NO: 264228 - DNA, 463 bp, Homo Sapiens
  misc_feature (18)..(18): n is a, c, g, or t
  misc_feature (72)..(131): n is a, c, g, or t
  misc_feature (154)..(154): n is a, c, g, or t
agaagaaatctttggagntagagaaaccctaactcaaaaattccactggtaaaattttaaagcattccctcnnnnnnnnnnnnnnnnnnnnnnnnnnnnnnnnnnnnnnnnnnnnnnnnnnnnnnnnnnnntggtccatctccctctccccttnctgccgtgttaagcccatgggaaagggatgagggaggacagcttctggttaaacacaggtccctcttccacatcaaatgaacattggcttccctgggacagaaggccttcaaaggagggattgcaaagcaaggcaaagcgttctgtcttcattttccccatccccatgagacaagactgatggaaagggtggtggggcaacactgcttaatggatgccttttcacatcatttcagtttttagccctcatgactgtattttctaatcagagacaataacattttaaataaaacaacgacaaagaagtctg

SEQ ID NO: 264229 - DNA, 159 bp, Homo Sapiens
gggaatttgaggcatgacctataaagatcagttgcttgcaagagtctcaggaaaataattgtggagttaagaaacttgaagcgattttttaaaaattacctaacccaaccttctcatttgaaaaattaaaaaataaataggccagatatggcggctcat

SEQ ID NO: 264230 - DNA, 235 bp, Homo Sapiens
aaagccttctaaaacccagtgaattcaataccttaattagtacatactatcttatgtaatgcataaagcaatgccagtcactgagaacatttaaatatatttatattcctggagatacacattctcatttttgttggtttattataaattattcttctagatgcatcttttataactaggatttcattttgtgtgtatagcttatgtaataaattttaaaggtgaaaactctctt

SEQ ID NO: 264231 - DNA, 225 bp, Homo Sapiens
acactggtaattgcctcagtaaagacactgataataagtaccttttagagttattttaatctttaatgctttaatgtgtaggaagagtatagtgtcctgttttgcacagaaaggcattctgtaaataataagttgccttaattttcctgtaatgttcattatattgttgtgggaaggtatttactcctattattaaaaataaaaatgtgtaaaatttaaaataac

SEQ ID NO: 264232 - DNA, 772 bp, Homo Sapiens
  misc_feature (110)..(240): n is a, c, g, or t
  misc_feature (254)..(294): n is a, c, g, or t
  misc_feature (617)..(625): n is a, c, g, or t
ttatttggcattttgcaataatttatttcatatgacaccaaaagcataagcaatgaaagaaaaaaacaggatgaactggactttctcaaaattaagaatttttgtgtagnnnnnnnnnnnnnnnnnnnnnnnnnnnnnnnnnnnnnnnnnnnnnnnnnnnnnnnnnnnnnnnnnnnnnnnnnnnnnnnnnnnnnnnnnnnnnnnnnnnnnnnnnnnnnnnnnnnnnnnnnnnnnnnnnnnagactctgtctttnnnnnnnnnnnnnnnnnnnnnnnnnnnnnnnnnnnnnnnnnggcaggagaaacaattctgtattaactcagacacatattttaactatccatttattcctatagtgcctgatatgtgaagaaccttaatattcataaaatgttctaaaatttgctgactcaaatagaaggaaattggcatttatcattaaaggccaacatgagccaaatctacatgaaaattttaatatttctttatctcgctcccaaatgcctactatcttatttctaagatacttttcccaccatgtgaattccagcaattcattttatgttttgactgagttaataaagtccaaatctataagctagatttcaaatttacnnnnnnnnnatgtttaacgtgagagacattatcaaatacatctctcctcaatgaatctaagtaactgactaaacgaggaaaatgtgcacatggagtaaataaaattaaatttcaattctacttcaaaggttagaaatttttattaatctcgtgccg

SEQ ID NO: 264233 - DNA, 1295 bp, Homo Sapiens
  misc_feature (28)..(28): n is a, c, g, or t
  misc_feature (78)..(78): n is a, c, g, or t
  misc_feature (409)..(429): n is a, c, g, or t
  misc_feature (810)..(820): n is a, c, g, or t
  misc_feature (887)..(887): n is a, c, g, or t
  misc_feature (1149)..(1149): n is a, c, g, or t
tcatgatgatgtagcttgcagagaaganccaggagcagaatttagcccttttcttcaggccatcttgccttcaaaggntacacatgtttggccggttaagatgaaactaacccttatgtttcatcctggcccccatgatgtacacatcttagccatgtagtggccttggggggccacagagatttcctttgaggagcatggtagaagtcccaacagccaatggctgcaagtccagtggacaccgaggggacaggactgcaggccaccaggggcctctgcccagagggaggcagagaggatggcggccaacgggtgctcatcctggcgatccgtcatggggtgatgccaggccgggcacttcaaaacaggctcagccgactgggagatcctttgtactttgcaccagttnnnnnnnnnnnnnnnnnnnnncctatcccaagtgtttttgttagacacaaatgtcagcgtgtgattttggaagacttgtcagtgatgacaaaccatgatgcctgtgtttctgagtctttaaataaaaatgaacatggcaagcaagaaatcacataatggcaacatggagactggaaattttttaatcccatggaatgggtttgataccggatataacatgtgctgaataagagaggtcctgctacatcgaacaaggacaatccctctcacccaaccttgttgtgtgaaggtaacagccgcccccgcgcgcaaaaatgtccaacatggccccattggaactcttggtggggccccctaccggtgcccccaagaaaatatttctacaaaaaccatttggttgcnnnnnnnnnnnccccccattgacgaactccaacaacgccggacctacactggtatccctaccaaaaaagccccggcancaatgcaccccagggcgtggtaactcctcccacccaaacaaaaaagaaacccctcgcgtgacaacgcacctacgtggttctttctaaacagacacttcctcattaggggcgatggtttcaagcggactaatccaaccaaaaattcctatcgagcaaatgggcgtcctattgcagccgagactaattatagaaaataaataagagcccctgccctctgggtggtggcattatcatggaaaagaaacgtgccgccaccacttgnctattaacaaagcccaccgccgcccacccatcttccaagaaccattttcacaaagtacgcgggaacccactaaaaccaatagcaaactccccgccagcgcggcgacaacatcccaccctttccttccctcgcgttcactcgcggag

SEQ ID NO: 264234 - DNA, 435 bp, Homo Sapiens
  misc_feature (70)..(83): n is a, c, g, or t
ggtggccccttaatcttgtctttgattgctgtgtgcagagaaagtgtccccgtttgttcatgctgttttnnnnnnnnnnnnnntatttgcaagaatactcattttgacataataggtcctcttgtcagagatcctctaccacagacattaatagctgagcaggagccacatggattgattgtatccactcaccattgacgatggcattgagcgtagctagcttatttccaatactacgtgtttttgagcttgctcttacgttttaagaggtgccaggggtacatttttgcactgaaatctaaagatgttttaaaaaacacttttcacaaaaatagtcctttgtcattacattatttactcatgtgtttgtacatttttgtatgttaatttatgaatgattttttcagtaaaaaatacatattcaagaaccaaatt

SEQ ID NO: 264235 - DNA, 535 bp, Homo Sapiens
  misc_feature (52)..(52): n is a, c, g, or t
  misc_feature (55)..(55): n is a, c, g, or t
  misc_feature (57)..(57): n is a, c, g, or t
  misc_feature (59)..(59): n is a, c, g, or t
cctgaagaaaaaaaatttatatatacattgtgtgtgtgtgtaatacacaaanaancncnccctatacctggaagattgtcagcatgtaaatcaggaacaactttctccttattgacaatcccataataaaactcaggaaccaaggcaaaatgaattggcttctaggggtctgaaccttactgcccatacaagtgttgattcattttaatgctgtttatgatttctgcattggcagaaattttcatactttctatgtttttttaattactcagttttttattactaaaaatagcacatttgagtacatttgaaaagtagaaaaattagaaattattaactttattgaataagcaagaagtgcatcctaatcctttgattattaatgaggttgaatatttgtgtgctatcggtagctgtgtttctttgatcagatgttcctgtccttttgcccttctgttatctgttggagttgctttgtttttcgtatcaagttataggatctctttatataataaatgtaatttaacttgcaaaa

SEQ ID NO: 264236 - DNA, 1417 bp, Homo Sapiens
  misc_feature (33)..(33): n is a, c, g, or t
  misc_feature (255)..(255): n is a, c, g, or t
  misc_feature (682)..(700): n is a, c, g, or t
  misc_feature (780)..(780): n is a, c, g, or t
  misc_feature (786)..(787): n is a, c, g, or t
  misc_feature (792)..(793): n is a, c, g, or t
  misc_feature (797)..(798): n is a, c, g, or t
  misc_feature (1126)..(1126): n is a, c, g, or t
cctgtgggtttgcactggccatgctgctgcccnagctctacccctcccagggacctacccctcccagggaccgacccctggcccaagctccccttgctggcgggcgctgcgtgggccctgcacttgctgaggttccccatcatgggcaaggaagggaattcccacagccctccagtgtactgagggtactgcctagccatgtggaattccctaccctgactccttccccaaacccagggaaaagagctcctcaantttttaattttaatttttgtttgaaataaagtcccttagttagcccacttgtgtcatttcccaggttttctgggggagtgcagggggagatgggtgatgaggtatgaacggatgcctcagtgtccaagatacaaaaggcaccacatagaagtttgctttttccctgcctgtcttggtcactaccacctcttccctgagaagggcgggccttccatgttctctcacccgcttcaactccacattgtccaagtcacagaaaaagagaggcctgaatggagattcgaccacaaacagttttaatggtctggttttctccctagttccccaactgtttgttagtattattattactacaagaataaaggattcctgagagcctgtcccctcctctcctgtggcccccttgacaggactcatccctaccaannnnnnnnnnnnnnnnnnnggatttctggggaaaaaaagaagtgaaaggcactgcaggggtagggggcttgagtgccagtgagttggggttgggcgggngcgggnncgggnntggnnactaggcaggcccggcctagaggaggaaagttccagtccacacctgaagaaattgtggagaggtgtgtccatccatgacaaacccatcagtccttccctgaacctgtctagcaggcatacctaagtcccatcctcctacccctaggcccacactgggggttctgcagcaggagcataaaattaattagtgttgggctcagaaaggaggaatggagggtccactctactaggactccagggccaaacccaaagggaggttgcaaataactagaataatcctcaaatgctcttcttcttcaggttggagagacaggaattaacaaaatantaatgttaatgaaaactccccagccgagggatcaggcagcagtagggaaaaccaggctccaagaggaaggggctggtcagtcccaggccttggagactagttgttgtccccaacagccccctgccgagccctgatgaacgccatgccatgcgtgcggaagtgggtcttgaggtttagagggctgtcgcagctcttgccacagaccttacaggtcagtgggcctccagaagcaggcaggggtgagtctccaccatcggggtcagaccttgatggaggggcctcttactcccc

SEQ ID NO: 264237 - DNA, 1399 bp, Homo Sapiens
  misc_feature (1208)..(1325): n is a, c, g, or t
ggtctactgtgtggatttcgacatttgacatgtcggttgcatgccagagtatgtagaccgttctcacttcgtcagtgcagacgaagagcgaacactttgtggaaaattggcgcaaaatgagttgtacagctaaacgaggagagagttgtgcaagcgtgcctgtgagctcttaattatctattccgtacgagaggaaagcatgagcgagttattggggggacttgttggttttgaaggaaacctgtaagatgtttgtcccccaggcggtagccgttcaggctggctatggccatcgcggcttcttcatagtttgtcatggtcacaaagccaaaccctttgcacttgttggtgttgaagtcgcggatcactttcacattggtgacggcagccaaacggcccaaacatctgccagaggatcccctcgtcggcatcctgccccaggttgtagatgaaaatgcaccagccggaggaggcgtttcctggcacgttgacgccagagagcccgctcatgtgatcgacgcccatgggggagaacctgaatctctgcgcctggtggtgaacggggcctccgaaccgtcgcgctggcgagtggtacagctgcgagaggagtgccacgtttttgttctggttggggttggctgcaaacttcactgtgatgggctcagaggaacctgggggtttatgaccattgaaactggtaattgcctcttctgcctccgaccgtttgtcaaaccggataaacgcaacccctctggacaaacctgtagtctgatccacgaggacccgcgagttgatgatccgcccaaaccgagagaacatgtcttctacgtccttctgggtcatggtccggggagcccgctgatgtacaagttggcgtctttgatcacctctgagctcgggcgagcatacgacaccttaatggtttttgactggagcctcaagccgttcagcgtgttgatcgctctctctgcatccttcgcggtcacgtagttcacaaagccatagcccaagctgtgtcctgctactttatcccgaataagttttgcagattcaacgttcaccgaatgctgctgaacaggcttggtaactcatcctgggtcatgcttctgagggaggtagttgacgatcaaattcgttctcgcgaggtcagccgttcattgccaggtaactcataaccatagacagattttcaaaaatatggatgcgannnnnnnnnnnnnnnnnnnnnnnnnnnnnnnnnnnnnnnnnnnnnnnnnnnnnnnnnnnnnnnnnnnnnnnnnnnnnnnnnnnnnnnnnnnnnnnnnnnnnnnnnnnnnnnnnnnnnntcctcctacagcggcgcacgaccgacgcgtgggcgacgcgtgggtcgacgatatcccgaaattccggccagtac

SEQ ID NO: 264238 - DNA, 548 bp, Homo Sapiens
gggaagagtttttttatatgaactgaaatagatctaagagagcctggttaacagtttcctttaataccagttcagattaaatggttactttaggaacctgtgttactgtgtgagcacccacagaaacaagcaaacttatttcctacaaaaaatgaggggataataaccgatcagagtcacagtcgtttcaatataaacccttccgaaagcaaaagcagggaccacatgagcacacaagaagccaaagtttgtcagtgatcttaataaattaagactgagtaacatcctgcctttagaaaaaaataaccccgaggtggagaccagggcaggggaggtggcggagaagcatcgggccagatcaaccgttaataacatgcttctgagctatgtggatgtataaatgaaaacacccccaactaggtattgtagaggctggaaaaagatgtgatgggattatacaggtgatgcatatttttgttttgagactcaacaatgtgctacaaatgtgatacttaaccctgaactgcatgtattggggattgtttttt

SEQ ID NO: 264239 - DNA, 823 bp, Homo Sapiens
  misc_feature (572)..(572): n is a, c, g, or t
ggggctgctgtatctttaatgctggggcccaagtaagggcacagatccccccacaaagtggatgcctgctgcatcttcccacagtggcttcacagacccacaagagaagctgatggggagtaaaccctggagtccgaggcccaggcagcagccccgcctagtggtgggccctgatgctgccaggcctgggacctcccactgccccctccactggaggggtctcctctgcagctcagggactggcacactggcctccagaagggcagctccacagggcagggcctcattatttttcactgccccagacacagtgcccaacaccccgtcgtataccctggatgaacgaattaattacctggcaccacctcgtctgggctccctgcgcctgacattcacacagagaggcagagtcccgtgcccattaggtctggcatgccccctcctgcaaggggctcaaccccctaccccgacccctccacgtatctttcctaggcagatcacgttgcaatggctcaaacaacattccaccccagcaggacagtgaccccagtccccagctaactctgacctgngagccctcaggcacctgcacttacaggccttgctcacagcttgattgggcacctgaccacactgcccccacaggctctgaccagcagcctatgaggggggtttgtgcaccaagctctgtccaatcaggtaaggcttgggccggaactagccaatcagatcaactctgtcttgggcgtttgaactcagggagggaggcccttgggagcaggtgcctgtggaacaagggtccaaaaacgttaaaccttggaaa

SEQ ID NO: 264240 - DNA, 1137 bp, Homo Sapiens
  misc_feature (674)..(674): n is a, c, g, or t
ggccttttcaatggcgaaactgtcggcattagcagttttgggtaagctggcggtactataacacgtactggaaacctgttcctcatcaccacctaccagattctggaaatgccgtcttctagaaaacgatggcgtttgtggtggtcttcttttgaaaggaacagtaatttgtgtggatattggctaaagtggttaaagaatattttgacaattaagtttacattttacaattgctttattttttattaaaatagttgtatataaatattaccctatttcactgttgctcaagtaaatcctaaaccttgtagacaacggagtcatctgatatgtatacaacctgggatatatagagcaccatttatgtgcggtaaactcgggcatgaatataattgttcctgtggccttacaaggtgggggatattttgggggttttaccgcgcaccaacatttatcggcccttaaactgggtcgttcatggacacaaaaaatccacccccaaacatagctgaaagggatcttaaaacataatcgtactaattgaactcccatggtctaaaatcggtaacacaacacttggttcggcgaagccgccagttggaggagttccccaagctcaaacattttctccccccctgtgttgcgctgccgcgcaggcggcccgtgatgccccncgtagcagatcagcgcttacctttgggccccccacccctgggcacaaggacagagcagcgcagcgcgagcgccagaggaagagccgggtcccgtactgaacaggtcccccccgactgtgcgccggagatctactgccgcgccacttcgcccgtcggcgccgcttgtcgctggctcccgcgttattcgcacccactacctccccgccccagcctatttccctgcccgcgcatttgtgcgcggcgtctcggcctcgtgagtttacgcgtggtgcgcggcgcccggtgccccccccgcccagggtgtcgccggcgccacgccgcggccgcgtactccgcccccacggccgctgacgcgacgacgaccctcgctcgcgcctgcctgtactcgcctgggtgttcacgccgcggaggtgggacgctcgacccctactagcacatccgccaacctcaccctcgtgaccct

SEQ ID NO: 264241 - DNA, 1127 bp, Homo Sapiens
  misc_feature (541)..(652): n is a, c, g, or t
  misc_feature (654)..(655): n is a, c, g, or t
  misc_feature (657)..(659): n is a, c, g, or t
  misc_feature (664)..(675): n is a, c, g, or t
  misc_feature (680)..(683): n is a, c, g, or t
  misc_feature (685)..(703): n is a, c, g, or t
  misc_feature (707)..(708): n is a, c, g, or t
  misc_feature (711)..(712): n is a, c, g, or t
  misc_feature (714)..(718): n is a, c, g, or t
  misc_feature (723)..(725): n is a, c, g, or t
  misc_feature (732)..(732): n is a, c, g, or t
  misc_feature (736)..(736): n is a, c, g, or t
  misc_feature (738)..(738): n is a, c, g, or t
  misc_feature (743)..(743): n is a, c, g, or t
  misc_feature (746)..(828): n is a, c, g, or t
  misc_feature (859)..(859): n is a, c, g, or t
  misc_feature (880)..(880): n is a, c, g, or t
  misc_feature (1029)..(1029): n is a, c, g, or t
  misc_feature (1068)..(1068): n is a, c, g, or t
ggccccattctgtccctgcccctagtcacctagctgtgagggtgcctgaggctgaatggctccacccctcccccagccctgcttctgacctgtgcctctggagcccctgcccctgcctgcatccccgagcaccccaccctccaggctccactaaggagggaggggctgtctgcagcagctgcactcagcacctaggccagggtggggccgccgcagatgggctcaggaagccccaggtgcactcagcgagagccctgcctttcagttgccaaaagctgcatcaggggaatgcggcaaggcacacagggctctggcagcccctggggactgggcgctgcccctgggaggggagagcctggccagggctggtgttgggcccggagcagcatcttccggtgctatcctcccctcccacccctcacagctcaagccaagtccagcggccgcagtcttcacctctccacactcactttttatctggtgtttttacttctgcctgcgtttgctctctagccaataaaccgtccttgtgtgcgagtcnnnnnnnnnnnnnnnnnnnnnnnnnnnnnnnnnnnnnnnnnnnnnnnnnnnnnnnnnnnnnnnnnnnnnnnnnnnnnnnnnnnnnnnnnnnnnnnnnnnnnnnnnnnnnnnnannannnaaaannnnnnnnnnnnaaaannnnannnnnnnnnnnnnnnnnnncccnnaannannnnnaaaannnaccacancccnanaaaanaannnnnnnnnnnnnnnnnnnnnnnnnnnnnnnnnnnnnnnnnnnnnnnnnnnnnnnnnnnnnnnnnnnnnnnnnnnnnnnnnnnacaccagcaagacaaccaaacacaaccgccncccccccgacggccggcgccncacgcagaaagaccgacgcagcacacggcgcgcgaacgccgccgcgagacgaaggccgccagagacgcagcccgcgcaccgcagagcgcgccacgcacgcacccaccgcacgaaacgcgcgcgcggcgggcgccaaaagcgccggacgnacggacgaaccccgcgcggggaacaggcggcggggccgngacaggcggccgcccgccgccacccgcaacggcccgggagaggcagcccggcgcgcgag

SEQ ID NO: 264242 - DNA, 893 bp, Homo Sapiens
ggttgccatccatggctggtcctacgggggcttcctctcgctcatggggctaatccacaagccccaggtgttcaaggtggccatcgcgggtgccccggtcaccgtctggatggcctacgacacagggtacactgagcgctacatggacgtccctgagaacaaccagcacggctatgaggcgggttccgtggccctgcacgtggagaagctgcccaatgagcccaaccgcttgcttatcctccacggcttcctggacgaaaacgtgcactttttccacacaaacttcctcgtctcccaactgatccgagcagggaaaccttaccagctccagatctaccccaacgagagacacagtattcgctgccccgagtcgggcgagcactatgaagtcacgttgctgcactttctacaggaatacctctgagcctgcccaccgggagccgccacatcacagcacaagtggctgcagcctccgcggggaaccaggcgggagggactgagtggcccgcgggccccagtgaggcacctttgtccccgcccagcgctggcccagcccccgaagaagcccgctgcctttcaccggccccgaaggcccttttaatcctttttttaaaacgcctcttggggtttttatggtccgcctgcctttcttgggttgcccaagaacagaagaaatggtgggtcctcggggccaagcccccttcttcttccccggcctttctggggaaggaaggaaggccaccccccctggagtgggcactgggaaaaggcccaaaaagaaaaactccaaaggaacgcgggcctggcctttcccgccctgtggggcctccctgggggaccctcctccaattccccctgggcccgggaccaaggccccccggtccccacagacc

SEQ ID NO: 264243 - DNA, 712 bp, Homo Sapiens
  misc_feature (208)..(208): n is a, c, g, or t
gggggctgaggatccggaaacgcgccgcagagggtgcggcccagaggaggccgcgggccgggaagggccgggcgggacgggaaacgttagggcagcggcccccggggtgagggggccgagcggacgggcagggccccgaggcgaactctgcccggatgaggaacaaagcagtggggcaggcgcgtgcgccccaagcgcagctgccagngttgggcagcccccttcccgaagcttctggacggaaggccccaggtgttccccgagatgccccaacccgtggcggggtgcacggccaccggccctcgggagaagttgggcggccccgggcgaccccggggacgagtggccgcgtcggtgcagcggttgtgagcaagatggtgggtagcacgtgaccctggaacgccaaacccctgatgcctgttccccaccacccgagcgctcctttctctgatatttggcccccagccgatgcatcacaggatgaatgaaatggacctgggtcccgtgggggatggagcagctgacttcatccctctgggagcaatggccttggcccgtctcaggaaatgcccctgggaattggctggctcacccgcttcgcggggccttccccggccccggccttcccggggggcaattcccaaaccctgggggccccctccctggagcttctcttgccttttggggtgtgggcctttaatgggtaccagaa

SEQ ID NO: 264244 - DNA, 888 bp, Homo Sapiens
  misc_feature (579)..(587): n is a, c, g, or t
  misc_feature (589)..(592): n is a, c, g, or t
  misc_feature (594)..(594): n is a, c, g, or t
  misc_feature (597)..(603): n is a, c, g, or t
  misc_feature (615)..(617): n is a, c, g, or t
  misc_feature (623)..(625): n is a, c, g, or t
  misc_feature (628)..(632): n is a, c, g, or t
  misc_feature (681)..(681): n is a, c, g, or t
  misc_feature (725)..(725): n is a, c, g, or t
cctttcctgtccctaacagtccacaggcaaacaaatggtacagtcataagagccatctgtcacggacccacgcccagaggaacgtgcagaaaaaagcagagctacatggctgtgggcaactataagccaaatatttggctcagaacaggtgtccatgggacaaaaaagaacgatcctccacttgaccaagaaaaaagtgattctcccaggaagcacaaagcatactcttgcccctcaggtgttgcttgtgtaacatccgtacccatccattcggctttcacctgcacccaacggcctggaatcgcaaagagacaccactctgggcagagcagagcagggtatggggtggggagagagggtggagggttttataaacaaacttaacagcaatattgaaaggaggtgggggattgagggagggacagagtgttggagggccagagactagtcctgagatggaaacagcaacttgtacagtggctgagaaaataggatatagttttgatttttttaattgtaaaatattttggagggagaacaaaatcttttaacattttgaataaatttagagttttatannnnnnnnnannnnanaannnnnnnaaaaaacacaannnaaaaannnttnnnnncccgccaccccccaacaaaaaaactttcctaaaccatccctttgccccnccgaccccccttagggggaagaaaacggggccaaagcggttttnttgggggggccgcgccccctggcccccgcgaaaatatttcttaaaaaaacattccgttgggcggggggggcgccccgaggggttatggaagccgtgggtcatttgctggttctccaggagaaaccccggggactataccaaaggggttggtatattccccccc

SEQ ID NO: 264245 - DNA, 881 bp, Homo Sapiens
  misc_feature (16)..(16): n is a, c, g, or t
  misc_feature (375)..(375): n is a, c, g, or t
  misc_feature (398)..(398): n is a, c, g, or t
atagacaggctacgcngagcaaaatactatatgctgattcgtctggtcctgaggcagtcctttgaagtcttgaagcgaaatggctgggaagaaagccgaatcaaggttttcttggatgtcctgatgaaggaggtcctgtgtcctgagagtcagtctcctaatggagtgagattccacttcattgatatttacctggatgaactctccaaagtcggggggaaggagcttttagcagatcagaatctcaagtttatcgatccattctgcaaaattgctgcaaagacgaaggaccacaccctggtacagaccatagctcggggtgtcttcgaagctatcgtagattcagtctccttttgttgcccgaaggagacgatnggaggaacagaaggacaaaagtngggtgatggtgacctctctgctgaggagatacctgaaaatgaggtatccttgagaagagctgtcagtaaaaagaagacagcactgggcaaaaaccattccagaaaagatggactcagtgatgaaagaggaagagatgactgtgaaacctttgagggacacagggcccccttctcccagtttgactataagggctgttgctgatcgactccctggaaatgaccagcaggaagaacacgccccacttcaacaggaagcgcctctccaaactcatcaagaaattccaagacctttctgaaggaagcagtatatctcaactcagttttgcggaggacatttctgctgatgaagatgaccaaatcctcagtcaaggaaagcataagaagaaaggaaataaacttttagagaaaactaacttggaaaaggagaaaggaagcagagtcttttgtgtaaaggaaaaggacagtgaaagcagtcttcaaaag

SEQ ID NO: 264246 - DNA, 747 bp, Homo Sapiens
  misc_feature (15)..(15): n is a, c, g, or t
  misc_feature (23)..(23): n is a, c, g, or t
  misc_feature (66)..(66): n is a, c, g, or t
  misc_feature (71)..(71): n is a, c, g, or t
  misc_feature (135)..(135): n is a, c, g, or t
ccaactgtggtcccnggggttancctggcccaaggtgcaaccttgcccgtgtgcatgctgagcaanacganccgcccatcgccgaagccctgggcccgccctggacccacaagttcgacctgatgtatgcccaanagggcgtttgtgcactggtatgtgggtgagggcatggaggagggtgagttctccgaggcccgtgaggatatggctgccctggagaaggattatgaggaggtgggcatcgactcctatgaggacgaggatgagggagaagaataaagcagctgcctggagcctattcactatgtttattgcaaaatcctttcgaaataaacagtttccttgcacggtttcttgttccctctgagtgcttgagcttctgctgccttccccttcatgctgctgctgctctgtttgctgttcatgacccttatcccttccatcgctgaaggtgagacctgcaaaggggttcttgccaggcccaggaagcataaccccagggactttaaattgaagtcctagggttactcagtatagggaggaaatgaggaccaaaatccaggcacaaactgttgaaggatgagtcttcagctcctttccaagtaggagtataatccagtggtttctgtctttgaaagttagactgctaccctgttcttcctgctgcctctacatttaccaactctggaagcaaggcttggccaggctcctctgtgcattatgagggtttgggagtggggctgggct

SEQ ID NO: 264247 - DNA, 1180 bp, Homo Sapiens
  misc_feature (195)..(196): n is a, c, g, or t
  misc_feature (817)..(817): n is a, c, g, or t
gatttgtttaaaaacccttcgggtttcccccccggggggttttttattgggtgggaattcccagccactagttcatggcccaggatttccttgggaaacaggttatggccatgtttcatttacttacggggccccggcggcaaaacgaatggtttagaaagctcttcgagggccgaaggcggccacaaagggaannctcccgcaagctctccccgcgggggtcagaagaattttactggaacctggaggtatcccattcttcataataataaaaaagaaatgtagtgtataaaagctccaggttacattactaagcaacgacatttccgggagtgaatatacttcctgtattccgcaagctgcttcaagtacatattcgacggccatctgtgcttttcaacaaaactgcgttcttccactgaaagatcctgaaattccaggcttttgactgaagatgaggtagttagtagcaatgaaatgaagtagccaggttgaaaggcaatcagagtggtgaaacttggcctttttaagcaggtcaactatatcaaggttcatggatgccagttccctgcttggcatgctctgcagctgggtaatgatgaacagctcacagatgtgctgcagtctggacacttggtacatctcggcacagatcaggagacacatggcctggaatatgccagctgggcagcaggagtctgtgtacaggtattctaaaaatgacaagaaagtctctttggaaacaccataaacgggaatcaggacactctttgcttccatgtaattaccattaaacatggctgccatcacttcacanacgggccaccaggaaggccctgtgggctggcactgtcgtaccttgaatttcgaagacaacatcggcaagcatcggcttattaaggaaaaacttgagggaagtgttataaaaccacaaaggttttctggcttgataggttttgcaattccttaggcaattaatctttcctggtgtttttaaaatgcatttaactttctcgattacatttgaaacatccccagaatctttcaacttcttcctgatatcttcttccaattcttcccactgaaaagcacctgaataaatgaagcgaaggatgtctgataaacaagaacagaagagggcgtctttaacaatgactcgtaatggtgggttgcctgaaga

SEQ ID NO: 264248 - DNA, 609 bp, Homo Sapiens
  misc_feature (59)..(59): n is a, c, g, or t
agggtctggcacaggctctgcctcatgatttccagaatacacctttacctcatcaccgncttgggaagagtgtgtgtgacacttagcaagaggctcacctagacctccgtgtgcagtgatgctgatcagacagacacatgcattccacccactagtggagagggaggggccctaaccagaggacaggcagttaggagaggacttagccaaagaacttaaaaatatctacacaagtggcaatgtgtgtcatttataatgcacaccattcctgagtcttcacttggtctgccaaagaaaagttcctacagaaaaatcaggatgcttacaggagaaaaataaccaacacagattataataggccaatgtttaaataagaggaaaacaactcacaactttcacttttcatatgtgaggaggaatcagaagcttggtattgacctatctggtgcaattcaaattcatttttttagctgtttcagatccacagggtattgccaagaagcttacccaaaaaatcggtggatttttcagtgttcttagagctgaagggatttttctcagtactactactaaactgataaaagtgggagggcatcttactccactccc

SEQ ID NO: 264249 - DNA, 849 bp, Homo Sapiens
  misc_feature (380)..(380): n is a, c, g, or t
  misc_feature (674)..(674): n is a, c, g, or t
  misc_feature (679)..(679): n is a, c, g, or t
  misc_feature (683)..(683): n is a, c, g, or t
  misc_feature (691)..(691): n is a, c, g, or t
ggggttccctttttccttcctcaggttttgtctcttcctgtgttgtccccagcaagggagagactgtggggtggattgggagaacagattaggagtatagcaaatgaacccagaatggaacagtggggagctaactgtgaatgaggagagtacctgctgcaggacctggaggtcaggtgtgaatgctgtattggcacagggaataaatatcctggcgtctggagccttcacctctccgtcaagtccttcctgtgatactgccatggcacaggatctgagttgcagctctgcaccctaaatcacaccctgggcattgtctgggctgcagggctgccaggttctgtacttgtgtccagctgtggccctggatgctggagctnggagggttttcctgtgcctcagactgtagcctgtagctcttggcctgtgtagagcccccctcctgtgccctcagtggctgtcgtttgttaacatcatcaggaagatgggaaaggtcaggcagaatttttctgccctacaaagggtgggaagagaaaggacacagtattttcatgaatttaccatatatctttgtttctcttcaacgaaaaagttaattgaggcaatgtcatctgctcaaagttgagtggtttattcacaataaactgtaaggttctgattttggcacaccacanaatgngaangagaaganagattcttggcgggccgccctcggcccctggaaaaacttttcaaaacccttcctttggggggccggggccccattaaggaaagggaaaaagggctcaataactggtttccaaaggaaaaaccgcgggcaagtgaaaaggggctttggagttccccccc

SEQ ID NO: 264250 - DNA, 766 bp, Homo Sapiens
cagctccttcttgttgaatatgttaaccagaaaacacataaaaagctaagcaatcatgaataatgtttccaaacattgataggagaggtatctcaaggcagcacgtgattaactatcacataaatgaaagaaccaataatagatttattcagagaagggtgagattacaacaggttggattattccatcaggttttttcttaatatttttcataaatgcaaatgtaatgaaaaatctgaccagagattcataatgcacatttttaggaggaagacacaaaatagtccctttcagtttctagactaaagccatagaggttgaggctggccctaccatgatcgtggctgtggcggtggcatattctccacctccccaacactctccaatattgggacatcgagcttcctcacatacctgtatgcaaaaggaaatggaacaccattaggttgacaatatccaccaactaaacagtgggtgactgtgattagacattttaaacttcctcattgtttacaacatatttttgaagacattcactattcaaaaatgctgttaagacccaatttttaaattaaaaactttacgaatgtatatacttcatatgtgcaaataaaaaagtctgaaagattatatactgaagagttaaaggtaaaggagtatggtttatatatggcattgcgtatgtgacataccttcatatttaattttatattctttccaacaaatcatatatctaatttgcaatataaaacaaacaaagccttgt

SEQ ID NO: 264251 - DNA, 1022 bp, Homo Sapiens
  misc_feature (49)..(49): n is a, c, g, or t
  misc_feature (193)..(204): n is a, c, g, or t
  misc_feature (221)..(283): n is a, c, g, or t
  misc_feature (349)..(465): n is a, c, g, or t
ttagactgggtaacctataaataataggaatttatttctcacagttttngaggctggcaaatgcaagatccaggtgctggtacgttcagtgtctggcaagggcggctttctggtccaagatggtgcctttttttctgcatcttccatagggaatgaacactccttatggtagaagggatggaaggaccaggcnnnnnnnnnnnnggatacagcaggatctnnnnnnnnnnnnnnnnnnnnnnnnnnnnnnnnnnnnnnnnnnnnnnnnnnnnnnnnnnnnnnngctctccagcgatcatcccacctcagcctcttggatagctgggaccacaggcacgagctaccatgnnnnnnnnnnnnnnnnnnnnnnnnnnnnnnnnnnnnnnnnnnnnnnnnnnnnnnnnnnnnnnnnnnnnnnnnnnnnnnnnnnnnnnnnnnnnnnnnnnnnnnnnnnnnnnnnnnnnnatgagtcactgcacccagcccgcagcctcttttataagggcattaatccccttcatgagggatattctctcatgacttaatcacctgccaaagaccccacctcttaatactacatcagtgatgggttcaatgtatcaattgggtgggagggggcacattccgaacatagcatcctagtcttctgggttttattaagatttattaagacctggaggcatgaaacactaacactactggaatgggaacttcacccatcggatgaagttgccctttaggaaatacctggttcattaaaaaagccccttaaactatggcgcggacaaaacctcgccgcggagagggattacccttcccttgtttgggccgggccctcgggccccctgaagaaaacgctttctcttagaaaccactttccttttgggcgccccacgggccccccccttaacgctcaagtgtgcaacattgggccctataagcttgtggttcccctcaggagagaccccccggggccatagggacacaaaggggcttttggggactttctctcaccccacacc

SEQ ID NO: 264252 - DNA, 762 bp, Homo Sapiens
  misc_feature (194)..(205): n is a, c, g, or t
  misc_feature (222)..(284): n is a, c, g, or t
  misc_feature (350)..(466): n is a, c, g, or t
cttagactgggtaacctataaataataggaatttatttctcacagttttggaggctggcaaatgcaagatccaggtgctggtacgttcagtgtctggcaagggcggctttctggtccaagatggtgcctttttttctgcatcttccatagggaatgaacactccttatggtagaagggatggaaggaccaggcnnnnnnnnnnnnggatacagcaggatctnnnnnnnnnnnnnnnnnnnnnnnnnnnnnnnnnnnnnnnnnnnnnnnnnnnnnnnnnnnnnnngctctccagcgatcatcccacctcagcctcttggatagctgggaccacaggcacgagctaccatgnnnnnnnnnnnnnnnnnnnnnnnnnnnnnnnnnnnnnnnnnnnnnnnnnnnnnnnnnnnnnnnnnnnnnnnnnnnnnnnnnnnnnnnnnnnnnnnnnnnnnnnnnnnnnnnnnnnnnatgagtcactgcacccagcccgcagcctcttttataagggcattaatccccttcatgagggatattctctcatgacttaatcacctgccaaagaccccacctcttaatactacatcagtgatgggttcaatgtatcaattgggtgggagggggcacattcagaccatagcatctagtcattctggttttattaagatttattagacctgaggcatgaaaaatagcatactggatgggacttcagcatcgatgagttgccttagtaatactgttaataaaaagcacgtaaatatgca

SEQ ID NO: 264253 - DNA, 1238 bp, Homo Sapiens
  misc_feature (774)..(804): n is a, c, g, or t
  misc_feature (1117)..(1131): n is a, c, g, or t
ggagcccaagcagctcccctagggactgaccggacctgacctcccctccctgtgtctgggtcttcaggttttagtttggtctttgttcatctgagttgtgctggggcaacgcaggaagtgccctgggtaacctctgctgtgcgctccttcccaggtggcgccatggattcctctgggggctggcgcatgccaggaaagcctgggacacacgggacactctcttctttatcgaggacacttggaaaggtgactgatatgggtgcttggcttctctggtcccagcttgccctccggggagcaggggctctgtcttgtcccagatgagctgagagcccctgagaggagggctttcccagccctgggaccctccgaagtgggtgtgcggggtctcacaggtgcttcctgggacttcctgtggctgcacagggcttggctttgtcttcgttcccggtggaaaaccgtgggagaggaagcttgggcctctactccaagtatcagagcctgttcaccctcctccctttggtagcttgtgaatgtgccaggtgtttcgaggtaggcttgccttctggcagcatggactttgttaaaataataggcggaaagaagaggcctgggaagggcccccagtcttttggaatgtcctggtcacagggtcatgtcagctgccagttctcgtctcccgtcctggagttgctcggtcttgcggagctgcccgcctgcctgttctggcggctccagcgcaggctgtccctgctgctttgatcccaggtgaannnnnnnnnnnnnnnnnnnnnnnnnnnnnnngagacggagtccttgctctggtgccccagccaggaatgcaatgggcgccttctccggttcacttgcaaccttcgggcttcaggcgattcctcctgccctcaaccttcctgaagaaacttgggaattacagggtgcattgccaccccaggccccccctggattttttgggatttttatagaagaaaaataggggtttcccccctggctgggtccagggctgggtccgtgaaacactcctggacctccatggatttgggcccgcgccttaaacctccccccaaggggggcgggaaatatataaggggggggaagnnnnnnnnnnnnnnnaggtgtggatttcccagggggaaatttcttttttcctctaaagggcgcccggccaagaggggtggggtctcctctggtgaagagggtgttcgaaaacggggtgtgct

SEQ ID NO: 264254 - DNA, 1042 bp, Homo Sapiens
  misc_feature (1021)..(1021): n is a, c, g, or t
gggctcacagaagccttggcgcagtccagctcgcggggggatgggcgagggtggggggcagaaatagcaatctgcagccggcaagggggcggcacttagtcaggctccgcccacaagacccggctgccgtccccgcccgcctgcgcgggatcgactccgcatgcgcactggagcctcggaatacagccaggactctcccgtcggaatgcgcccctaagttgggccaagcccattcattcaggggctcccgagccacgtaggcgccatccctggccagaggggttctgaggaggtgggcaagggcagacactctctcccggtctcaaattcgaaatagggactagaagggaacttcacgcgaggcctcgcaactgtcgcgagaatcagaacaggaaatctaggaaccgagaacactaagagcccgcggattttaaacaggaaaaagaaagggcggagcaaactctggcggatagttgtgagtaatccctggtccttggaataagtgtcgacctgagacagaaggggaactgtcagagagctgccggagaccctgaaaaaggccagagacggggacttgtggggctgacgaatggaatcacccaaggagaggtctctgactctaacaaaacaccttggggacggagctccttggctgggatacagagcagaaacaagtccgggatcttttagtgaattgctgccggcttctaaggcctggagcagatattcaacaacaaactccacggacctagaaactctccacttatcctactattgtagacggtggcttacttttagtcttccctatgctctaagcttctggtagtaggaatcgtgcctaactcactactgtatcttgtgaacctagccccgcgcctggtggcacgtcaaattctcggtaaatatttgtggattaaatgtgaaagactgcctgagtgtttaacctggatttttctgagtcgctgatgggagaacagtaggtagacggggaaccagcgcctctggtggggcttgtggttcngtgacgagacatgctgggaac

SEQ ID NO: 264255 - DNA, 1405 bp, Homo Sapiens
  misc_feature (1290)..(1290): n is a, c, g, or t
  misc_feature (1304)..(1305): n is a, c, g, or t
gggaagatctgagttcatgtagctggtgttggcttagggtctgggaggaaggcttttgggaagatgtaaataagaacaaaatctgcagccacctgggaagcctggcctcagtgtggaagagaaggcagcaggattattacagaaccttgtgaagccaacgcgggcagccgccaggagctgcagaccgagaggatctcgtcctttcttgcggcccagggagaccaggcctttcattctgggctcgagaccaacaattcgaattccgaactccccctgcgtgtgggactcaaggttgcccagggctcacctctgatgggcgggcaggtgagcgcttccaacagcttctcgaggctgcactgcagaaatgccaacgaggactggatgtcggcactgtgtccccggctctgggatgtgcccctccaccacctctccatcccagggagccacgacacgatgacgtactgcctgaacaagaagtcccccatttcgcacgaggagtcccggctgctgcagctgctgaacaaggccttgccctgcatcacgcgccctgtcgtgctgaaatggtccgtcacccaggcactggacgtcacagagcagctggatgccggggtgcggtacctggacctgcggatagcccacatgctgggagggctcggagaagaacctgcactttgtccatatggtgtacacaacggcgcctggtggaagacacactcacggaaatctcggagtggctggagcggcatccacgcgaggtggtcatcctggcctgcagaaacttcgaggggctgagcgaggacctgcacgagtacctggtcgcctgtatcaagaacatcttcggggacatgctgtgtcctcgtggggaggtgccgacactgcggcagctgtggtcccggggccaacaggtcatcgtctcctatgaagacgagagctccttgcgccggcaccacgagctgtggccaggagtcccctactggtggggaaacagggtgaagaccgaggccctcatccgatacctggagaccatgaagagctgcggccgcccaggagggttgttcgtggccggcatcaacctcacggagaacctgcagtacgttctggcgcacccgtccgagtccctggagaagatgacgctgcccaaccttccgcggctgagcgcgtgggtccgagagcagtgcccggggccgggttcacggtgcaccaacatcatcgcgggggacttcatcggcgcagacggcttcgtcagtgacgtcatcgcgctcaatcaaaagctgctgtggtgctgacggngacccttctgaagnntcgggacgcgggcgtctgcagtttccacccccgaaattttcaaagtattggttgacttttggtttggggccaaaatgttggggggatcactaggaaccgg

SEQ ID NO: 264256 - DNA, 535 bp, Homo Sapiens
ggactgaagattggcaaaaacgaaaagcttcttcctccaagagcccattgaagaagcccagtgatgagacggtgagatggtttgagtcctcggtgcctgggtagcaggaagaaagacctgcatcctgcatctgtacttggggaagccagcggagaggacggggaggttacttctctaagtttctgcagaaatattgaaggctggagtttggaatccttaaacttggccttctcaaactcagcagcagatctccgggattctgctgttattatccaaaggcgttggaaggaaagatggatcttcttacatgctagaagttttaaacggtccttaacatgcctttgttcaagcaccttccagaatgtaaggttcagcagctctggtttctattacggtgacttgaatgtcagattcaagggcccggcgtcaaaggaaattggttttgactttttgtaatctaggagcgacagttcgtgagatgtttattcagtgttaaagagcctgtttttctaccaaacaataaaaccaagagaag

SEQ ID NO: 264257 - DNA, 901 bp, Homo Sapiens
  misc_feature (71)..(72): n is a, c, g, or t
  misc_feature (138)..(387): n is a, c, g, or t
gattaatttattattaggccaggtgggaaatttaaaaaaaactttaccagtttaacctttccccaatccannccatcaaaaaaaagggagaaaccaggcaagccaagaaggaagacaggcagggccacggtggctctnnnnnnnnnnnnnnnnnnnnnnnnnnnnnnnnnnnnnnnnnnnnnnnnnnnnnnnnnnnnnnnnnnnnnnnnnnnnnnnnnnnnnnnnnnnnnnnnnnnnnnnnnnnnnnnnnnnnnnnnnnnnnnnnnnnnnnnnnnnnnnnnnnnnnnnnnnnnnnnnnnnnnnnnnnnnnnnnnnnnnnnnnnnnnnnnnnnnnnnnnnnnnnnnnnnnnnnnnnnnnnnnnnnnnnnnnnnnnnnnnnnnnnnnnnagactgtatctcctcctccagaggtttagaagcaacaaagcgtgttctttctcgtctcatcttgccacctccaccacctactccagaagataaaccattggctgcaggcaaactgaaatttggatatgaaaagccactttctcgttgttctctattttgtccgggtgtcatatttttttcatatccagtactgcacttgttatctattctttgattagtcttcctgaattcacccagaaggagtcagagatggtttaaaataaacacttcgatttgttgcctatggaaactggctttggggtcataagtctctgaacaggaggatattgagaatccaccttttctcttttggcctgaaaatctgtgatatctatcccactcctatcaagaggagaattcagaggagaagaaacaatggatggaattctttttgatccgctaaagggcttgacatcttctctaaagactgcaatattcgccgagctgttgaactggtcacaccgtaagattgtga

SEQ ID NO: 264258 - DNA, 686 bp, Homo Sapiens
tgtgtcttttggcagtcagtccagatgggaattggctagctgcatcaggtaccagtgctggagtccatgtctacaacgtaaaacagctaaagcttcactgcacggtgcctgcttacaatttcccagtgactgctatggctattgcccccaataccaacaaccttgtcatcgctcattcggaccagcaggtatttgagtacagcatcccagacaaacagtatacagattggagccggactgtccagaagcagggctttcaccacctttggctccaaagggatactcctatcacacacatcagttttcatcccaagagaccgatgcacatccttctccatgatgcctacatgttctgcatcattgacaagtcattgccccttccaaatgacaaaaccttactctacaatccatttcctcccacgaatgaatcagatgtcatccggaggcgcacagctcatgcttttaaaatttctaagatatataagcctctactcttcatggatcttttggatgaaagaacactcgtggcagtagaacggcctctggatgacatcattgctcagctcccaccacccattaaaaagaagaaatttggaacctaaaacagggcactgtctgtgtccttccttgaactgtctaccctgttgcttttcacaaatcatggtaataaaacaaggtattcttgg

SEQ ID NO: 264259 - DNA, 428 bp, Homo Sapiens
  misc_feature (15)..(15): n is a, c, g, or t
  misc_feature (30)..(30): n is a, c, g, or t
  misc_feature (46)..(46): n is a, c, g, or t
  misc_feature (376)..(376): n is a, c, g, or t
ttttgtccatttggnaaagggggccaaatnaacttgttccaaatgnatgccaaaaacatgttaggccatccatggaaaaaggatgtgccatcggtcctccttgggaatgaaaaactgaatgtgtgtgaataggaattatccctttggaagcccaaaggtggtgaaaagccctgccttctggacagtccggctccaatctgtatactgtttgtctgggatgctgtactcaaatacctgctggtccgaatgagcgatgacaaggttgttggtattgggggcaatagccatagcagtcactgggaaattgtaagcaggcaccgtgcagtgaagctttagctgttttacgttgtagacatggactccagcactggtaccntgatgcagctagccaattcccatctggactgactgccaaaagacacaatggc

SEQ ID NO: 264260 - DNA, 1039 bp, Homo Sapiens
  misc_feature (191)..(191): n is a, c, g, or t
  misc_feature (233)..(233): n is a, c, g, or t
  misc_feature (299)..(299): n is a, c, g, or t
aaaatacattcttagggtgggccctgcaggaggagacaggccgtccacatctccttcccaatagtgtgtccagggcgtttccaaaatctgtgggtccctcacagcttctgatgacagctgctaatgccatttgctgaggaacaaggatggggaggatggcgagggctggccccaggcggccacaccagaangtcgggagaaaggcccaaggcggatgccacgcccaggcagtnggtgactgccccccactccttttctgagtctatcagcattgtttggttttcttcttgttgcttttnaaatcctcgagcggcaccctgaccaaagcagatggtagagggtattctatgtctgtagatccacctctcacctgccggtgcaggggaggctgccacaggctcagagcagatttccatggcctccccttctgaccgctctccactgtcccctggggcttctgctgaggccgggcttctgcttttcttgggcttatcaaaccggaagtccgcggggtacaggtgcatcctcaccatgtgatccttccggtctctgcgggtcttgaacttctctgtgcagccttctaccaagcactgatacatgtcctgcctctcagacaggatctggaagagcgaatcgtgccactccaggatgtgggcgtccagcaggtgtccggaagggaaggcccgcttgcaaaaggagcaaacatttccgtgcagcgtgtggtagtggtgctcgtagtcgtccagggcatcgaacacctggcagcagccggccacctggcaggcaaacgcgggcaccctgggcttctcaggcacgtcggccacctgcatgatcacgtcctggaggtagaggtggcgctgcacgtccccatcctcgaagaactggtgctcccgcgggaagagcacggggcgcgcaacgaagcgaaagagcgcggccccagccccgggatcccgctctacaggcaacggctccgccgccccgggccccgcagcgaggcgggcgcacagcgcggggggcaactgcatcaccccgggcgccc

SEQ ID NO: 264261 - DNA, 539 bp, Homo Sapiens
catttattgcagtttatatatatgctacttttacttgttcatttctgtctcccctaccaggctgtaaatgagggcagaaaccttgtttgttttattcaccatcacgtaccaagtgcttggcacatagtgggccttcattaaatgtttgttgaataaaagagggaagaaggcaagccaaccttagctacaatcctaccttttgataaaatgttccttttgacaatatacacggattattatttgtactttgtttttccatgtgttttgcttttatccactggcatttttagctccttgaagacatatcatgtgtgagataacttccttcacatctcccatggtccctagcaaaatgctaggcctgtagtagtcaaggtgctcaataaatatttgtttgggtggtttgtgagccttgctgccaagtcctgcctttgggtcgacatagtatggaagtatttgagagagagaacctttccactcccactgccaggattttgtattgccatcgggtgccaaataaatgctcatatttattaaaa

SEQ ID NO: 264262 - DNA, 1158 bp, Homo Sapiens
  misc_feature (31)..(31): n is a, c, g, or t
  misc_feature (628)..(637): n is a, c, g, or t
  misc_feature (1134)..(1134): n is a, c, g, or t
aaatacccgggttgccaaatgatgaacgttnccgtgtcctcatctcctctcttaaggactgtcttcatggcattgaagccaagtcctacagtgtgggtgccagtgggagctcttccaggaaaagacatcgctcccgggaaaggtcacctagccggtcccgggagagcagcaggaggcaccgggatctgcttcataatgaagatcggcatgatgattatttccaagaaaggaaccgggagcatgaggagacaccgggatagagaacgggaccggcaccactgagaaaggagtctggttggaagcaaatgtttttttaatggacttgcatctcctcaccttgatcaggactaaaggacggaggccgtcccacccccttcactttcctccaaacccctaactccctccagacacccaggggaatacccctctgccccacaggaattaaagactgctttgtgcagtcctcccaatcccacaccctccttgttttgccagggggaaagaaaccatatatgacttccgtgtggattgccgagggtggtgcacataaccagggaatgaaaaacacatgttccaggggcccccatggggtctgccaatagaaaaaatgggtggccttttggtcccnnnnnnnnnnccgaaatggggggtttccgtggaaatccacccgggggaaggcccggtttccgaatggggctaataggacttgaaatagggggaagggagattttccccctttcccccgaagagggtaaggaattaaaaacttctcttcccacatgtggccgggggaatgccttaaggggaaaaaagcggcgacctgcgaacccggtttgccccaataagattagttggcccccggggggggttcacgtgtgcccccttcacagggaagggggaggaatttccaaaggggcagaggcacccaaagaaggggagacccacaaaaaacccccttttggcccctaacccataaacacacccccttcccttctctggagattgacaccacacccttgtgtctacgcctatttacccagagggccccctttatttgggagagagcagaggggcacgccactggagaattataccccggagagaatcttataccgtgtttgtgggaaaaaaagncgttaaccttatcgcgggcttccc

SEQ ID NO: 264263 - DNA, 661 bp, Homo Sapiens
attcggcacaggaagatactgaaggtgttcatgaagtctttagtcgaaaccatgctgctcctttctccaaagttctcacctttctgagaagggggccttttgagctagaagctttctattctgatccccaaggagttccatatccagaagcaaaaataggccgctttgtagttcagaatgtttctgcacagaaagatggagaaaaatctagagtaaaagtcaaagtgcgagtcaacacccatggcattttcaccatctctacggcatctatggtggagaaagtcccaactgaggagaatgaaatgtcttctgaagctgacatggagtgtctgaatcagagaccaccagaaaacccagacactgataaaaatgtccagcaagacaacagtgaagctggaacacagccccaggtacaaactgatgctcaacaaacctcacagtctcccccttcacctgaacttacctcagaagaaaacaaaatcccagatgctgacaaagcaaatgaaaaaaaagttgaccagcctccagaagctaaaaagcccaaaataaaggtggtgaatgttgagctgcctattgaagccaacttggtctggcagttagggaaagaccttcttaacatgtatattgagacagagggtaagatgataatgcaagataaatt

SEQ ID NO: 264264 - DNA, 655 bp, Homo Sapiens
  misc_feature (36)..(36): n is a, c, g, or t
  misc_feature (79)..(79): n is a, c, g, or t
  misc_feature (92)..(92): n is a, c, g, or t
  misc_feature (105)..(105): n is a, c, g, or t
  misc_feature (226)..(226): n is a, c, g, or t
  misc_feature (286)..(286): n is a, c, g, or t
ttttaagcccacgcacgtgcggggtaagcagggacnaaagaaaccctgcggccccagcaggtctccccccagagtgganttggggcatgtancccggaaacgganactgggtagctcccctgcctaggtttgctgtcttcccctctccctcaggccatactctcctttacccatactactggactggactcaggctggaggcagatagacacagtatagggggaangggcttgcttctcccaaacccaccagttctccactgtctcttctggcccaggaattagtntctgtgggtgccacagctgaagtcagtttgtcttgctggtttaaatagatctttcagagctgggtgctgggtttgccatctttttgttttctttgaaaagcagcttagttaccctttttataaataaaatatcttgcagttatctttgtcctttccccacctacacccccaataatttccctagagattaaggagtaaaggctgggctatggcagctctgtccacaaagccttctctcccatccttgcctgttcctttgtacttccaggctcattttaaagttgtatttaaaggactgccctcggaaatgcttctgtttagcggaacttgtattcagcctgacacgctttgccaggaacaaacctcatg

SEQ ID NO: 264265 - DNA, 1236 bp, Homo Sapiens
gggggaggaggctgccgggcagagcgcaggccaggatcagcgcgggctgtgagtccaggtcagccgtcgggacctcgggctccgggttcgaagagcggctcccggctgcgggtgctttgccaggagagcccttccggacagaggagccggggtctggaaggagcggccgacgcgacgctcgcctgccacggggctctgggagtaagcctgtctgcctggcgggccttcaggtgcggcgtgagagatggatgccaattcaaaagacaagccccctgaaaccaaggagtctgcaatgaataatgctggaaatgcctctttcattttgggaactgggaagattgtgactcctcagaagcatgccgaattacctcctaatccttgcacaccagatacttttaaatcacctttgaacttttccacagtaaccgtagagcaattgggaattacacctgaaagctttgttaggaactctgcaggaaagtcatcatcctaccttagaaaatgtagacgacgttctgcagtcggtgctcggggctctcctgaaacaaaccatctgattcgtttcattgctcggcagcaaaatataaagaatgctaggaaatctcctttggcacaagattctccttcccagggcagccctgcactgtatcgaaatgttaacactttaagagaacgaatatcagccttccagtcagcttttcactccataaaggaaaacgagaaaatgaccggctgtctggaattctcagaggcaggaaaagagtccgagatgacagacttgaccagaaaggaaggtctcagcgcttgccagcagtctgggttccctgcagtgttgtcctccaaacgtcggagaatatcctatcagagagactctgatgaaaatctgacggatgctgaaggaaaagtaattggtctccagatattcaatattgatacagacagagcatgtgcagttgaaacttctgtagatctttctgagatatcatctaaacttggttcaacacagtctggatttttagttgaagagtctcttcccctttcagagctcacagagacttcaaatgcactaaaggttgctgactgtgtagtgggcaaaggatcaagtgatgccgtttcgcctgacacgttcacagcagaagtgagctcagacgcagtccctgatgtcaggtcaccagctactccagcctgcaggagggaccttcccacccccaagacctttgtacttcgttctgtact

SEQ ID NO: 264266 - DNA, 851 bp, Homo Sapiens
  misc_feature (765)..(775): n is a, c, g, or t
gggacagcaggtgaggctctcctgccccatctccttgggctgcccgtgcttcgtgctttggactaccgccccgcagtgtcctgccctctgcctgggcctcggtccctcctgcacctgctgcctggatccccggcctgcctgggcctgggccttggttctccccatgacaccacctgaacgtctcttcctcccaagggtgcgtggcaccaccctacacctcctccttctggggctgctgctggttctgctgcctggggcccaggggctccctggtgttggcctcacaccttcagctgcccagactgcccgtcagcaccccaagatgcatcttgcccacagcaccctcaaacctgctgctcacctcattggagaccccagcaagcagaactcactgctctggagagcaaacacggaccgtgccttactccaggatggtttctccttgagcaacaattctctcctggtccccaccaatggcatatacttcatctactcccaggggggtcttctctgggaaagcctactctcccaaggccaccttcctccccactctacatggcccatgagggccaagctcttctccctcccaataaccccttcccatggtgcctctcctcaggctcccaaaaaaatggggtatccccagggctttccgggcaacccctggcttgccgccccgtgggtcccccggggggcctacggtttccaagctgcaccccaaggggagaccaacttaattccaacccaccacggaatgggcctctnnnnnnnnnnntaacgtcctcaccccccctaacaaaagggccactaccttcttggggggcgctagcaccccgggggaaaaacttggg

SEQ ID NO: 264267 - DNA, 926 bp, Homo Sapiens
  misc_feature (722)..(722): n is a, c, g, or t
  misc_feature (853)..(853): n is a, c, g, or t
  misc_feature (855)..(855): n is a, c, g, or t
gggaggactggttccggcgggctggtgaggaatggagccggtaggctgctgcggcgagtgccgcggctcctccgtagacccgcggagcaccttcgtgttgagtaacctggcggaggtggtggagcgtgtgctcaccttcctgcccgccaaggcgttgctgcgggtggcctgcgtgtgccgcttatggagggagtgtgtgcgcagagtattgcggacccatcggagcgtaacctggatctccgcaggcctggcggaggccggccacctggaggggcattgcttggttcgcgtggtagcagaggagcttgagaatgttcgcatcttaccacatacagttctttacatggctgattcagaaactttcattagtctggaagagtgtcgtggccataagagagcaaggaaaagaactagtatggaaacagcacttgcccttgagaagctattccccaaacaatgccaagtccttgggattgtgaccccaggaattgtagtgactccaatgggatcaggtagcaatcgacctcaggaaatagaaattggagaatctggttttgctttattattccctcaaattgaaggaataaaaatacaaccctttcattttattaaggatccaaagaatttaacattagaaagacatcaactcactgaagtaggtcttttagataacccctgaacttcgtgtggtccttgtctttggttataattgctggaaggtngggagccagtaattatctgcagcaagtagtcagcactttcagggatatgaatatcatcttggctggaggccaggtggacaacctgtcatcactgacttctgaaaagaaccctctggatattgatgcctcgngntggtggttggactgtcattttagtggacaccgaaatccagaagtgccactgttgctcctcaacgagggacg

SEQ ID NO: 264268 - DNA, 734 bp, Homo Sapiens
  misc_feature (583)..(620): n is a, c, g, or t
ggtagccactttccttttgttgtcattcttgtgatcctgggtgggtttctgtggcactcttttagaacatgtagcatcatcttagaggtctatttttaaaaaatgtgttgaagaggaaaaaaccattctcacgatggggcttaagtcattgtccaggaataagattggcgtggtgcccatgacatcaccgtcactctgcctaaaagcactctagagctacttgttcacgtggagaggaaggatattttgcgaagcaacagccgcaggtggagagccctgttcacctgatagggtctagctgtgacagtaaatataataccgctgtttccttgggtacagatttgagtgttcatgtgatgagactgtaaacctcatttttcggttcctctgtttaaaaaaacatctgaaggatgaactaaggctgctggtgccctgagcaactgataatgcaaatgtggacaaagtgtctgttttctactccagcctgttcatatggaccaaatttcaacaaggaactcaaggaaaatttgtacctgccgtatttatgctttcatgtaaaaaagggttggggggaggggtgtcnnnnnnnnnnnnnnnnnnnnnnnnnnnnnnnnnnnnnnccactgtttctgtctggttttaaaacaaattacagttttgtatggattttttaaatgtacattttggaacaaatgatcaaatattttctgaaataaaactaaaggcagaaaatt

SEQ ID NO: 264269 - DNA, 913 bp, Homo Sapiens
  misc_feature (582)..(694): n is a, c, g, or t
  misc_feature (704)..(767): n is a, c, g, or t
ggggtcgcccagatcccacccgcaggaccccaaaacccaatgatcctgcagcagcccttgcagcgaggcccccagggaggggcccagcgcctcccgcgggccgccttgggggtgacttggggcctggacgccagctcccctctccgaggagctgtgcccatgagcaccaagcggccgcctggaggaggagcaggagcctctgcgcaaatatttctgtctgaggagaacatggccacccacttctctcaactcagcctgcacaatgaccatctccccagccctgcccccactcaggagcccttgctctgagctgcttctctggcgctatcctggcagcctcatccctgaggccctccgtctgctgaggctgggaggactagcgcaagagcagctgccccgcgacagcatccgtgcgcataatggacccctgattgctggtgcaccgtgccccctccccctgccttctttctcacaaccccccagacccgtggcctcccgtaaaggggacgggttgcttccctctcccgctaaagcaggactccctgccacaaaaagcccctccctccacacaagcacctggtnnnnnnnnnnnnnnnnnnnnnnnnnnnnnnnnnnnnnnnnnnnnnnnnnnnnnnnnnnnnnnnnnnnnnnnnnnnnnnnnnnnnnnnnnnnnnnnnnnnnnnnnnnnnnnnnngctcatcgcnnnnnnnnnnnnnnnnnnnnnnnnnnnnnnnnnnnnnnnnnnnnnnnnnnnnnnnnnnnnnnnncctcccttcatcccgccctacgccgcacaatccctgctatctccaaaattaaccccctccccccatatctcccccaaacgcttcttttcccccacatatccgcttttccgtaatatatggtcgcccccctgccccccactttattg

SEQ ID NO: 264270 - DNA, 853 bp, Homo Sapiens; identical to SEQ ID NO: 177244

SEQ ID NO: 264271 - DNA, 1432 bp, Homo Sapiens
  misc_feature (1020)..(1020): n is a, c, g, or t
  misc_feature (1405)..(1405): n is a, c, g, or t
gaggagcgaggtctggcccccaagttcgacaccacctttgagagcgcgcggcccacgcagacccacatggcgctggtgcagctggagcgcgtgggcctcctccgcttcctggtcagccagaacgtggacgggctccatgtgcgctcaggcttccccagggacaaactggcagagctccacgggaacatgtttgtggaagaatgtgccaagtgtaagacgcagtacgtccgagacacagtcgtgggcaccatgggcctgaaggccacgggccggctctgcaccgtggctaaggcaagggggctgcgagcctgcaggggagagctgagggacaccatcctagactgggaggactccctgcccgaccgggacctggcactcgccgatgaggccagcaggaacgccgacctgtccatcacgctgggtacatcgctgcagatccggcccagcgggaacctgccgctggctaccaagcgccggggaggccgcctggtcatcgtcaacctgcagcccaccaagcacgaccgccatgctgacctccgcatccatggctacgttgacgaggtcatgacccggctcatgaagcacctggggctggagatccccgccggggacggcccccgtgtgctggagagggcgctgcaacccctgccccgcccgcccacccccaagctggagcccaaggaggaatctcccacccggatcaacggctctatccccgccggccccaagcaggagccctgcgcccagcacaacggctcagagcccgccagccccaaacgggagcggcccaccagccctgccccccacagaccccccaaaagggtgaaggccaaggcggtccccagctgaccagggtgcttggggagggtggggctttttgtagaaactgtggattctttttctctcgtggtctcactttgttacttgtttctgtccccgggaggctcagggctctgagagctgtgctccaggccagggggttacacctgccctcccgtggtccctcccctgggcctccangggcctctggtggcgggtcccgggaagaaaccacacccccagaggtgacaagctgagccccctggcaacaccccagccctctggacttgctggggttgtcccaaaaggggagggctggggcccctccccgggtctcccagctttaaacagggaggggaacctcccctctggcccccaagggccctcccttcctggggcgccctaaaggccccacccctaacccctccttccaggggccccctgccaggagggggaaaccccccctttgaaaggggggggatccagaataagggcgtgcgccttggcctctttgggggctgggaaaggaaaacaccgcggctccccccaaggcttccctgggaaacaagcccctctacgggacatnaaaaaacacattttcttctcttgtgcc

SEQ ID NO: 264272 - DNA, 465 bp, Homo Sapiens
  misc_feature (28)..(28): n is a, c, g, or t
  misc_feature (57)..(57): n is a, c, g, or t
  misc_feature (68)..(68): n is a, c, g, or t
tgccccgttttcctctgccgctggaganaaatccctggggtcccccgggagagcctncctgccacggnaaaagacgcctcctcgggaaatttgtgcacagagataacaacaggggatatgccatatgaagatgaaggcagaattctacaagcccagggatgccaaagattgccagcaaaccaccagaagctaggagagaagtgtggattagattcttcctcacagccctcagaaggaaccagccctgccaagaacttgatctcagacttctagtctccagaactgtgagacagtgcattttgttttgtaagtcagccatatggtttgtggcactttgttatggcagccctaggagatgaagacaatatgcaacatggtatgtccattataggacactgtgggccataaatgtgttctttggcctgaagaaataaaacttggtggtccaagttgatgtcttaaaaa

SEQ ID NO: 264273 - DNA, 376 bp, Homo Sapiens
agggccgggacttcaccctgaagcccaaaaagaggagagggaagaaaaagctgcaaaaaccagtagagatagcagaggacgctacactagaagaaacgctagtgaaaaagaagaagaagaaagattccaaatgaatccttcccagccggggccttccgaccactcagctgtcagggcactgcgggggcagacacctctggcctgaagtcacagcagagttcaccccagagcgcctgggcgcatcttgtggcatgcccatgggctgccgagtcctgccctctcgccacatttcccccaagttacattcccaggaggacctttttaatgttctcaatcgtggctctcagacacaaataaatttttttgtaaactctga

SEQ ID NO: 264274 - DNA, 764 bp, Homo Sapiens
ggtacgaacattcgtcatatcaggatgacctcgagagctgaggctctagccacctaaaaccacgtgcccaaacccaccagtttaaaacggtgtgtgttcggaggggtgaaagcattaagaagcccagtgccctcctggagtgagacaagggctcggccttaaggagctgaagagtctgggtagcttgtttagggtacaagaagcctgttctgtccagcttcagtgacacaagctgctttagctaaagtcccgcgggttccggcatggctaggctgagagcagggatctacctgggcttctcagttctttggttggaaggagcaggaaatcagctcctattctccagtggagagatctggcctcagcttggggctagagatgccaaggcctgtgccaggtttccctgttgccctcctcgaggttgggcagccattcaccagccacagttaaggccaagccccccaacatgtattccatcgtgctggtagaagagtctttgctgttgctcccgaaagccgtgctctccagcctggctgccagggagggtgggccctcttggttccagggctcttgaaatagtgcagcctttttcttcctatctctgtgggctttcagctctggctccttgggttattaggagaatagatggggtgatgtcttcccttatggtgcctttttccaacatagcagaattaatgttagggagctaaaatccagtggtggtgggtggaatgcagaagggggaatgcaccccaccatttcct

SEQ ID NO: 264275 - DNA, 753 bp, Homo Sapiens
  misc_feature (367)..(404): n is a, c, g, or t
  misc_feature (419)..(419): n is a, c, g, or t
gggagctggagggagcccaccatttgcacccacctacccaccctcacccctgttcagatgaatttccagaaagagctaaggctcataaggttcccttttaagtattatttaatagttgaggccagatacttacatgcaagtctgggttatggttgttttgcctttctcagcttgtgaagtcattctaaagctagaggaagtatgtgatatacacatggactaaggctcaggtgacactatggctagattaacatctgggattaggactggaaacacatgtcattttgaactaagggaaactctttgtcatcctaatttggaatttggtccctggatggctagggatccatgaaccaggcaggtaccnnnnnnnnnnnnnnnnnnnnnnnnnnnnnnnnnnnnnnaattaagatgggccnaagatggggcctggcaacattaaaacatgagctgagcatccataagcattgaaattggggattaaaataaagatgttggggcagggaactgaacactccctaatatgatgataaatatgcctgactaaagccactacagaaatccagagattggctcttaaaatttgttttgtggaaagactaattctctttgatactgcagaggcagtggccatggatctgttcctctgtgctaaatgtcttggggcagggtgtgttttgttgggggagtgttcactgggtactcttgagtgggcctgaagtggacccattctatgaaattgttaattaaggg

SEQ ID NO: 264276 - DNA, 859 bp, Homo Sapiens
  misc_feature (16)..(16): n is a, c, g, or t
  misc_feature (55)..(55): n is a, c, g, or t
  misc_feature (107)..(107): n is a, c, g, or t
  misc_feature (286)..(286): n is a, c, g, or t
  misc_feature (525)..(525): n is a, c, g, or t
  misc_feature (569)..(569): n is a, c, g, or t
  misc_feature (599)..(599): n is a, c, g, or t
  misc_feature (672)..(672): n is a, c, g, or t
  misc_feature (674)..(674): n is a, c, g, or t
  misc_feature (775)..(775): n is a, c, g, or t
  misc_feature (778)..(778): n is a, c, g, or t
  misc_feature (837)..(837): n is a, c, g, or t
tactggggctcagatntacaagtttccccccaaaaatgtcgagtatttctcattnttctggctccaaaagggatttcttcaatgtccggagttactttgaagttcancgatgaagtttccaaagtgttctaaaatccttccccatcccacagcatgctctgggggctgagccgggagctgtctcagctgtgcagccacgtattctttactatcacaaaaggaatcgagaaggccgtccgtgccatcctccccaaaatctggagcactgctattcgccacttcagtntcgtctagcacactcatgtccatcatgcccatattctgcaggttctccagacttgcttccatgtcctcctgcccgtctctggaatcgtcttccaggccattatcttctgtgccttcctcctccatcttcagtcctttaacacatctcttggctgacttcttgctggtggcttctaactcgatgccaatttcatcaggatcttgcccctcttctttaaccgccttcttgaagccgctccnatcaggacgctcttgttgccgcccgtgtcccaggttcccgcttncttcagatccgcccgcaagatcgatcaacnccgcagctcgctgagccgcctcgtcccagtctccgcaacgcccgggccgagagaagccgtgccagggcccgangntcgcccgacccgggcagagtctccgccatcgtcgcgttcccctcttcgccaccgactcagtcgcacaccgccggcagctatagcggctctgaacacaaaanatngccgccacaatccagttttcacggtttgccggtactcgctcggtgaagtaacgtggcanggaaggaaaagtggtgttgacc

SEQ ID NO: 264277 - DNA, 892 bp, Homo Sapiens
  misc_feature (812)..(822): n is a, c, g, or t
ggggcagtccctctgcaccccagagtgaggaggacgcaggggtcagaggtggctacagggcaggcagaggaggcacctgtagggggtggtgggctggtggcccaggagaagtcaggaagggagcccagctggtgacaagagagcccagaggtgcctggggctgagtgtgagagcccggaagatttcagccatgcctcacagctccgacagcagtgactccagcttcagccgctctcctccccctggcaaacaggactcatctgatgatgtgagaagagttcagaggagggagaaaaatcgtattgccgcccagaagagccgacagaggcagacacagaaggccgacaccctgcacctggagagcgaagacctggagaaacagaacgcggctctacgcaaggagatcaagcagctcacagaggaactggaagtacttcacgtcggtgctgaacagccacgagccccctgtgctcggtgctggccgccagcacgccctccccccccgaggggggtgtacagcgcccacgcattccaccaacctcatgtcagctccccccgctttccaaccctgagcttccgatgcgggggaaagcagagcctccgggaggggggaaccacagactgggggcaaaagctgcgcccatccccgcaaaaggccccctggtccacctgggagaccccggaagacccgaggcccggggaccagggaggggaacaccgggaaactgggccccaacctggaaaaggggggtgaaggccctccccagcaggtgcccccaaacgttcttcaaaggggcccgtggtgcttggannnnnnnnnnngtggggggggtggccgggggccccagtgggcggaaaggaggatttcagaaaaaaggatggggcccagggt

SEQ ID NO: 264278 - DNA, 911 bp, Homo Sapiens
gggcttctggtctcctgataactgaagtggagacagaagttgagcctgttgcccaggcaaactaaagctgcttttgttcttcggaatctgctttgcctccgtcagcctgcttccttccccacacatgctggccgcactgtccccactccagacctctgctgtgtgtcctgggcagggccgcgttttggcagtaccctttcaactcatcctaagcttcgtgtagattactttagtatatattttttataaaacataaagcctttcctctcgatggaaatcaaagcttaccatgtgagcactccaacttctaagttggtgacaggaataacaaaaactgcaagggagtggaaaagatggaaaaacctgtgggaaaatccgaggccttttgaaacaagggagctgatggacttcacgaccagctcctggagcccctcctttctgctgaagcccgcggcatttccctccgttggccacacgagggcacccttggcccttttatccaaaacgcctgtcgcttcccggtgggaaatggaaaacaagtctgtcccccgggggtgttcttgaaaacaacccgggggctacccacgatttgggcatttttaatggtgcacaaattcccttttttcgcccaagattaaaattttggaacgaatgcaatgttcgcgagggagcagaatgcgggcagaacgacaagtgggccgtttcaaaaggctagcgacggagcattgctagtgctgggcggcctggtcgggcgagccggtggtggccgccggggagatgcttttactgaagaaacccttccgttttggcgtgccacccgaccccgccccgagggtaaagcggacacccgcgggacgatggctgccgcttcccatcggagagagatccgctgggcccgggagacataatgg

SEQ ID NO: 264279 - DNA, 861 bp, Homo Sapiens
  misc_feature (236)..(236): n is a, c, g, or t
  misc_feature (690)..(690): n is a, c, g, or t
gctggtacaggtccggaagttcgggatatcgtcgacccacgcgtccgcattcccagggccgtgtgatgggggaccgcagtgtgctctacaagagcctgaaccccaacctgctggccgtggtgacagagagcacagacgcgcaccatgagcgcacctttattggcatcttcctcattgatggcgtcactgggcgtatcattcactcctctgtgcagaagaaagccaaaggccctganccatatcgtgcattcagagaactgggtggtgtaccagtactggaacaccaaggctcggcgcaacgagtttaccgtactggagctctatgagggcactgagcaatacaacgccaccgccttcagctccctggaccgcccccagctgccccaggtcctccagcagtcctatatcttcccgtcctccatcagtgccatggaggccaccatcaccgaacggggcatcaccagccgacacctgctgattggactaccttctggagcaattctttcccttcctaaggctttgctggatccccgccgccccgagatcccaacagaacaaagcagagaggagaacttaatcccgtattctccagatgtacagatacacgcagagcgattcatcaactataaccagacagtttctcgaatgcgaggtatctacacaactcccctcgggtctggacgtcccacntgtttcgggttgtggccctatgggttgggacattttaccaaaactcgaagtctacccatcccaagcagtttgaacgttctgaaggatgactatgactacgtgttatcacagagcgtcctcttttgggctgggtttgccaccatggatcataaagagaatggcccgcgtgac

SEQ ID NO: 264280 - DNA, 626 bp, Homo Sapiens
gggcaggacagccccgggatccccgcccgcgcgccgcgtcccacgtaccccgccgcgccgggcaagaagatggcgggatcagtggccgacagcgatgccgtggtgaaactagatgatggccatttaaacaactctttgagctctccagttcaagcggacgtgtacttcccacgactgatagttccattttgtgggcacattaaaggtggcatgagaccaggcaagaaggtgttagtgatgggcatcgtagacctcaacccagagagctttgcaatcagcttgacctgtggggactcagaagaccctcctgccgatgtggcaatcgaactcaaagctgtgttcacagatcggcagctactcagaaattcttgtatatctggggagaggggtgaagaacagtcagcaatcccttactttccattcattccagaccaagccattcagggtggaaattctttgtgagcacccaccgtttcccgagtgtttgtggatggacaccaactttttgatttttaccatcgcattcaaacgttatctgcaattgacaccataaagataaatggagacctccagatcaccaagcttggctgatttaaaccacctctatttcaaataaggatcacgtg

SEQ ID NO: 264281 - DNA, 842 bp, Homo Sapiens
  misc_feature (41)..(41): n is a, c, g, or t
  misc_feature (189)..(189): n is a, c, g, or t
gggcggctagtcactaaagtcaaaagccccgctgggaggcngcgacaaaggcagcaaagacttccgattcccccagaagccagtggactagcacttggctcccctctccaggtgattgtggatgccgggtccaactcttcttggggccgacgagacaaaggcggctgcaacagcgccaccgctatcacnttcaggaagttgttctgaggcaagcgctcccacaggctgctgagaaacctggcgggacgctccgcttcgcccttccccacctcctgcagacgctccagcagcagctccgcctgggtcttcatcagagagtcctcctggagatttgggttctctctatagccattgaagcgcagcatgtgcaccgcagaccgccggcgggcaaggcgggccaggctctcttggagtgtctcctcatcggcgtcccggacgcccgggccgggaaagagttgctgcaccaggtggtaacgagctgcatccccgagggcccggttctccagcaggcgcagagagagcaggacgtcacagtgaccgagggcctggaagttcgctaatcccggaactggaccccgcccaaagccgccctcttgcctccactggttgtgcagccgccgctccagagccgtgcgaatggggccatgccgaccaaagcgccgatggatgtggcgcaggtagcgcgcccactgcaaggcccggcgcacggtggcggggtcccaggtgctgacgtaggtagtgcttgagaccgccagaagctcggaaaagcgatccaggtgctgcagaagggcgagcgcgtgggttcgacgatatcccggaattccgggccggtaccagcctgg

SEQ ID NO: 264282 - DNA, 1146 bp, Homo Sapiens; identical to SEQ ID NO: 178857

SEQ ID NO: 264283 - DNA, 1079 bp, Homo Sapiens
accctatgcagcagagtgagattgggtttgtcaacacgtcctctttttcgttaccgcctggtttcaaggccttttatcaagcatggacacggcggttgcaatctggctctgctaactgtggtttctgcctatgcagcgcttctcgcaacaatgaggggtcccagtctaaaggggctcctggcccgcagatcccgcccagtctcccccaaattggggccagcccgcggccagagagccctggttcgtgactgggcggtagccttcccagaggcctccaggaccctcagggaaggacgctaacttgccacaagaaggttgtgttgtcagggctgctgccccagagacttccaggcaagagagacgctgctctgggtttcccacgggcctggcgagcaggcccattgctggatgccaagttccggtgcaacacagcccagcgtggtcccccccagcaccagtcggggcccccccagctccacagtcaccagggagaatggagccagaccccaggaacccacaacggatggtgaaggacgagagctcggtggcctccatccgaacttgaacccacacctccggggtccccgcagtgacacacaaggtcagcagcacccagggcaggaccagggtccggcgccccatggccccctccagtccaggttctgggggctgcaggggccggcacctgtgcctctgttctcatcgcaggaagtcttcatgttgtcagcagccaaacagccacttccttctctcctcgtcacaccttccccagaggtggtgagcacaaagtggctgattcccttcttaaagtgacagtgagggcctgctcagtccccaaggctgtgcttccaggtaacaaggcagggcggcacaggtgggtgagaacccagccctggctaggccccatactgggctctgccccaggcgctgtctcctcgtcataggtgatggcaactggcttctggctgctcgggcccaaagcacagccaccagtgcctcttccctttcacttccaacgcaccaagattgtgtcagcaaacagcagtcctctgccctagtaactgaagactctcagtccc

SEQ ID NO: 264284 - DNA, 575 bp, Homo Sapiens
gggatttcacgaaggcatgggggtggccataggcggcctgaaatagaagggcaaggagttggtgcacacctacaagggctgcatcaggtcccaggactgctactccggcgttatatccaccaccatgggccccaaggaccacatggtaaccagctccttctgctgccagagcgacggctgcaacagtgcctttttgtctgttcccttgaccaatcttactgagaatggcctgatgtgccccgcctgcactgcgagcttcagggacaaatgcatggggcccatgacccactgtactggaaaggaaaaccactgcgtctcccttatctggacacgtgcaggctggtattttcaaacccagatttgctatgcggggctgtgctacagagagtatgtgctttaccaagcctggtgctgaagtacccacaggcaccaatgtcctcttcctccatcatatagagtgcactcactccccctgaaaagctatctgaacagaggaagataatgtagtgtgaagtccccatttgtcctcagcctgtaactccccgtgtgcctataaagaagttaataggtcaaaa

SEQ ID NO: 264285 - DNA, 632 bp, Homo Sapiens
ccaaagaaaacagaagctctttatgccaaatcacaaggacagagaggggaatgtgggggatggacaggagggagggcctgggcaggctgcctgccttttggaccttgtccaaggcgagttcccggacccatccaggagctcttagttcgttcagtcaattccttgacatttgatgtgcctggctcagaactgggtgctggggacatctaggtgcataaagccaggttgcattctgacaggagagagtcaagccaaccggccaggacaggcctgctgctttattcacagatttagatgtcgttccatctgctctcgaagtttgaatttctgggatctttcctgaaatggtgagggggtagtttgtgacaaacacgatgtacttcggaatcttgaagtgagagatcttccctttgcagaaagcttttatctcctcccaccgtggtctcctccccgtccttcagccgaatgcaggcacaaatctcttcccccatccgatcgtccttcactcccaccacctgcacttccttgcacttcgggtgtgtgtgaaagaagtcctcgagctctgcggggtagatgttctcaccaccccggatgatcatatccttagagcggcccacagatcttgcagaagc

SEQ ID NO: 264286 - DNA, 866 bp, Homo Sapiens
  misc_feature (227)..(323): n is a, c, g, or t
ggggaggccatgggggaaaaagtctaactggcggaactcctgggaactggggcgatgggctcttagtatcggaggattggagccatctgatttttacctgaaattccttagtctctcctgtgttggggaaatggtcaccttgccttcagggacctgggctttcagctgtccatacctggccctggttgatggcggcatgctgggcagtgcacgtgaagacgcacatnnnnnnnnnnnnnnnnnnnnnnnnnnnnnnnnnnnnnnnnnnnnnnnnnnnnnnnnnnnnnnnnnnnnnnnnnnnnnnnnnnnnnnnnnnnnnnnnntgaaccaccacacccagctcttaaaaccacagtatttctaggtcagtataacacacctgccccagggacttacaggtgtggcagaagcttggacttctggcttttctctctcttgcacccaggcacgctgcagctaccatttcctcccttcactacgttttagattctttccttttcattcctgtcattaccatgctaacgtacatctcctatcccacccttgctgttgggcaggtatgaagcggcttgcctggctgttccttcccttgcccttttggtctggttcctaccttagctgactcctcaattgggtagaaacattcttcatcaatactatactgttataggctgtcccttgtgatttcaaactctagtacccagatactggtctctgggttggttcttatgggcatcacttgtttttctggctaaatactagatctaaggaaggaatatgggcttttgttttactagcagggttcaagccctactgtgagcgcactgctagactgtcagatctctgagaatttcagaggattccta

SEQ ID NO: 264287 - DNA, 925 bp, Homo Sapiens
  misc_feature (139)..(139): n is a, c, g, or t
gcttcttagggaagtcaaaaggtacattctgacacctaagtgggaaaacattctgttttaggaaaagtgccaactgcatccggggtacaaaatttcaccaaaaagaaaagtaaaactgaatgatctccccttcattccntaattcatagaaaaatagtaggtgtgacttttgtttcaaagcaagctgaaaaatggttaaatggacaatttacaaatggtcttcagaaaaccttatcattaccttttctagttgaaagtccatgaatgacatacataaacgtacacatcatagccaaaaaactcaagaactagtggctaacacgatactggaaaaggtgaaggataaaaactggtgaatgaaggtagctgggtggtctacaggctagaacacggtcacgaacggcagaatgcagtagccacctgcgatcctaatcattcaagcttactggtgatacgtcccacttctaaagtggccgtccttcctgggcagccatgtctggagggcgccacatcaggaatgagggcctgtgcattgctttgtcccaaattccagataagagcaacatgtgggtggatctgtgtcgtaagactcatcctcaaagtggatttggcatttcttccccaaagctaattgaacaaatacttgagaaccatgatttctatgaattattctgtatttctggtttcttttcctgcaaaaaatttcatgtatactgagtaacaacctttgatcgatttattaattagaagctatttataccagtagaaaaatacccacaaacaattaaaattataagactatttttaaattcataaaaatggtactgtactgggtgtgactacatttccagtttttggtgtctcatgtgatacagaataggaggacttacatggctggaggggaggggagctgttttcctaattt

SEQ ID NO: 264288 - DNA, 845 bp, Homo Sapiens
  misc_feature (696)..(696): n is a, c, g, or t
  misc_feature (816)..(816): n is a, c, g, or t
ggggagcagcaactggacgatgaagatgatgatgaagaagactgcccaaatcctgaggaatataatcttgatgagccaaatgcagaaagtgattacacatatagcagctcctatgaacaattcaatggtgaattgccaaatggacgacataaaattcccgagtcacagttcccagagttttccacctcgttgttctctggatccttagaacctgtggcctgcggctctgtgctttctgagggatcaccacttactgagcaagaggagagcagtccatcccatgacagaagcagaacggtttcagcctccagtactggggatttgccaaaagcaaaaacccgggcagctgacttgttggtgaatcccctggatccgcggaatgcagataaaattagagtaaaaattgctgacctgggaaatgcttgttgggtgcataaacacttcacggaagacatccagacgcgtcagtaccgctccatagaggtttaaataggagcggggtacagcacccctgcggacatctggagcacggcgtgtatggcatttgagctggcaacgggagattatttgttttgaaccacatttctggggaagactattccagagacgaagatcacatagcattgatcattgaactgctggggaaagtccctcgaaaatacgctatgttggggaaatactccaacggagtttttncaccagaaaaggagaaactgcgacacatcaccaagcttgaacccctgggagcctccttggatgtacttgtggaaaaagtatggctggccccatggaagatgcttgcacagttttacaggntttcctgattcccgatgtttagaaatggt

SEQ ID NO: 264289 - DNA, 496 bp, Homo Sapiens
gggaaggtttcttcaactgcttgcttttcccaggcttgcctttagtgtcatgtaagacatttttaagttatatttattttgttgggttttaaaattgcacagaacactaagaccgaaaggctggactcttgtttctccttgaaagctttgcctttgttttgaacttcctttcccacttggtagaaagagcccagaagcagccctggccctgtaagatggactctttcatccttcagttgtatttagctttgagtttctctgcatctgtccaccccatgtgtatataacccagcccctggctctggggtggtcacctcgtcagtgccttttgttctggaggagaggaccccccccgcctgccgagagggctctcttcctgttctgcacccctctccccatgggaccttggagaaaactgaactgttacaaacccctgcacagtgcctgtcaaacagatggcaaacctttcctgaattaaagccttgggagaccaaaa

SEQ ID NO: 264290 - DNA, 1479 bp, Homo Sapiens
  misc_feature (1005)..(1005): n is a, c, g, or t
  misc_feature (1009)..(1009): n is a, c, g, or t
  misc_feature (1016)..(1016): n is a, c, g, or t
  misc_feature (1019)..(1019): n is a, c, g, or t
  misc_feature (1023)..(1023): n is a, c, g, or t
  misc_feature (1370)..(1370): n is a, c, g, or t
  misc_feature (1439)..(1439): n is a, c, g, or t
gggctgagaaccccactgggcagagctcaagacaccttccagacaattgaaggtatcattcgaagtctcgcaggtcacacattaaaccctgatcaggatgttagtcagtggacaactgcagacagtgatgaaggccatggtaacaaccaacttagacttgttcttcttctgcagtatctggaaaatctggagaaattaatgtataatgcatacgagggatgtgctaatgccttaacttcacctcccaaggtcattagaacttttttgtataccaatcgccaaacttgtcaggactggctaacgcggattcgactctccatcatgagggtaggattgttggcaggccagcctgcagtgacagtgagacatggctttgacttgcttacagagatgaaaacaaccagcctatctcaggggaatgaattggaagtaagcattatgatggtggtagaagcactatgtgaacttcattgtcctgaagctatacagggaattgctgtctggtcatcatctattgttggaaaacatcttctgtggattaactcagtggctcaacaggctgaagggaggtttgaaaaggcctctgtggagtaccagggaacacctgtgtgccatgacaggtgttgattgctgcatctccagctttgacaaatcggtgctcaccttagccagtgctggggtgtaagagtgccagcctgaaacattgtctgaatgggtgaatcccagaaaaagtgtgctgtccaaaccgactgactcttccccctgaagttataaattatttaggaaacaaagcatgtgagtgctacatctcaactgccgattgggctgctgtgcaggaatggcagaacgctatccatgacttgaaaaagagtaccagtagcacttccctcaacctgaaagctgacttcaactatataaaatcattaagcagctttgagtctggaaaatttgtcgaatgtacccgagcaattagaattgttaccaggacgaaaatatcaatcctanttgntggaggnttnaaanggaaaaaatagacatgaaaaaactgcttcgtaacatgtgaagtccagatccaagggaacctcagaaatccattgaagttccattgttaagaagttctgtttgtttggcaactgctttaaaacccgatagaacaagatcagaagtggcagtctataactgaaaatgtggtaaagtacttgaagcaaacatcccgcatcgctattggacctctgagactttctactttaacagtttcacagtctttgccagttctaagtaccttgcagctgtattgctcgtctgctttggagaccacagtttctaacagactttcaacagaggactgtcttattccactcttcggcganttttacgttcatgtaaacagcatgacgtgaggccgtggatgcaggcattaaggtatactgtgtaccagnatcagttgttggaggaaaattaaaagttaagtggttttcc

SEQ ID NO: 264291 - DNA, 469 bp, Homo Sapiens
  misc_feature (24)..(24): n is a, c, g, or t
  misc_feature (34)..(34): n is a, c, g, or t
  misc_feature (48)..(48): n is a, c, g, or t
  misc_feature (57)..(57): n is a, c, g, or t
  misc_feature (67)..(67): n is a, c, g, or t
  misc_feature (87)..(87): n is a, c, g, or t
atggaccatggtagtgccataccntgtggtcccnagccactcaagagnctgagaccnggatgattgncttggagccccaggaggatngggcctcccagtgagcccatgatgaccgctactgcactccagcctggatgaccaggccaagcccctgtctcaatatttaaagtcaaggggtttgtaggtaatgtattcagtgccacttcttgccatcactttgcaattattgaaatgggaatactgagctcagaaagcaaatatgatgctttcatgggagatggagacacatttgtgttctgggtgggatcactagtgcaggagaacattacattttcttctgaaggcaaaatgcttgtaggttttgcctctactttgtatttacttttaaaattgcacttgttcacctaccagtgtttacgaaatcctgtatttgggatgctttttctataataaaatattataatttgaa

SEQ ID NO: 264292 - DNA, 752 bp, Homo Sapiens
  misc_feature (48)..(48): n is a, c, g, or t
gtggagccggctatccccaccacccattcagcagagacacggatcacnccagttcagagagctacactttatgggtaacagtttcaccctgtgatacagttccctagaacattttccccaaaagtagtgaactgcaaagtgcttaggtttgacatttattgtagcagaacagtaatatcacagtatgggacaaaggtttacactttgcagggtattctttgggggaatgttaaatactgtaataaaaacatgttcaatcatggtaaaatgttcaacttgttaaaattacaaatgaacaaaaaaaatttttttctcatatattgcctaaataccaaatgaagagcttaaacttaagattcaatgtgaaaacgagtaaatatgttcctaaatttgcagaaaataaaagataaactgtacaaaaaggtattttgatttacagttcacaaaactgtatatgaacatttccccacaaaaatctaagtttcatttaaagatcgtaaactacggtcactgtgtccataggtaacaaataactacaccaaatcaccacactccacctccacccttgcagacacattgcaaagttcacagatactgcgggacacatagtgttatgcagaggacccatctgcgctcacaagctcgattacctccaatacaatgcatatggacgggtgtgcggatacggactggacaaaacaatttaacaacacctctaccttttcgaggacactactatctacatatattcc

SEQ ID NO: 264293 - DNA, 744 bp, Homo Sapiens
ggtgaaacggttcaacgccctctagatcgcctgttctcctctattgtcaccgttgctgaacaaaagtatcagtctaccttgtgggacaagtccaagaaactggcggagcaggctgcagccatcgtctgtctgcggagccagggcctccctgagggtcggctgggtgaggagagcccttccttgcacaagcgaaagagggaggctcctgaccaagaccctgggggccccagagctcaggagctagcacaacctggggatctgtgcaagaagccctttgtggccttgggaagtggtgaagaaagccccctggaaggctggtgactactcttcctgccttagtcacccctcccatgggccctggtgctaaggtggctgtggatgccacagcatgaaccagatgccgttgaacagtttgctggtcttccctggcagaagttagatgtcctggcaggggccatcagcctagagcatggacccggggccgcccaggggtggatcctggcccctttggtggatctgagtgacagggtcaagttctctttgaaaacaggagcttttcaggtggtaactccccaacctgacattggtactgtgcaataaagacaccccctaccctcacccacggctggctgctttcacccttgggcatcttcataacaaaaaacaaggagggggaagccccggggggggaagtgcgccagggacaagcttccttgtgggccgcccttggccccccaaaaaacc

SEQ ID NO: 264294 - DNA, 753 bp, Homo Sapiens
taagccaccgcacctggccagtaaataattttctaagtgtgtaatcacatgaaaaggtacatggaggtaggccaaggtggatatccaggcctgcatgactcagcgagtttggcgtgcaggcgcacacccccacttgttatataacctgtttgtgtaagtacatccttggctctgagccactgttgtctgtaaaaggtataattgccctgctaccgttgtacaggcgctcttggggcccacccgggcttcaacatggctcttgtgcaggcactgggtgcccagagaaagagagacagccaaagctggtccgtctggacaggagggagccaggacacagctcggcttgcgcatgcccaggataaagggttaagctgctgaccctgaaggcaggggagagccttctgggaagccgcaggcatgggggtcgcgggagccacacagccggagcaaaccgccgagataaaggtggacagtgtaagaaaagctgttcataagagagctagtgtaagaaagctgttaatttgagctgctgctgaataaaactatctttcacctgcctacagccccccaggtgttctttctgctcatccacccacgcccctcggacttcagcatgggctggacccagaacccgggatctgacaaaaaggacaggaatccctgcactatggaataatgtatatttatagaagaaaatcactatggtttaaagtcattagtaaggaaaacaaactacattctgtaaaaggcccc

SEQ ID NO: 264295 - DNA, 540 bp, Homo Sapiens
gggcttgttgcaacttttcacttctcttgtgtccaggtatgcagcaaaattctgcaatttcaccttaaagatactgttggttttacagatgctctccaacctattttctataagatgaggtagtggtgaactcagataacaaacttctcttctaaactggttctgcttctaagacaagcatctcctgccctctctccttcctccccatctctcgcacgcagtctagagatggactgagccttgcttctcactggcagtgttgagctttggagatgggatggttgctatgccaagccttgtttctctgctcagaagaagtagagaagctattatcaattaaaagcatgctgtgatgtgactcctggaagtgacgtaggagtgagtggcaggttgtttgatttaataggtatcttaatcaagaattaagcttgcaacattggctttgctcagatgcagatggaagtgtgatcacaatcattttgaatccctcttcctcactttttttctaagaaaataaacattttactgtttttatggaaa

SEQ ID NO: 264296 - DNA, 836 bp, Homo Sapiens
ggagcacacacacatctgcacctcaaccacagactacacttgctgaactggctcctggggccatgaggctgtcactgccactgctgctgctgctgctgggagcctgggccatcccagggggcctcggggacagggcgccactcacagccacagccccacaactggatgatgaggagatgtactcagcccacatgcccgctcacctgcgctgtgatgcctgcagagctgtggcttaccagatgtggcaaaatctggcaaaggcagagaccaaacttcatacctcaaactctggggggcggcgggagctgagcgagttggtctacacggatgtcctggaccggagctgctcccggaactggcaggactacggagttcgagaagtggaccaagtgaaacgtctcacaggcccaggacttagcgaggggccagagccaagcatcagcgtgatggtcacagggggcccctggcctaccaggctctccaggacatgtttgcactacttgggggagtttggagaagaccagatctatgaagcccaccaacaaggccgaggggctctggaggcattgctatgtgggggaccccagggggcctgctcagagaaggtgtcagccacaagagaagagctctagtcctggactctaccctcctctgaaagaagctggggcttgctctgaaggtctccactcccgtctgcaggcagccaggagggcaggaagcccttgctctgtgctgccatcctgcctccctcctccagcctcaaggcactcggggcctgggtgggagtcaacgccttcccctctggactcaaataaaacccagtgacctcaaaaaaa

SEQ ID NO: 264297 - DNA, 854 bp, Homo Sapiens
tgggagcggcaccaccgcctctgtggtcagaacctgcatggccagagcccccacggccagggccggccgctgcttcctgtaggcaggggctcctctgccaggtccgccgactgcagcgtgcccagcccagccctcgacaagacctcggcaaccacatcgcgttcctcaacacctgcttctgtgacagctatcgacaccaacggactctgagccccggactctgcttaccctgatggctgctcagcaccacagagtgcttgggctgagggactgactgttggaacccgtgcatgtagctgccgggtcatcagcaagaaatgaattggaggcaggaagagtccaagcctgaataataacaccccacagcctctctgtgcacttgctgtctgcggagccagtgtgccattctctgcacatgggcagccagcctgagctgcctcctccatggctttcctggtttgttcctctctccactgaagctgacttagccggccccttttcagtgtagaccaccagctcccctccccatctccttgagtcagcagactgtccaatgtgctcagccaggctggaggcggcaggcggcaggcagcaggctgtggaggaggcccctcggtcagggagcggcctgcctcacccctgaatagctccttcggccccatctccatcctcagcagatgacactgattggcatcacggggacttgggtaagcaacaggcggcattcaggactcttctcaaccctgctgttcagacttgataagatctcagagtccacaggaaagaagtcactgttgcaataaaagcacccgtagtagcaaaaacataaaacaaataaaacttcccccacatca

SEQ ID NO: 264298 - DNA, 776 bp, Homo Sapiens
gggagagccggcgccgtcaccgcccgcattgccgctcccagtcccgcgctcggcacgacatgaaatcccccgacgaggtgctacgcgagggcgagttggagaagcgcagcgacagcctcttccagctatggaagaagaagcgcggggtgctcacctccgaccgcctgagcctgttccccgccagcccccgcgcgcgccccaaggagctgcgcttccactccatcctcaaggtggactgcgtggagcgcacgggcaagtacgtgtacttcaccatcgtcaccaccgaccacaaggagatcgacttccgctgcgcggacgaagagctgctggaacgcggccatcgcgctggcgctcatgcgatttccagaaccgccgcgccctgcaggactttcgcagccgccaggaacgcaccgcacccgccgcacccgccgaggacgccgtggctgccgcggccgccgcaccctccgagccctcggaccctccaggccatccccgcagcccaaaccccgcacgccatgaacccgccgcgggccatacgctggacgagtcggaccgaggctaggacgtggccggcgctctccagccctgcagcagaagaacttcccgtgcgcgcggatcctcgctccgttgcacgggcgccttaagttattggactatctaatatctatgtatttatttcgctggttctttgtagtcacatattttatagtcttaatatcttgtttttgcatcactgtgcccattgcaaataaatcacttggccagtttgcttttct

SEQ ID NO: 264299 - DNA, 1111 bp, Homo Sapiens
  misc_feature (27)..(27): n is a, c, g, or t
  misc_feature (146)..(146): n is a, c, g, or t
ctttggcagttgatacaaaatacccangggcccagggggctgctgctttagctcctctggtggcttctctagaaaggaagacgctcacccctggctccgactatgctggaagtgagagcccacaccaattccagaaaggagagccnggggaggggtactgggaaagagttgggagaggaatgagggtccccagtcattaatatgccaatatcattgtccatatcatctgggaatgaaggtcaacaaacatatcatcattgttggggctaaacccatcttcattggggtagttggctggagccacctggatggttgatgatgttgggaacaccaagatgtgtgtacaagaagcatcttgaggggtgttgagctgagatgactgcatgttcagtgcagtacttcggccaaaaacagagcccattgtgacagcatctggcatcactacaaaggacccctggggctccatggcaaccaggcaggcactaaggatagaaggagagtctgcggcagagattccacacatccggcacacatccttgagctttttgctgattgtctgtagtgaacattctccaaggaggatactccaatctttaagctccccatggccaagacgcccaagtcgcccgattacaactctccagggtagagatgtcatttggacaatccctatgcaccactcccataacttctgtagtccaattttacgtgcagatactttactcctccgtgacctgtttggtaaagcaatatttacaacgcaggtctctaataattccccatggaggtcagtgcaggaagccaaaagccagcgctggtcgtgagacagacaatagcccacgaagagcacattgtatttctggctcgcctcaccaaacgtctctcccagctctgtctgcttgtctttgattggggccaatataaagggaggggagtaaagctggattgggctgggccgctcagggttcttgagggtcatctcaatgctggctgcaggcccaaatcccgtgagggatttaatgtggatctgtgtaggcagtggtcgcctgcactggcagtacactgaaaatgccatggacttcaagtattgaatgtagaaaacttgctcatc

SEQ ID NO: 264300 - DNA, 845 bp, Homo Sapiens
gttggaagggttcccttcttgaggaagatttcggaaaatagttccacaaaggaacctgtgccatcagctttggattattagggatggcatgaaatccactgtagaaagaacgcaacagttgcattctcaattgctgtgcgctgttgagtagtcagtcctgttgtagcagctgaagaaagagaagctgatcttgcactggtctgttgtgcacctaaattatgccttccagaagtggacccagagtgacacaataaaaacagaagtgctgtccatagtggattgacttcagaaccaccaagccaatctttcataatatggctattgccaacttctgtcaaaaacctaagaataggagcaactaggtcggctgtgataggcatcttattacattgttgtgggacatgatggcgcctgagtttgtcctgggaaatatctattgactgggcaatgctttctgagctagaaatgtggctaaagcagaaactagccagactcctcacaagaagagaaggcaaacctgagtctagtaattgtttaatagcttcaggagattgagaagaggaagcaagggtagccaaatgtgattcagttaatgcgagaggtgcttgtgcatttttagagtcatctgttaaagatgaactaagatcctgctttttgctatcatctgtcatggacagtctatgatgacattgcactggaggaggggtaattcccatccagcccatgagcaaagaaaaatagtttgggtgtacgtgacacattgagcaaagtagactgtcaacagctttcttcaaaaccatattgcagggaagagacatggaccaattaaaaagtaactcaaagcc

SEQ ID NO: 264301 - DNA, 854 bp, Homo Sapiens
gggagacagactcggagagatggcaggcggaagacaccggcgcgtcgtgggcaccctccacctgctgctgctggtggccgccctgccctgggcatccaggggggtcagtccgagtgcctcagcctggccagaggagaagaattaccaccagccagccattttgaattcatcggctcttcggcaaattgcagaaggcaccagtatctctgaaatgtggcaaaatgacttacagccattgctgatagagcgatacccgggatcccctggaagctatgctgctcgtcagcacatcatgcagcgaattcagaggcttcaggctgactgggtcttggaaatagacaccttcttgagtcagacaccctatgggtaccggtctttctcaaatatcatcagcaccctcaatcccactgctaaacgacatttggtcctcgcctgccactatgactccaagtatttttccccactggaacaacagagtgtttgtaggagccacctgattcagccgtgccatgggcaatggatggtggaacttgctcgtggcttagacaagaaactcctttccctaaagactgtttcagactcccagccagatttgtcactccagcctgatccttctttgagggggaaaagccttttccttcactgggtctccctcaagaatcctcccctatggggcctccgacaccttaacctgccaaagatggggattgaacacccggaaccccaccttgggaggcgaggaggggacccaaccccaaccttgccttggcaatgggcattttaattggggccctcatttgggagatttggatttggggaaagttcccaaaacccccaacggggttttccccaac

SEQ ID NO: 264302 - DNA, 820 bp, Homo Sapiens
gggacacacgtagcggccaagatggcgctagcggttggagcaggggctctgctgcgacctttacggtagtgaggttagggacgatgggagagcagctttgttcctgaagtgccgtcgaggattaggatcgagtttcttcgatcgtgagggcaattattagtggcctctagccccccagatggcatcttgaggagagagaatccacgctacgagaactaacatagtggacatcgcagttgtccgtagccgatttgcgggttacggagttgttgcaagtaaagaaggggaaatccgagcgttctcgcgtttggatttcctccacgtgtgaagtgggaatggtagtgatatctcgtgcctatctctgtcaagggcaagaaggagaaggaatttatttgaggccctacgacgtggtaggttcaccctcagcctttgttcttatttcatcttatttgtggagaaggtcttttcgttcctattttacaggtgagaaaaggggcccaatatatagttatttgcggccataaaatagaagccagttgcctgatactgaagattcaatgaaatcttgtgattgacttcccctctttaattttgtactttgggtaacatcggatccggtagaaacgctcgtcagaaagagtttttaatgtgcattctacaatttccagacatagtttccttcttgaaaaatgggttaatactaccctatagggatcttgtgatgccccacgaaaacgttggtaggttgtggaccacttataacaaccgtatggagactcctccatggtcctttgagggggaacctggtagggtttaggaa

SEQ ID NO: 264303 - DNA, 1383 bp, Homo Sapiens
  misc_feature (471)..(481): n is a, c, g, or t
acagggggggttttaccaatttttatgttgtggaggggggggataaattgcccttttcccattaaaatttattaaaacccaaaccaaagccccttcggaggccttaaatggtaaaaggggaaatggattttgaaagggtgggccctgtctttaaaggacctggccatcaccctttaccaaggcggtttccccttggggcaaggggatttaatctctttaaacctccagggggctcatctggagatgcagatggtaacagtgccttcctccatatggttggtgccgggatcaattaatctacttcctgtaaaacccttagctgagtctttacctcattgcaggtgctcagtaagtgctagctactagcagtggaagtaagaggtctaaaagctgggacacaagagaacaagattagtgccccaaaatgctccaagagagggggactaacagccatcaaaacaaatgttctgnnnnnnnnnnntagtactgctgtgatatcattctgcctttccctcctgttgcagcctccagtttcttaaagtgcagtgatacctggggcctaggttctcagacaagaggtgtgtctcctcctaacatctatcctattgtctgacaaacctcttcaaaattttgtatctttagagtcatttccatggcctcccctacagttctgtaacacagcaggaagggagtgcttattaaacactctggcgcagaagcaggacaggacaacggcagccagagtgggtagaatgagcaaatggcagctttaagacaggcgagatctatctcaaatttgtatggaagttcttgtcctacccaagcttttgcccaactcagtctattccctgtttggcgtaacgccgttgatgttgaatcacagaagattttgcactgtaaactgttcccacacacagtgcattccaaagggcttcatcgtcccgtgtggacacgctgatgccgcgtgagccggcaccgctggctaaaggctttcccgcattcgctgcattcatatggcttgtctccagtgtggatcttctgatgctgtgtaagggatgacgcggtcaaagaaagctttgccacactcgttaccctgatagcgacgggtccccagcatgagctttctgatgtctattcagagacgagacaccatagaaagctttcccgcactcgttacactcataaggcttcctgccagtgtggattagctgatggccgagtaagaatacttgttctggtaaaggctttcccacactgatgacattcatgaaggactttctccagtgtgaattctctggtgtcgagtaagggatgaacggtcaaaaaaggcttttccacactcgttgcactgtaagggtttctctccagtgtgaattcgctgat

SEQ ID NO: 264304 - DNA, 1240 bp, Homo Sapiens
gggcccgccaagcgcctcggagcgcgcaggatgcgctgggcggccgccaccctccgtggcaaggcgaggccccgggggcgggccggggtcaccacgcctgccccagggaaccgcacaggcacgtgcgctaagctgcggctacccccgcaagcaaccttccaagtccttcgtggcaatggtgcttccgtggggaccgtgctcatgttccgctgcccctccaaccaccagatggtggggtctgggctcctcacctgcacctggaaggggagcatcgctgagtggtcttcagggtccccagtgtgcaaactggtgccaccacacgagacctttggcttcaaggtggccgtgatcgcctccattgtgagctgtgccatcatcctgctcatgtccatggccttcctcacctgctgcctcctcaagtgcgtgaagaagagcaagcggcggcgctccaacaggtcagcccagctgtggtcccagctgaaagatgaggacttggagacggtgcaggccgcataccttggcctcaagcacttcaacaaacccgggagcggggcccagccaggcgcacgacaaccacagcttcaccacagaccatggtgagagcaccagcaagctggccagtgtgacccgcagcgtggacaaggaccctgggatccccagagctctaagcctcagtggctcctccagctcaccccaagcccaggtgatggtgcacatggcaaaccccagacagcccctgcctgcctctgggctggccacaggaatgccacaacagcccgcagcatatgccctagggtgaccacgcagtgaggctggtgcccatgctccacactgggaggccaggctgaccccaccagccagtcagctacaactccacatcaactccacatgcgcccagctcgagactgatgagtggaaatagcttcccagtgtagggacccctttgaggggcccacctgacatccaaggctgaagaacccagcggggaagggttctggttccggaatatcctgggccgaaacgatttttatagttatgggaccaccccgaaaccactacttgaggggaaatttacttagctgggggccctcccctaaactaacatttccttttaaaaaaacatgggaaaagtgtttaaaccacaacccagttttggtttatcccaaatagcaaaccccgcccataatttttcctttccggcgactaaacgcaccacaagtacggccttaccaattacccc

SEQ ID NO: 264305 - DNA, 1657 bp, Homo Sapiens
  misc_feature (129)..(129): n is a, c, g, or t
  misc_feature (220)..(220): n is a, c, g, or t
  misc_feature (335)..(350): n is a, c, g, or t
  misc_feature (360)..(360): n is a, c, g, or t
  misc_feature (784)..(792): n is a, c, g, or t
  misc_feature (810)..(858): n is a, c, g, or t
atagtccggttatcgcccggtatgcagaatttgccgggccgcttagacgagagagctttctttcggagcgggctcctgggtaacggaaaaatccgcacctgggaagacgggtctatccctgcgaggganttctctggcgctggtttagtggcttatagagccccactcgcggcccgcactatgggccccgaaactctttccccagaaaggcccgggcgcngatgaaggtggcgtaaagggcgacggaaaaaaatgggcacgcgccaagggaaaaaggagacagcgcgattttttgcgcgccccagttggcccttcctccccgaaacagagttctnnnnnnnnnnnnnnnntctcccttgngggggggttcagaactcgcttttgtttccgcccctctctctgtgttttagccccccgcgtgaccaaaagggctgtgggggttgggcgatctttcgggacttcgtgttacaaccctttttaagccacatgggggaggaaacgcagtaaaaaggcactggctgttgtcgaaggctcctctggcgcgtggacgggcagggttttttgacacccaacaccgcccaagcccccacattgtccgaccccgccaatataatggggggggccacaccgcccacacccccagcatcgcgggcacgcccaattttcttcatgctataaagtggaagcattcttcgcagcacgaacccccaggtcccttgggaagggagagtctgaggtctttcccttttttgcagtcgcattggcatttatactcagggagggnnnnnnnnntatatcaccaggcacaannnnnnnnnnnnnnnnnnnnnnnnnnnnnnnnnnnnnnnnnnnnnnnnncgcgctctcaggtgaaattaaaattggaggtcagttcccggatccgattctctcggttcattttcttgagtttcattctgtgattttgaaaccagattttgacttgtctgtctgtaaggttaatggtcttgcctaatctccaggcggcgctctcgcgtcaaatacatattgaacagagaagtcgtgtcgtccaattccagcgtctggtgtttagtataggggcacctcttcttccttccgctcttttgctgtcagccaatttcctgtggtgttttctgcctttatctcctctttcgcttcgttatccgaggtgtctgggctggagtcgcagctttggccctctccttttcgctctccgaggggctccctttagggcccgccaggctctgctccgtcttgatttcattggggctgggggtctggctgtcggacttgggggtctcagggaaactcactttgccccccagctgaggcgattccagatgttcggcgcgcgggttgagactggcccgctgctcgaaaggggcttcgaagtcgttggccccagaacagtggggcgtcttgtccagcgcggagtagctcgggctggcgcaggtagtagctgggcacagggtacctcgtgctccccaaggcaggactccggcaaggggtgggagtagagagctgcctcggggccacttttcgcccggcttctctgcgctgtacatgcagcagaccgacgcgtgggtcgacgatatcccgggaattccgactcgtaccagcctgctttttaacaactttctatatctcactatatgtg

SEQ ID NO: 264306 - DNA, 637 bp, Homo Sapiens
ggggcagacacggagacagcgccggggcggagggtacgatggagaatttcacggcactgtttggggctcaggctgacccaccaccgcccccaaccgcactcggcttcggaccaggaaagcctccacccccgccaccgcctcctgcgggcgggggacccggcacggccccgcctcccaccgcggccacggctcctcctggcgcggacaagtcaggagctggctgtggccctttttacctcatgagggaactgccaggtagcacagagctgacaggcagcacgaatctgatcacacactacaacttggaacaagcctataataaattctgtgggaagaaggtgaaggagaagctaagtaacttcctgcctgacctgccagggatgattgatctgccctggttcccatgataacagcagcctccgctctctcattgagaagccccctattctcagtagctctttcaatcctatcacagggaccatgctgagtcgttccgcctccacactggccgttgccggagcagtgtcgtctgatgcatattcagcctcccaagaagaagaataagcacaagcacaaacagagccgtacccaggatcctgtccccccagaaacaccatctgattcagatcacaagaag

SEQ ID NO: 264307 - DNA, 467 bp, Homo Sapiens
gggacagctctttgggcgttgattctagggtcagggccctcactcacactgctggaaggttaaagtcgacttcacgctagtttaaggaaatatctgacgctgataaccatgtcccaagcactgctctaagttcccaatgtgtccggaattggtgggttcttggtctcactgacttcaagaatgaagccacggaccctcgcgactatgctaaaaacagcctcaggaccttcagcactgatcaacaatcctgggcatgggctgaccgacagttttcacccagagagtgaagatcatggaggagccatcttaaattccgcccagcgcaggctcccaggaatcctaatgtcacgatctcactgcagccaatgtgacaaacacagcagtaattaagtctagagagctaaacacacctcaaaaagaattgtctcttggtatgagtggaatggaataaaatacatggaaacccg

SEQ ID NO: 264308 - DNA, 805 bp, Homo Sapiens
  misc_feature (123)..(228): n is a, c, g, or t
  misc_feature (723)..(756): n is a, c, g, or t
cgaaaatactgaagaaagactacctctgattggactcttctcaaggaattaataattcaagaactaaggaaagaaaaaagtgattatatgaaaatactgaagttgatcgtagcagctgaaggnnnnnnnnnnnnnnnnnnnnnnnnnnnnnnnnnnnnnnnnnnnnnnnnnnnnnnnnnnnnnnnnnnnnnnnnnnnnnnnnnnnnnnnnnnnnnnnnnnnnnnnnnnatgtcacataaatggaatcatactgtgtccggaattggtgggttcttggtctcactgacttcaagaatgaagccacggaccctcgcaatgagtgttacagttcttaaaggtggcatgtctggagtttgttccttctgacattcggatgtgttcagagtttcttccctctggtgggctcgtggtctcgctggctcaggagtgaagctgcagacgttcgcggtgagtgttacagctcttaaggtggcacatctggagttgttcattcctccaggtgggctggtgggctcgtggtctcgctggcttcagaagtgaagctgcagaccttcacagtgagtgttacagctcataaaggcagtgtggacccaaagagtgagcagcagcaagatttattgcaaagagcaaaagaacaaagcttccacagtgtggaaggggacccgagtgggttgccactgctggctggggcagcctgcttttattctcttatctggccccacnnnnnnnnnnnnnnnnnnnnnnnnnnnnnnnnnngttctcgacttcccgaccagagtagctagatacagagtgtcaattggtg

SEQ ID NO: 264309 - DNA, 773 bp, Homo Sapiens
  misc_feature (33)..(33): n is a, c, g, or t
  misc_feature (518)..(623): n is a, c, g, or t
  misc_feature (735)..(735): n is a, c, g, or t
  misc_feature (745)..(745): n is a, c, g, or t
cctccaaaaggccggttcccaaaggcccctttnaacacacccaaacggtttccgaacggcccctcacgatgaaaactgctgtccgttggtgaaggcagcctcttctgtgctcctcgccgctgacttcctgaggcggaccctacctgtggaggcatacccaggaaccagacgatgaccccctccaaaagttgggtctttgaggagagctactaacttgggttccctggtacaccctctacatgcagtggtgaagcttatctaacagtcattcatagaatcagtttgggaaggggaattttcactgaactctcatagagaaactgtgttttagataacagaaagttctgcacggttaaaatggaacagaaatttttttgcacagaaattaggattaccgaaaatactgaagaaagactacctctgattggactcttctcaaggaattaataattcaagaactaaggaaagaaaaaagtgattatatgaaaatactgaagttgatcgtagcagctgaaggnnnnnnnnnnnnnnnnnnnnnnnnnnnnnnnnnnnnnnnnnnnnnnnnnnnnnnnnnnnnnnnnnnnnnnnnnnnnnnnnnnnnnnnnnnnnnnnnnnnnnnnnnnatgtcacataaatggaatcatactgtgtccggaattggtgggttcttggtctcactgacttcaagaatgacgccatgggaccctcgcagtgagtgttacagctcttaaggtnggcgcgtctnggagtttgttccttctggatgtttcgga

SEQ ID NO: 264310 - DNA, 919 bp, Homo Sapiens; identical to SEQ ID NO: 9695
  misc_feature (655)..(665): n is a, c, g, or t
  misc_feature (702)..(710): n is a, c, g, or t

SEQ ID NO: 264311 - DNA, 1567 bp, Homo Sapiens
tatttttttccctcggttgaggaaaatttaaggtggccccttgtgggccaattatgtgttaaaaggtttggcattcttcgcccagtgatgggggaccagtatttttttcctaaaaaattgatattctgtcccagtgaaatagtaaacatgttggttggtttaaaaaccagaaacctgtttaagtttgacatgggcatgtctcttcggatttaaaaaagttatctttaaggtatggcttttgggaaatcattaataaactagccctctggaaaaggaatacaaatttcaagatgctaactaaatagaactcagacacaaggcaggtatttgtataatatgtctttcaattacaaattcatctacagtagaaacagaaaggaacataaaagtatgatctactttacagtaagctgtttttaaaataaaaattacagatcaatagtgaaggtgaggaaatttaactgagaaaattttcaaaatattaaaatattcaaaaacattgacacatgaataatacctatcttaaagtaataataataaatgacatgtgtatacaaacacatttaacatgaatcaggatttcttgttcttgatgtcagcacctactgtctaacgggtcgagacaaaatactgtgccttcaagagttagtcccattttgaacccctcctgcatctcatctaattttgattgaatatctggagggaaattctgctgctccacagttaaaatgggtcaaaaggttctggcttcccaaacaggtcccggtttaatctccagtagatctacttaagtactggaggtggctgtgtgcccaatgcgagtaggcatcgaagactggtgtgatattggagaaaatggaatcatatcaaagatgtcagtggagggcgacttaggtgtcatactgcctgctggaggtgctgatacttgagttattctcagttggttttccaaatcttgtactttatttttaagtttccatattttctgtttctaagtcttggattcttttttgtaaccctgcgatctgttttcttgtttcaacatctgtttcctcctgattctagaaatttcctgtatgccaggtcaaatgcttggccaattgttaaagtgatctcttcagcacacttttcgctgtcaaatacatagcacaaatgtttatttgactcagaatctttgcatatgaaagtgaatatcctcttgtcagttttatcatctgcacaaaaagatattctatgaagctggcaattgtgttgaacttcctttgttttgggttctagaatttttactccataaattgatatttgcaactccactttaggaattttctggccttcagatttcttgatatgtcttgcaaactttagtttccttacagcatctctcacaacttctgttccttttggctgttccacttctgtactgccaagaaactttgcattatagggaatgaaatgttttgataaagcttcaggtgtatgcatccatgttttgcggacgcgtgggtcgacgatattcccgagaattcgcggaccggtaccagcctgctttttaaccaggtgttcatta

SEQ ID NO: 264312 - DNA, 882 bp, Homo Sapiens
  misc_feature (529)..(529): n is a, c, g, or t
gggtttcccccggtggagccttaggttagtgcccagtgcagtgccagactgtctcctctgctcctcccacctcatccctaggaggacccaccagtggagcacatgcagcctcagtggagatgcttggtgtggggatctgggtgaagggggttgagtagcgactgcctgggagatggctgttagtaggtctgcgcctggtgtctgcctcgccatcctggggtaaggggcagagagaaggacttgtcttatgtagggtgtggtcagccttggggccttacctacccagttccatgatatttcttgccctgttccccctggaatgtgcagtgggccagctgagagtacgccttgaggaggggggatgaggccttaatctgggaggcctatccccctatcccaggcatcccagacgaggactggctgaggctaggcgctctcatgatccacctgccccgggagggcagtcggggaagacagagaaaagcaaacacattcctcctcagctccacccacctggagacgaatgtanccagagaggaggaaggatggaaactgaaaacaccggggcccctcggccttctctctgctagagttgcccctcagagggttcagccctgactttccagcggtcctcaggaacacctactaattccctctccacttccttcctggggtgggaacagtttactggtcccctacgccacgcaaaagatgacaattttactccacacataattttatcccaggccccttttttatgtccccacggcactgggtggagcggggcctaaaggaaaatttcctcttggtttcttggagcggacttaccaccctcgtggtaggatatccccccgcaaccctctacctttctaactcaagggt

SEQ ID NO: 264313 - DNA, 907 bp, Homo Sapiens; identical to SEQ ID NO: 9724
  misc_feature (252)..(320): n is a, c, g, or t

SEQ ID NO: 264314 - DNA, 872 bp, Homo Sapiens
ggggagccgcttcgggctccggatgtccgctggggcccgacgcttgggtcccgacgcgcggttcgcactttccaggtttcttccccagggaacagagcttgagcggggggccacccccccgtcctaccggagttctgaggtgcggtcaggcgcggagagcggacgcccagcgccagattctgtgggctccggagttcaggcccactgagccgcagctgagcacaggcggggcaggaaaaaggatgaggtaagtttgttcctgtcaattgggaaccccctcaaccacttccattccccaaatacctgcgctgctaccgatgcctcttggagaccaaggagttagggtgccttctgggatctgacatctgcctcaccccagctggcagcagctgcatcactctccacaaaaagaacagcagcggttctgacgtcatggtgagtgactgccgaagtaaggagcagatgagtgattgttcaaatacccggaacttctcccgtgtcctggcttctggatattctctaaatactgcttcctggatttctgcaatgaccctcaaaacagagggctctatactccttagtgtgactgcaccaaactttggtgtaaaattccaccaggttccaggccaccttcctgaattcctatctgggctttggccaggaacttctagttcccttatacccgcccctccttggcctcccctccagccactggaaccccgaccttgggtttcttcctcttggggtggacgccccttcaggaaaccttaaccgggtacctctggacccccccgacccttaattggcccaccagggtttccctcttcctgggccccccgaaaccccttgggaggtttttctcccccaaaaat

SEQ ID NO: 264315 - DNA, 1198 bp, Homo Sapiens
  misc_feature (566)..(566): n is a, c, g, or t
tctttactgagtttaataatcagagatttcaaggtttgttttttcatctcatgactggtttcattttcgtgaagaatgccatcttcataatctctgattagagctcgggctgccagcttgtggatcatagttccagttgtcttctgaagctcagtagtcgacaccattgtacaaaattctttctcttgaattagtgcacacagagttgcctgtgtgcagtgaggaatgaatccatagacaaggagtcgatcattgcgaaacaaggatggcacctgggctggggcctgcagggcctcgggcgcatctggattgagttgctgccatttgacggagacagagtggcaactcggagaacatagcctggtcatttggtcttctatctgttttcttccaactatgcttggattttgcattaaaatatttcaaatactccggcaccacactgggacaaaatccttaagacgtgacgatttgctgtagaaccgataccgcaggcgaataacctggtgtgcgggcggctcctcttcacgagctgtaatgtcaggctctcatcctggaggtgcccnatcagacaccaggaggatgttccgtgaccctcgagcagggtacaataagctaagatatcggagtgttttccagaagtctgtgttccccatggtaggtgtggcagacatgatgaactctgctgccgtggtattgcttgtgatatgcttaggatacgaaaatagctccttgtaacctgtgccgaactggataatatttactttctgcttctcacccaccaaggacagcgcatgcaaggtgatttgcttggcttgcaagaatgtcacaccctccatggaactggagcagtcaagacaaataatcacttcgctctcactggctaggtcagggaggtcgacatcgagatcgggttgaaagacaagcatgcaagcctcgctttctttttctggatgtttttcaacccacattcttgggagataggcagcagacaaaccgatgtggagagaaaatccactgctgtctaaggagctgccttccatggtgctaatgacagctttgcagtctgtgcgcttttgtttcagttcatgtgtatcactgaaaatgaattcaatcacatacggcatctcaatagacatagtcaaagagaagctttgctttgttcctatttcttttatacaaatcttctctactgtcc

SEQ ID NO: 264316 - DNA, 549 bp, Homo Sapiens
agggctcggcgtggatggggttaataggaggtggcattgtggctgtactgtgagtcttggagaagctcattttgctatcgccctctcgcacttcttagaattcactttagcttctgcttccgcaattttgcactctgcttcccgctcggcttcttcgattttcttaatctcttcagcccactcaatggttttcttttccaaagagaagtcatactgcaaagatatagcagaggaagggggtgtgaaccagggtggccatctttaccccaccacccaattcactccttcctcactcctggggcaagagggataaccgggacaaggcagcatttaaggcgtgtgggatgatccccacttaaaaagagtaaggcttccaatgtccttgtaagatttaaccaaactatgttcccacaagcctcttgtgggcagcaacctgggctacagaccctccttggatctctattatctagcacaatgtcctaaacaaatcccatgctagggaatgatagccccaaacatgtaagaaatactgtaaggggccatgcatga

SEQ ID NO: 264317 - DNA, 909 bp, Homo Sapiens
gcccagcccctgctgctctggaagcactggctccgggagccggctttctaccaggtgggcatactgtacatgaccaccaggctcatcgtgaacctgtcccagacctacatggccatgtacctcacctactcgctccacctgcccaagaagttcatcgcgaccattcccctggtgatgtacctcagcggcttcttgtcctccttcctcatgaagcccatcaacaagtgcattgggaggaacatgacctacttctcaggcctcctggtgatcctggcctttgccgcctgggtggcgctggcggagggactgggtgtggccgtgtacgcagcggctgtgctgctgggtgctggctgtgccaccatcctcgtcacctcgctggccatgacggccgacctcatcggtccccacacgaacagcggagcgttcgtgtacggctccatgagcttcttggataaggtggccaatgggctggcagtcatggccatccagagcctgcacccttgcccctcagagctctgctgcagggcctgcgtgagcttttaccactgggcgatggtggctgtgacgggcggcgtgggcgtggccgctgccctgtgtctctgtagcctcctgctgtggccgacccgcctgcgacgctgatgagacctgcacgcagtggctcacagcagcacgattggtgacagcccgaggcggaagaacaccgaacacccagtgaacggtgacggggatcagcacgggggcggcaacccacggcacccaaggcgcctggaatgaagacttcagccaacaagggaggtgcgaaagcttctggacccagggccacagtgccggatgccaccttggaggattgtccacggcccagtgaagaagaccaccagacaacagaaagggttaccgcctgtgaatcca

SEQ ID NO: 264318 - DNA, 1256 bp, Homo Sapiens
ggggtgggagcccgtggcctttaaagtgccgttcagccttttcctccaggggtgctttgtaaacacggctgtgctcagggctcgcgggtgaccgaaaggatcatgaactagtgacctggaaagggtactagatggaaacttgagaaaggactgcttattgataacagctaaggtattcctggaagcagagtaaataaagctcatggcccaccagctagaaagtattcttgccatgagaaaaagaatgtgataagttattcaacttatgaaattcaagttacatgtgaattctgccaggcaatacaaggacctgtggaatatgagtgatgacaaaccctttctatgtactgcgcctggatgtggccagatcagaccccaacaccaacaagattcttgaagaaactgtgaagaagtgggttcgtttaatgagttggcggagtccatttggagaatgaattcaagaaagcttcaggaagatgacattaaaaaaatgcctctagatttatcccctcttgcaacacctatcataagaagcaaaattgaggagccttctgttgtagaaacaactcaccaggatagtcctttacctcacccagagtctactaccagtgatgagaaagaagtaccattggcacaaactgcacagcccacatcagctattgttcgtccagcatcattacaggttcccaatgtgctgcttacaagttctgactcaagtgtaattattcagcaggcagtaccttcaccaacctcaagtactgtaatcacccaggcaccatcctctaacaggccaattgtccctgtaccaggcccatttcctcttctgttacatcttcctaatggacaaaccatgcctgttgctattcctgcatcaattacaagttctaatgtgcatgttctagctgcagtcccactcgttcgaccagtcaccatggtgcctagtgttccaggaatcccaggtccttcctctccccaaccagtacagtcagaagcaaaaatgagattaaaagctgctttgacccagcaacatcctccagttaccaatggtgatactgtcaaaggtcatggtagcggattggttaggactcagtcagaggaatctcgaccgcagtcattacaacagccagccacatccactacagaaactccggcttctccagctcacacaactccacagacccaaagtacaagtggtcgtcggagaagagcagctaacgaagatcctgatgaaaaaaggagaaagtttttagagcgaa

SEQ ID NO: 264319 - DNA, 411 bp, Homo Sapiens
  misc_feature (74)..(74): n is a, c, g, or t
  misc_feature (300)..(300): n is a, c, g, or t
  misc_feature (352)..(352): n is a, c, g, or t
  misc_feature (366)..(366): n is a, c, g, or t
gtaccattggcacaaactgcacagcccacatcagctattgttcgtccagcatcattacaggttcccaatgaacntgcttacaagttctgactcaagtgtaattattcagcaggcagtaccttcaccaacctcaagtactgtaatcacccaggcaccatcctctaacaggccaattgtccctgtaccagggcccatttcctcttctgttacatcttcctaatgggacaaaccatgcctgttgctattcctggcatcaattacaagttctaatgtggcatgttctaggctggcagttcccantcgtttcggaccagttcaccaggggtggcctagtgtttccgggggattcccnggggtcctttcctnttcccccaaccagttacagttcaggaagggcaaaattggaggttt

SEQ ID NO: 264320 - DNA, 529 bp, Homo Sapiens
  misc_feature (369)..(369): n is a, c, g, or t
  misc_feature (375)..(375): n is a, c, g, or t
  misc_feature (439)..(439): n is a, c, g, or t
  misc_feature (459)..(459): n is a, c, g, or t
  misc_feature (464)..(464): n is a, c, g, or t
  misc_feature (484)..(484): n is a, c, g, or t
  misc_feature (508)..(508): n is a, c, g, or t
  misc_feature (513)..(513): n is a, c, g, or t
tcggcatcttgaagctgctgctctatttcgctctaaaaactttctccttttttcatcaggatcttcgttagctgctcttctccgacgaccacttgtactttgggtctgtggagttgtgtgagctggagaagccggagtttctgtagtggatgtggctggctgttgtaatgactgcggtcgagattcctctgactgagtcctaaccaatccgctaccatgacctttgacagtatcaccattgggtaactggagggatgttgctggggtcaaagcagcttttaatctcatttttgcttctgactgtactgggttgggggagagggaagggacctgggggattcctggggaacactaggggcacccatgggngacctnggtccgaaacggagttggggactttcagcctaggaaccatgcaccattaggaacttgtaattgnatgcagggaatagccaacangcatnggttttcccattaggggagntttaacagaagagggaaatgggcntgggnacaggggacaattttt

SEQ ID NO: 264321 - DNA, 666 bp, Homo Sapiens
ggggggcacggctcctaagatccagcccccatactgacagacggacagacagacatgcaaacaccagactgaagcacatgtaatatagaccgtgtatgtttacaatgttgtgtataaatgggacaactcctcgccctctacctgtcccctccccctttggttgtatgattttcttcttttttaagaacccctgaaagaagcgcctccttcagggttggctgggagctcggcccatccacctcttggggtacctgcctctctctctcctgtggtgtcccttccctctcccatgtgctcggtgttcagtggtgtatatttcttctcccagacatggggcacacgccccaagggacatgatcctctccttagtcttagctcatggggctctttataaggagttggggggtagaggcaggaaatgggaaccgagctgaagcagaggctgagttagggggctagaggacagtgctcctggccacccagcctctgctgagaaccattcctgggattagagctgcctttcccagggaaaaagtgtcgtctccccgaccctcccgtgggccctgtggtgtgatgctgtgtctgtatattctatacaaaggtacttgtcctttccctttgtaaactacatttgacatggattaaaccagtataaacagttaaaaa

SEQ ID NO: 264322 - DNA, 1147 bp, Homo Sapiens
ggggatccattaacccttaatagtcaatgtctatgattttaatgtattactagatccacactgtcattatttcccccagttcgttaaatctgcaaatactttatgttcagttttacatctgttaaagcaagatcctcaagggcagggatggaattctactcacttctgcatcccttgacattgcagtgtgtggaacagagatgacaaatacaggttcaaatttgtgccacctgaaagagtgccatctagaagcagttgcttcaaactgcacttcaacgggacccacacgccctgctaagcaactcaaactcatcatgaaataaatctgcagaagaaatgtgtactctctattcaaactctgaagtaaataaaatgtgtatgattgacacaatcacaaaatggcatttaagtggaagtctgcttcctgaagaaataaaagccagagcaaacagatttggggtcatatttttgttcactgaaaggaccaaccagtttcatcaaacaagctttagagaaagagaaactgagtaattcatcttgtcagttacagttcacatatatacacacacatacaaactggctcagcatcagtgaaacataactattcaaatacaaaagtataaaaaacctctttaaaaaaccaatagcagccaaaacagaacatttgtaaacaaaaccacaactatcagccctgtgcttaaacacagaatctgcattcttttgaaacattaagtatatgcaataaagagaatatagaccatctttttccttaatatacaatacccaatatctaaaacaatgtcaccaataatagacacaaatcggtgttatcataaggcatgttgaacagtctttttcacagtactcaggggcatcatgttgctgcagaggccacactttccagaagttttctcctcgctgtgatcctcgcacaccgggggcactcggaggactggaagcactgtttgtgaaagcaagccctgcacgctgaacatcttctacatgttgctgtctgaaatgggaagatgacagtcgtattctggcaaaattcacaaataaagccctttccttgacacagctcacagccagccacatgtgcaagggaagctttcagaatgtccttgagtaagggtgccagcagccctcc

SEQ ID NO: 264323 - DNA, 839 bp, Homo Sapiens
gggactgcccagggggtgcaaagaagagacagcagtgcccagcttggaggtgctaactccagaggccagcatcagcaactgggcacagaaaggagccgcctgggcagggaccatggcacggccacatccctggtggctgtgcgttctggggaccctggtggggctctcagctactccagcccccaagagctgcccagagaggcactactgggctcagggaaagctgtgctgccagatgtgtgagccaggaacattcctcgtgaaggactgtgaccagcatagaaaggctgctcagtgtgatccttgcataccgggggtctccttctctcctgaccaccacacccggccccactgtgagagctgtcggcactgtaaactctggtcttctcgttcgcaactgcaccatcactgccaatgctgagtgtgcctgtcgcaatggctggcagtgcagggacaaggagtgcaccgagtgtgatcctcttccaacccttcgctgaccgctcggtcgtctcaggccctgagcccccaccctcagcccccccacttaccttatgtcagtgagatgctggaggccaggacagctgggcacatgcaaactctggctgacttcaggcagcttgctgcccggactctctctacccactgggccaccccaaagatcccgtggcacttccgatttaatccgcatccttgggatcttcctcgggaatggtcccttggtttcacccctggcccggggcccctgttccctccttcaaggaagggaattattgaattcccccagcgggaaaaagcccctgggggaaccctgccaaaaccccttggcccttaaagcctgc

SEQ ID NO: 264324 - DNA, 778 bp, Homo Sapiens
gtggtgtggtgtccagggatccatctttccagaatccatgcctgtgtaatgctggtccatgcttctgaacctgtgtctgccaagcgcctatttcattcagcacaagacatacgattttagaaggtgaggggaggggaggctttttctacctgagaaggggagtgtctttgagggccttaaaaggaccatggcccaggaatgggggcgctggttgggcttggagctcaggctgctgtggatcccggcgcatcagttctgacttgccttacctgggtggacagcagtgaatctccacctgtcttctccagggagctcccatgttggggctgaagacgagcaggggcaacctgccagcatcacagaattcagtgtagtttatacatttcgattcctttcatctcagcaaaatgggcactgccagagccatttctgatcacaccaccatcctggaccatgtgactggaaggtgggtaaccaagttcaccagcaataaaacccagcgcccaggtagcctccagcagtgcggcttcctggcaacaaggtaggccctggtgcagggcaagccgcagcgaccatttcagataccgtccacagccaggaccgctgagaactgggacagtttcctgggatgagtgccagcctgagcctgcatggtgccgccgagcccggggtggaggagggagcccaggttcgcttcaaggcggcctctaccttttctcagaatggtttcctgattgtgtcaatgtgaaagttaaataaaatttatgtgccaaacctg

SEQ ID NO: 264325 - DNA, 986 bp, Homo Sapiens
  misc_feature (584)..(628): n is a, c, g, or t
gggccggcggggagcaggatgccctggacctgtaccagcacagcctgggggagctactgctgttgctggcagcggagcccccgggccggaggcgggagctgcttcacactgaggttcagaacctcatggcccgagctgaatacttgaaggagcagatgagggaatctcgctgggaagctgacaccctggacaaagagggactgtcggaatctgttcgtagctcttgcacccttcagtgaccctagaagaatgattggacagatgtgagccatctggagcagaggggcactaacccaggctgacgccaagaatgaagtggcccactgcagccctggcaagcaggcttcttggatggacagtgctgagacccccatatcccagagtccccagcctccctcaggttactctgcacccccacagatggtttgatggctgtgctggatactggaaggggaggggcaggactcctgggagaacagcacttcctttcctgagaccctttgttactcgggggggttacttggggccctgtgccctggaccgttttctggggggcatgccagcccgcccctaatcattttatnnnnnnnnnnnnnnnnnnnnnnnnnnnnnnnnnnnnnnnnnnnnngccaagggaacacctctcctgggggcttttgacccctcccctccccctggtccaagcgaagggcaaatcttgggggccccccctggggccccgggcacccttttcccgcggggaaccaccgctgaaaattccccagggtcagaggcttccctccttgtttgaccccttgggagaaaggtgggggcaaagtttcaaacctaccgcgcgttgaaggggaaaccgactgccgttccgccagaaagataagtggacactttctgacccccccaccggggaacaccccagccccgatcctttttcccgtggggagaacactcataaaaacacgggggggccgcatgcccattgttctggggga

SEQ ID NO: 264326 - DNA, 767 bp, Homo Sapiens
aaagcactgtttattattggtactgattcttatccctctgtgtgaataaatgtaaagacggtgtccgtgtggttatatcttctctcgttcacttactggcatagactgcagttctctgacaggcttgtttccactcaggactctggccagcatgtccacgtggggtgcttcttctaagtgccttctctgcagagggttctggctagagagtcaaactgagaggcaactctctttaccctttatgcctgcctacctctgttgttagagatgagaatagagaccagctgtttccattgcaaatgtcactatttgaaaagaagttgttaatggaaatctctgcaagtatcgtactgtgtttagtctctcgatggtagagatttcaaaagaagaaatgtatgtatcctaaatatgctgaaagcagtctgatgaaaggtttttaaatttcaggtgttaacttggtcaactctttgttaggaggttgtctgtactttaagtaaaattattctttggtttactggttattttggtttgctaaaattatgtcacttataattttgatttatatacaagagtgaagaattgaaggaaatactgaggagagacgtatgaactattttcttcatctcaattcctattttatcaaatgcaaaatgtaatcctaaccagttgattttctataattggtatcttagtactggggaggagtatcacatgaggaaagatttttcaaagcatgtcagctgaggcacaagaatcgcttgaaccca

SEQ ID NO: 264327 - DNA, 800 bp, Homo Sapiens
gggggacagacaggagcccaagactgaagccagcccttgcctcttgtgtcccttcccaactctggtgctggagtaatggggtgctctgcattttgatggggagcaaggggggaccccccctgtaggagtatcggcctctcccctgccccctaccctctctcgtggaccaaagtctccagcagaagggactcatcataagactgacgactcccccacctccacccacacaccgagtgtcatcagtccctaaaggcagggaaaacgctcacagaattcctgcccacgggttaagatgtggggagaaggatattctcagctccagagtgattaggtgatcagccagaaactaaggcaaggtgacaagcagcagcctggagtcacagttggtcccaggcgtgtgggcactaagcagcctctggagacatgcgggcagttgaggatgcaaggacacagtgagtgagtggcgctcctttttggggtcctccagcctctagtcaagccccaggttcgtaaatatgtttgtattacattttaaaacctgtatcaacagtcacatttaagctccctattgggttaaagaaaaatcatactccaggtaactttttcccattcgacctcctatagagacaatatgcaaggtgtcatttcccagtctcagtccctgtgaacagtggctgacaccggtgcccaaggctgacctgctacactccaaattcctaaactgggctgccttctacctgcccccctgggaaaccacccaaaccactccggtctctttggggcctaaacaatgaaagggt

SEQ ID NO: 264328 - DNA, 830 bp, Homo Sapiens
ggggcagcctgtcttgctcgcggagagaggagctaggagcctcggccaatgggagccggcgttgttggaggccacggcggcgcagccccaaagcgagcgaagctagggtcgccgccactgccgcaggaggcgtgaggggataaaaacattcagatggcagatcacagtttttcagatggggttccttcagattccgtggaagctgctaaaaatgcaagtaacacagaaaagctcacagatcaggtgatgcagaatcctcgagttctggcagctttacaggagcgacttgacaatgtccctcacaccccttccagctacatcgaaactttacctaaagcagtaaaaagaagaattaatgcattgaaacaaattcaggtgagatgcgctcacatagaagccaagttctatgaagaagtacatgacttggaaagaaaatatgcagcgctataccagcctctctttgaccagagaagagaatttatcaccggcgatgttgaaccaacagatgcggaatccgaatggcacagtgaaaatgaagaggaagagaaattggctggagacatgaaaagtaaagtagtcgtcacagaaaaagcagcggcaacggctgaagagccagatcccaaaggatttccagagttctggtttaccatctttcaaaaatgtggaaatgcctgatgaatttatccagggatatgatgaacccaatcttgaaaccccctgcagggaatttaaaggtgaaatttttctgaccccgggacagccctatggcctttttggggttaaaagttcccccttttgaacccccaacgaactactttttatccacacta

SEQ ID NO: 264329 - DNA, 978 bp, Homo Sapiens
tcaaagacagagacaccaagaagaatcggaacatacaggctttgatatcaaaggtttataaagccaatatctgggaaagagaaaaccgtgagacttccagatcttctctggtgaagtgtgtttcctgcaacgatcacgaacatgaacatcaaaggatcgccatggaaagggtccctcctgctgctgctggtgtcaaacctgctcctgtgccagagcgtggcccccttgcccatctgtcccggcggggctgcccgatgccaggtgacccttcgagacctgtttgaccgcgccgtcgtcctgtcccactacatccataacctctcctcagaaatgttcagcgaattcgataaacggtatacccatggccgggggttcattaccaaggccatcaacagctgccacacttcttcccttgccacccccgaagacaaggagcaagcccaacagatgaatcaaaaagactttctgagcctgatagtcagcatattgcgatcctggaatgagcctctgtatcatctggtcacggaagtacgtggtatgcaagaagccccggaggctatcctatccaaagctgtagagattgaggagcaaaccaaacggcttctagagggcatggagctgatagtcagccaggttcatcctgaaaccaaagaaaatgagatctaccctgtctggtcgggacttccatccctgcagatggctgatgaagagtctcgcctttctgcttattataacctgctccactgcctacgcagggattcacataaaatcgacaattatctcaagctcctgaagtgccgaatcatccacaacaacaactgctaagcccacatccatttcatctatttctgagaaggtccttaatgatccgttccattgcaagcttcttttagttgtatctcttttgaatccatgcttgggtgtaacaggtctcctcttaaaaaataaaaactgactccttagagacatcaaaatcta

SEQ ID NO: 264330 - DNA, 845 bp, Homo Sapiens
ggggaggcgcggaggggctggctgggcaggaggggttggcggggcagcagggccgcggccatggggagcttgaaggaggagctgctcaaagccatctggcacgccttcaccgcactcgaccaggaccacagcggcaaggtctccaagtcccagctcaaggtcctttcccataacctgtgcacggagctgaaggctcctcatgacccagttgcccttgaagagcacttcacggatgatgatgagggtccagtgtccaaccagggctacatgccttatttaaacaggttcattttggaagaggtccaagacaactttgacaagattgaattcaataggatgtgttggaccctctgtgtcaaaaaaaacctcacaaagaatcccctgctcattacagaagaagatgcatttaaaatatgggttattttcaactttttatctgaggacaagtatccattaattattgtgtcacaagagattgaatacctgcttaagaagcttacagaagctatgggaggaggatggcagcaagaacaatttgaacattataaaatcaactttgatgacagtaaaaatgggcttttctgcatgggaacttattgagcttattggaaatggacagcctaccaaaggcatggaccggcagactgtgtctatgggcaataatggagcctttaatgaacttatattagatggggtaaaaccagggttacatgatgaaaaaagggcccaccgacggaaaaaactgggactggaaccattggtttgtaacttaaaacccaacatacatttccttactaatgggaagggaagcacctccaaggcttcggaaagggaggcctttcctc

SEQ ID NO: 264331 - DNA, 796 bp, Homo Sapiens
  misc_feature (569)..(623): n is a, c, g, or t
gggaacattccagcactttctatctggcctccttgtccccacactacgcccccccaccctcgccagggcttcctctagtgacactgttagagctaatctctgagacagggaaggcattactcacttaaaacccaggctgagtcctggccacctgctggattgtgacataggaggtggaatccactgaactgctacttctgcacaggctccttctcctggggctgtacccaggcccagccctgatggctcaccctgtcaggcaccagctgctccctcctgggctctcacccacctgcacatcctccttcctagcatcacattacctgcgtgtttccccagacaaaagcacttccccattcttgaaccttgcctaccctgggctgagctgacggcaatagatttaatgacagtgactcccaggaagggggtcctgtgacctttgcgcccttaataagaacaaaaaggtggaattggtgacctaggaaaactgttgaattctaaaaagaatgaagttagtttctaacccctagtaatgttccctttttattttttgagtcttgccctgtcannnnnnnnnnnnnnnnnnnnnnnnnnnnnnnnnnnnnnnnnnnnnnnnnnnnnnngtttagccgattctcctgggtagctgggattacgggtgtggtcccaccccaccttagcccctggggcataatttgtactcacaaacaaggtttttgcctagtttggcccaggcctgggtcctcaaattcctgggctttcagtggatcaacccaacctcgggctttccacaagg

SEQ ID NO: 264332 - DNA, 1165 bp, Homo Sapiens; identical to SEQ ID NO: 98022

SEQ ID NO: 264333 - DNA, 1666 bp, Homo Sapiens
  misc_feature (931)..(944): n is a, c, g, or t
gatgccatatatgtgaaatatagaacaaccgcttgggatttttaaaaagcagcggctggtacggtccggaatttcgggatatcgtcgaccacgcgtcgcaaaatcatcaacctgcctgtggaggagttcaatgaactgctgtccaaataccagttgagtgaagcccagctgagcctcatccgagacatccggcgccggggcaagaacaagatggcggcgcagaactgccgcaagcgcaagctggacaccatcctgaatctggagcgtgatgtggaggacctgcagcgtgacaaagcccggctgctgcgggagaaagtggagttcctgcgctccctgcgacagatgaagcagaaggtccagagcctgtaccaggaggtgtttgggcggctgcgagatgagaacggacgaccctactcgcccagtcagtatgcgctccagtacgccggggacggcagtgtcctcctcatcccccgcacgatggccgaccagcaggcccggcggcaggagaggaagccaaaggaccggagaaagtgagcctggggaagaagggggtttgaagcccaccaagaccgaaactggagaagggctggacctggacctggacctggacctacagcggggacttaaatgccttcttatccaatatatcttctcagatgggatgactgcgggtcagtgtacaggaagaggcaggcactggctggctcagctccactcgggtggagtggaagtggccagaccatttagacggacagggtcctcaccctacccctttcctgtgaagcaggggtggtggtggagttgctggaaggtagaggagctatgtggagcaaaggccgacagaggggaaggaatggacctgtgagaggaagggaaggtggcagaaagtctcatttcaggaaggagggatagaaggaaggaaggaaggaannnnnnnnnnnnnngaaaaaaaatccaggggggaaaaaacaccagggaagggtaagggttgcgcccggccaggattccagggaccagcttggaacgaccggggggcctaaaaccacgggcgggcataaagcccaattcaccccggggggggctggggtccccagacccagagtgagtggcggctgtgagcaagagggcgcggtgattagaacacaccatacggggaccctgagcaacatttgtgggacacatcctctgagaaagggggaaacccccgtgaggataatcacagtggggcccatggtttccaactgcgcgaatgtggccccccagtggggcccgcccaacacagtggggcttggacaacttttagagaggtccaagggcggttcgactagtgtgacacccgcggcaaacgggggtccacggggttggtcccacatgttgtttggtcacaactagcggcccccaagaatgttcttcgcggcatcgtgtgctcactttcacccgatgggggccctttgtgctccagtctccatattcttctcgcgcattccgggtggtcctctagcaagggtccagacgcgccctcttggtcgccatgtggggggctcccccccaattttgtggctgccccattcgagagaagccccgtgccattgtgtgttgtattgggccagggtctcttacccacccgtcgggtaccggcgtgttgtggggtgtctcgccagcgcct

SEQ ID NO: 264334 - DNA, 915 bp, Homo Sapiens
  misc_feature (344)..(344): n is a, c, g, or t
catatttcctcccgcagccccctctatgtgatcccagagccctctgtgcataatcttaccagtgcatttacctcagtgcttttagaattctgtttagagtgtcagtatttttcctcctgggctgtgtatatctttatgtccttggtggcttctcagagactggcatgtctatctgcttaattgatgtctgctgaatgaatcgaatgagtgagttctaataataaactgtaaaaccacctcttcgagaatgggcaggagcctctgcagctaagcagagctggggattccaaatgcagatctgaaagctgcaagaccatttctggcctcacagtcccagagctgangatccttggctttgaaaattctctgtataaactttacacaagcttatgaaagccattagcttaatccaagtcactagcattggaatctgagcccaggttgttggcaggaaaatataaacacaaaccttagctctgtgttcaggttcttcttcctccctcagtcatgactctgatgtgcggattgttttgctacaggacctggaaaactgatttgcccaaaggaatgtgtaccctggtgtccctctccgtggagcaatgaggaagcccagctcctgggtggtgtgcgagcagtggtgatggactcgcagtacttgatagaaccgtgtggctctggcaagtcaagactgactcacatctgcaggatagacctgaagtaagtgctgactcccttaatggcaggctcagatcttgggagtctcagcttgtacagcacatccagcagggatgtcaccctgatttcttatttcactgtatttgtttcctcattgccattagtgtgctttcataggtggatatgtatgcctcccctctgtctttccccctttcctgaaattctgacatttctcctgca

SEQ ID NO: 264335 - DNA, 536 bp, Homo Sapiens
  misc_feature (16)..(16): n is a, c, g, or t
  misc_feature (25)..(25): n is a, c, g, or t
  misc_feature (33)..(33): n is a, c, g, or t
  misc_feature (48)..(48): n is a, c, g, or t
  misc_feature (78)..(78): n is a, c, g, or t
  misc_feature (149)..(149): n is a, c, g, or t
aagtggatggcaaaantgctgtcanccccttcntccctccccctctcncccaactccccggtgctgaaggctgcaatnaagaaccccggtaagggaaggggtgccgcaagccaacctaaacggtaatgtgctctcccttcaagcccctnctcccttcggagggaacgtggtcttgccccactgtccttttgccctcccatgctgaggtcggtgctgtatttcagagggagggtccttttcattctccttgctttgtatttaaggactggggcatagcaatgggggcagtcccccagacctcttcattccccctcctgtggtgagggctaggtgtgatcaacacttttcttctccattcccttcctgcttttttcatggtgggggatccaccaggtcatctaggctctggccctagttgaaggggcaccccttcctctgtgccaagaggattcatcctgggagagggggcaaggtggaatgcagataactcacatgtaaaaggaacttgggtaggtaaataaaagctatacatgttg

SEQ ID NO: 264336 - DNA, 777 bp, Homo Sapiens
ggggagcaaaatggcgcgggagaaggagatgcaggagttcacccgtagcttcttccgaggccgcccggacctcagcacgcttacgcattccatcgtgcggcggaggtacttagctcactcgggccgcagccacctggagcccgaggagaagcaggcactgaagcggctggtggaggaggagctgctgaagatgcaggtggatgaagccgcttccagggaagacaaactggaccttaccaagaagggcaagaggcctcccaccccttgtagcgacccggagagaaaaaggttccgcttcaattcagagtcggagtccggctctgaagccctccagcccagactactttggacccccagcaaagaatggggtggcagcagaagtcagcccagccaaagaggagaatccaaggcgagcctcaaaggcagttgaggagagcagtgatgacgaacggcagagggacctgcccgcacagagggggagaggagagcagtgagggaggaggaaaaggggtacaaggggaagactaagaagaaacctgtgggtaaagaagcaggcaaccagcaaagccctcagtcagtaggaagcaggccagggaagaaagtgaggaaagcgaggcagaacccgttcagaggacagcaaagaaggtggagggaaataaaggaactaaaagcctgaaggaaagtgaacaggagagtgaagaggagatcctagcccagaagaaagagcagagagaggaggaagtggaggaggaagagacacaaaaaaacgaaaaacaa

SEQ ID NO: 264337 - DNA, 961 bp, Homo Sapiens
gggggcccgcgggcccatgaggaggcctggggaccatgggctccaggatcaagcagaatccagagaccacatttgaagtatatgttgaagtggcctatcccaggacaggtggcactctttcagatcctgaggtgcagaggcaattcccggaggactacagtgaccaggaagttctacagactttgaccaagttttgtttccccttctatgtggacagcctcacagttagccaagttggccagaacttcacattcgtgctcactgacattgacagcaaacagagattcgggttctgccgcttatcttcaggagcgaagagctgcttctgtatcttaagctatctcccctggttcgaggtattttataagctgcttaacatcctggcagattacacgacaaaaagacaggaaaatcagtggaatgagcttcttgaaactctgcacaaacttcccatccctgacccaggagtgtctgtccatctcagcgtgcattcttattttactgtgcctgataccagagaacttcccagcatacctgagaatagaaatctgacagaatattttgtggctgtggatgttaacaacatgttgcatctgtacgccagtatgctgtacgaacgccggatactcatcatttgcagccaaactcagcactctgactgcctgcatccacgggtctgcggcgatgctctaccccatgtactggcagcacgtgtacatccccgtgctgccgccgcatctgctggactactgctgtgctcccatgccctacctcataggaatccatttaagtttaatggagaaagtcagaaaacatggccctggatgatgtcgtgatcctgaatgtggaccaccaaacaaccctggaaacccccttcgattgacctccagaagctctcaaaacgacgtgatctcttcccctgatgaacagggttgaaaaaggtctccaaaacactggggat

SEQ ID NO: 264338 - DNA, 820 bp, Homo Sapiens
ccttccccgttcgtgggtcacccagaggacagggcacatccccagcggcttgaaaacagagccgctcccaaaagtgggctagagggtacacttcggcaaaagggatcatcttcccccctggcttgctggactcttggaaatgcgtctgaaagcccttgccatcccgtcttgtgctgatgacagcatgagccccggttgcaccttgctcagcaacaagctgcgagatcctcagcttctcactcataccccaccttgagctgctgacggcggcctggagaaccgtgtgtggctgttcctggatgacatctgctgtcactagccttcccagaacacccgctgcccagggttcctgctgccttccccggtggacagattttgcagggaagactgaggaaatgggagggggagctctgctctaaagcagaaggcacagaaggtggggtttttgttttatagggagactgcccagtgtgctgcaaaaggaaaaccaacaacagggagtgcccaactcaccccctctgcatgagcaaatgcagatggacactggactgtgccgactgacaccgggactcacacttgctggtcagtggacgagaggtaaaagcaggcaggattattacaggaataaatctgcacttccaaagaggcagctcccatgactgagttacaatgcttggagcccccgagggcagagtggcaccagctgggaggttgacactgcatcactgcttcggatgccctcacaggctctgactcgctgccaggtgctggtgaggctggaagaacttccttccttcctatgtacaatgcaaacagtgcc

SEQ ID NO: 264339 - DNA, 1001 bp, Homo Sapiens
aaagcaggcggtaccggtccggaattccgggatatcgtcgacccacgcgtcccgagctgacatatggaaatgtcagtccaatacagacctcagcgttccccattatttcgaggaaggaagagattaagcgatgaaaaaaaccttcctcttgacggtaaacggcaacgtttccattcaccccaccaagagccaactgtagttaaccagatagtgcctttatcaggtgaacgaagatactcaatgccaccattgtttcatacacattatgtaccagatatagtcagatgtgttccaccttttcgagaaattgcatttttagaacctagagaaatcacactgcctgaggccaaagataagttgagtcacgcagatactggagttatttgaaacatgtcagcagcaaataagtgatttaaagcacacgaaagaactctgtcgaacacagctgcagacagaacacttcagctgttatcttccacaaagcagactctccccggttgggtcctctttaaatggatttggtacccggagcagtgatggtgatttatgcctagtagttaaggaagaaccagtaaatcagagactgaagcacggcatatactcaccttagtccataaacacttctgtactagactttcgggctacattgcagagaactcagctgattcgagcaaaagtgccaatcgtgaaagttcagggataaagtcagtgtgtgggttggttgatgtgactattgttggagtatgaacacatttctttttcgaacttatgggtatccttggaatgcagttgccggagtggggtagaacgggggcgcccaagatagaggcgggggggttagaagatattgttggggggggatttaacactgaagattttctcaaaataacaggttttggttgaaggggtaacgagtgctcctgaaaaaggggacggtaaataaagaggagaatgtgaaaccgcgtggatgaagagacgcatggctgtcgttatgtatatac

SEQ ID NO: 264340 - DNA, 861 bp, Homo Sapiens; identical to SEQ ID NO: 178906
  misc_feature (673)..(673): n is a, c, g, or t
  misc_feature (765)..(765): n is a, c, g, or t
  misc_feature (772)..(772): n is a, c, g, or t

SEQ ID NO: 264341 - DNA, 863 bp, Homo Sapiens
  misc_feature (150)..(170): n is a, c, g, or t
  misc_feature (459)..(483): n is a, c, g, or t
  misc_feature (786)..(794): n is a, c, g, or t
gggccctgttgtacagagtcctcccgggaccgaggccaacttctctgcttcccgtgcggcctgcgacccatggaaggagagtggtgacatctcggacagcggcagcagcactaccagcggtcactggagtgggagcagtggtgtctccannnnnnnnnnnnnnnnnnnnnaggccagccccaagtatttgggggatgcttttggttctccccaaactgatcatggctttgagaccgatcctgaccctttcctgctggacgaaccagctccacgaaaaagaaagaactctgtgaaggtgatgtacaagtgcctgtggccaaactgtggcaaagttctgcgctccattgtgggcatcaaacgacacgtcaaagccctccatctgggggacacagtggactctgatcagttcaagcgggaggaggatttctactacacagaggtgcagctgaaagaggaatnnnnnnnnnnnnnnnnnnnnnnnnncgcaggcaccccagtccctgggactcccacctccgagccagctcccacccccagcatgactggcctgcctctgtctgctcttcaccacctctgcacaaagcccagtcctccggcccagacattctgggccgggagtcctccctgcccctcaggggctctcagcaagtccgctcctggggtcttctgggaacattccgggcagatcatgcataccagggctctggcctcctttccagatcccagtctcaccacacatcttaacccagggtccactggggctgctgtcccccttcgccgcctggnnnnnnnnnccgggtccgggaaccggtcccttaaactttcagcggacccccatcaagcaccaacctggcaatgaatat

SEQ ID NO: 264342 - DNA, 625 bp, Homo Sapiens
  misc_feature (398)..(445): n is a, c, g, or t
ggggtgttcgccattaatgaccggcagagtttcaacgaggtgggcaagctcttcacgcagattctgcgggtcaaggaccgcgacgacttccccgttgtgttggtcgggaacaaggcagatctggagtcacagcgccaggtcccccgatcagaagcctctgccttcggcgcctcccaccacgtggcctactttgaggcctcggccaaactgcgtctcaacgtggacgaggcttttgagcagctggtgcgggctgtccggaaataccaggaacaagagctcccaccgagccctcccagtgcccccaggaagaagggcgggggctgcccctgcgtcctcctgtagcccaggcaagagagaagcaaccaccacaagctctcgggactagctgccttcgcacnnnnnnnnnnnnnnnnnnnnnnnnnnnnnnnnnnnnnnnnnnnnnnnnggtctcccaggacacatcacatacccacccttacttcctggcctcttctgggctactgccactgtgtgccttctgccaacgcctcctgtccccacctaagcctggtgggggtgaggggctccgggtcactgctgtatataactccccccccccagaaaaataaatgtcactgccaacgtc

SEQ ID NO: 264343 - DNA, 1225 bp, Homo Sapiens
  misc_feature (153)..(153): n is a, c, g, or t
ggtggcagctctcaaatcttgcagccctttacttcctttattaataacagtgttctgcataaattcgtgccacagtgtaatcaactatcaatgtgaccattagctccgccacaagtaaagatcgacaggatccaggctgcactgtgtgcacancagcccaggcaggtgaagagtcgtgacatcgcaaaaaggaccacggtttattaccatctctaacgcccatgttccagcaaaccgaagaaaaacactgtttcttaaaactgcagaggaatacaaaattaaatactacaaaacaaaaatcagacaggaagacgaaacaatctacctcctcctaatggtaaaataatctgaaaggagtttaaaaataaatgaactaaaatttttataactattatcttttctgccaattttgaagatgtctacaggtgccacaacgtggggacagaaagaataaatatcaatgtataacttctagagtgataataaacaacaggaccccatctcagatggatggattttttttcctactggagccaaaaaacaagctgaactctatgtacaacagacagactatacaactaggagcatttaaaaataataagactcctctctctgccttcttccaaagaatagaatatatatttaacagcacaaaagacgacaccacttgagcttcccctttagccaacaggaagaatttccacatataaaaattaaaaatttaaactttcaaatcattcatgttttaaacataatacagacttaaaaattcttcaacattgacccataatcccaccccagcacaaaaatcaaccccaaatccagacgtcacagttttttgttcctaaaaatcccacagcactgaacttgatcttcacatcaagctgacagcacgtaagaggcccatgccatgagcaatccccgagggaagaacggaagcacagtcaatgctgcagctcttatctacctgggcggcactggtgcacctctgaggtcaggtccgtgagattcgccccacactagggtcccggaagggtgagctggccgcttccctcctcttccccctcgaaggatgtccaataagcacctgggaattgacttttcttgggaaaagggtgctggtaacagctgtcagggccaaggcaatagtgagaagttcagttctctgctctttggatgaactgtgtaaaacatttcttttaaaagacacaatgttaaaaatatt

SEQ ID NO: 264344 - DNA, 786 bp, Homo Sapiens
  misc_feature (729)..(729): n is a, c, g, or t
ggggtggtggctgggtatggaggcgaaggcggcacccaagccagctgcaagcggcgcgtgctcggtgtcggcagaggagaccgaaaagtggatggaggaggcgatgcacatggccaaagaagccctcgaaaatactgaagttcctgttggctgtcttatggtctacaacaatgaagttgtagggaaggggagaaatgaagttaaccaaaccaaaaatgctactcgacatgcagaaatggtggccatcgatcaggtcctcgattggtgtcgtcaaagtggcaagagtccctctgaagtatttgaacacactgtgttgtatgtcactgtggagccgtgcattatgtgtgcagctgctctccgcctgatgaaaatcccgctggttgtatatggctgtcagaatgaacgatttggtggttgtggctctgttctaaatattgcctctgctgacctaccaaacactgggagaccatttcagtgtatccctggatatcgggctgaggaagcagtggaaatgttaaagaccttctacaaacaagaaaatccaaatgcaccaaaatcgaaagttccggaaaaaggaatgtcagcaaatcttgaacatgttctgatgaaagaaccaagtgaccccaagtgacctggacaagattcatagactgaaagctgttgacatcgttgaatcatatggctatataattggtttaaatcggcccggcgaacctcgcacgcaatcanctgttacatggtcggccgcctcggcccctcaaaaagcttttctaaacactttccgtt

SEQ ID NO: 264345 - DNA, 791 bp, Homo Sapiens
ggcaaacatcagtgtccttctagctttagccgagaaagaaaccagtcccagggaatgaatggtggtctccccactcccggcagcactttaggcagcccataagctatgcgagaatgtgaacgctcaccttgctccgtcacggttctgacctaccacataaacaggaagaagccagtgaccggaacagctctaggaataacaagtcagaatagaagtgtcctttatattaccagaaaatatgggcttggcctaagtcgctgtctcctaacctgccggggtcattccccaccaaacaccccatactaaggagccatgagccacctggacattcaccttttctttgaccatctggagtctggggcaacttaaggaggcaccacacagtggtgcaggcacatttccaagcgtaggtgtccctggcttttgtggccaaagctagtgttatggtcaacaacaggccagggtctgtgggccactgaccttgaaagtggcaaaatggaggtttcacaggctgtgcgggagcaggacggcttgcttcatctaacaatctcagtttcctttaaaaaaagaaagaaaggaaaagatttcataagcaggtgtcagtgggacagtttaagtacttaaccatttctctttcttcttatggatgtgaactgtgctggggataaatcatttgtatttcttgaatgttctctatgactaacagtttattaagtcgggtgtggatatgtgtaactaatggaactgcccttttaaaatttcattaacaataaaaatgactttgctctgaa

SEQ ID NO: 264346 - DNA, 1311 bp, Homo Sapiens
  misc_feature (1295)..(1295): n is a, c, g, or t
tgtggctacaccgtataaagggatgatttatgtcctgggtggaacaatgtgaaatttcatcacattagtgagaacagtgtacagtttaaaatttccgagttatttattttgggaatattccatttaatgtttttgggccacagttgccactggtaattgaaatcatggaaagcaaaacagcagctaatgtgggatgactgtaccaatgtcttggggggagggagccagctgattgtgagatgtaagtttgtgattctgagatagcagctttgcaaaaaactgcaatttgtcaattcaccaatattgataatgtgcaagcttggtgagctgagaatattcctgaaaacctttgttcccactgcggaattcctggggacagttatgagttccttaatgacgtcaccacaaagacattttggagtgtttggtaaaggcttgtttcttttcagtgattgctggaagcagatgggatcaaataaaaatagaacattgtgggctcccaaggctgaggtggagctggaggatgccggcccagactgcggagcagcagtcttccttgtgcacatgcctgaagtccgcgtgggtgtttgaggaagtggggatacagcatttaatgaaaaatttatgcttaagaagtagaaaatggcagtcttcctagataattttcaatggccagaatgtgaatgtattgacgagtgagagaagaaatgttgtggcgtctgttgtcgcaggtatattgttttttacaggctggtggataatgattgatgcagctgtggtgtatcctaagccagaacagttgaaccatgcctttcacacatgtggtgtattttccacattggctttcttcatgataaatgctgtatccaatgctcaggtgagaggtgatagctatgaaagcggctgtttaggaagaacaggtgctcgagtttggcttttcattggtttcatgttgatggtttggtcacttattgcttccatgtggattctttttggtgcatatgttacccaaaatactgatgtttatccgggactagctgtgttttttcaaatgcacttatatttttttagcactctgatctacaaatttggaaagaaccgaaaagctattggacctgagatcactttttaaagtcacattttcccttttggtaaattcccgctctggaagatagggttttttatctttcagtacccaattgcccaaaggagcacaatggacctttaaagggttttggctccttaacattttttaaggtcctgagattttgaaataacttttattgaatttcctntatttttcccctggcc

SEQ ID NO: 264347 - DNA, 344 bp, Homo Sapiens
  misc_feature (91)..(197): n is a, c, g, or t
cccctttaatacgggtgtagcccacacagaataaccctaccccctctcctcagtcaccctagtagtcatcctcagttaagcgttgttagannnnnnnnnnnnnnnnnnnnnnnnnnnnnnnnnnnnnnnnnnnnnnnnnnnnnnnnnnnnnnnnnnnnnnnnnnnnnnnnnnnnnnnnnnnnnnnnnnnnnnnnnnngctagacacaatagcatgtacctgtagtctcaggtagtctggaggctgaggtgggaggaccactttttgacgctgcagtgtgctaagatcttacctgtgaataaccactgcactcagcctgggtgacatagcaaaaccccctaacaa

SEQ ID NO: 264348 - DNA, 1205 bp, Homo Sapiens; identical to SEQ ID NO: 9998
  misc_feature (343)..(354): n is a, c, g, or t
  misc_feature (356)..(451): n is a, c, g, or t
  misc_feature (457)..(478): n is a, c, g, or t
  misc_feature (618)..(626): n is a, c, g, or t

SEQ ID NO: 264349 - DNA, 828 bp, Homo Sapiens
gggagttccgacgaaaaatggcggggtctcctgagttggtggtccttgaccctccatgggacaaggagctcgcggctggcacagagagccaggccttggtctccgccactccccgagaagactttcgggtgcgctgcattcgaagcgggctgtgaccgaaatgctacaactgtgcggccgcttcgtgcaaaagctcggggacgctctgccggaggagattcgggagcccgctctgcgagatgcgcagtggacttttgaatcagctgtgcaagagaatatcagcattaatgggcaagcatggcaggaagcttcagataattgttttatggattctgacatcaaagtacttgaagatcagtttgatgaaatcatagtagatatagccacaaaacgtaagcagtatcccagaaagatcctggaatgtgtcatcaaaaccataaaagcaaaacaagaaattctgaagcagtaccaccctgttgtacatccactggacctaaaataccaccctgatccagcccctcatatggaaaatttgaaatgcagaggggaaacagtagcaaaggagatcagtgaagccatgaagtccttgcctgcattaattgaacaaggagagggattttcccaagttctcaggatgcagcctgttatccacctccagaggattcaccaagaagtcttttccagttgtcataggaaaccagatgcaaaacctgagaactttataacacagatagaaaaccacaccaaaagagactgcttccaggaaaacctctgacgtggaactgaaaagaaagcaaactaaagactgcccccagagaaaatggtatc

SEQ ID NO: 264350 - DNA, 542 bp, Homo Sapiens
  misc_feature (145)..(153): n is a, c, g, or t
ttattttcaacataatttactacaggtctctgaagtgtatataaaatgttttagtgcaacatcttacaaatagttttcctttaaaaaaacagaaacaaatcaacagctctctacatcatgcatgggtagttttcttaccccatcnnnnnnnnncctcaataattaacgcagagaaaccattgtttgaaaagaatatgaaaacttgctacagaaacacccggtgaaagagggtgtggtcatattcatgtcctagaatgcgcctagcacagtgtagtttttcataaatgcaacattgtagacatagatgaatccagagtattcagcagttttcctccgtctcagaagactaaagctccagtagacaatgcgcaatgaggtctcacagccactggagggcaccattaccatccatctgacatcgcatttccatagaaatggccaaagaaagaaggtcctggggtttttcatagaaagctcaaaaagttcaacctttgatgctatcccccagcccaatacaaaatacacagaaaaagcaattatta

SEQ ID NO: 264351 - DNA, 791 bp, Homo Sapiens
  misc_feature (236)..(497): n is a, c, g, or t
gggggagtgggccattccctgggactctcactcctgcactgccagccccttctcctctccccagggcctggccctacctcctggtcttgtaattacaggagccatttctgtaggtaactggaccaagaatgagaaaaataatgaattcttagctccctgattacacctgccaccttggaatccaggactcacacttctgaccctgcctgtctttttggggtttttttgagttggannnnnnnnnnnnnnnnnnnnnnnnnnnnnnnnnnnnnnnnnnnnnnnnnnnnnnnnnnnnnnnnnnnnnnnnnnnnnnnnnnnnnnnnnnnnnnnnnnnnnnnnnnnnnnnnnnnnnnnnnnnnnnnnnnnnnnnnnnnnnnnnnnnnnnnnnnnnnnnnnnnnnnnnnnnnnnnnnnnnnnnnnnnnnnnnnnnnnnnnnnnnnnnnnnnnnnnnnnnnnnnnnnnnnnnnnnnnnnnnnnnnnnnnnnnnnnnnnnnnnnactacgcccggcccatgtctgtctgtcttgatgtgtgagcagcagctgtggtcattaaaccattagtttacccctctagaactggggtctgcaaactcccacctgcagccaaatctggcccacctccctttttaatgtaagggctgtgagagtggtttttactttttttaattgattaaaaaaatcaaaataatattctgtgacaatgacaggtgaaattttatatgtgacaagtgaaaattatatggaaatttaagagtccataaaataaaatttgttggaaccccaaaaaaa

SEQ ID NO: 264352 - DNA, 1392 bp, Homo Sapiens
gggggagtccgggcgtgcgccggccgagggagggggcgcggcggctttggagtccggcgctccctcaagccgcggacgcgatgctggttgctgcggctcgggcggcggggctggcggggatgtgacgggcggcccttcgtctcaccttccgtcctcgggcccgcaggtcgcagggcggcctgcagctgggccgcggccgaggaggcagcgcgacctccgcacgattctttcaacttttaagaacaaatgcaccttatagctcatggaagaaaaaacacaaatcaagacatttttgggttccaagttgccaaagtatggaacaaaatctgtaagaagtacattgcagccaatgccaaatgggacacctgttaatttattaggaacttccaagaatagtaatgtcaaaagttacatcaaaaataatggctctgattgtccatcatctcattcatttaattggaggaaagcaaataaatatcagctttgtgcacaaggtgtcgaagagcctaacaatactcaaaattcacatgataaaataattgatcctgaaaaacgtgttcctactcaaggaatgtttgataaaaatgggataaagggaggtttgaaaagtgtttctttattcacatcaaagttagcaaagccatccactatgtttggtgtcatctacagaggaggttaaaccaaaagtctttttctggaccatctaatttgggtaaatttcaccaaaggcacattattaggaaggacttcatattctttcgatcaatactccaaaatcacagttgaatgggattttatggaaaccgatcagctggtagcatgcaaaaggcctagagcgaactcctgtgccaccagaagcagttctggagaaagcttagctcaatccccagacagtagtaaatctattaattgtgaaaaaatggtaaggtcacaaagtttttcacattccattcagaattcattccttccaccttcatctataaccagatcacattcctttaatagagctgtggatcttacaaagccttatcagaaccaacagctatccattagagtgcctctacggtcaagtatgctaacaagaaattcccggcagccagaagtactcaatgggaatgaacatttggggtatggatttaataggccttatgctgctggtggaaagaagttggctttaccaaatggcccaggtgtaacttctactttaggttatagaatggttcatccctctctactgaaatctagccgatctccattttctgggactatgacagttgatggaaataaaaattcacctgctgacacatgtgtagaggaagatgctacagttttggctaaggacagagctgctaataaggaccaagaactgattgaaaatgaaagttatagaac

SEQ ID NO: 264353 - DNA, 815 bp, Homo Sapiens
gggtgtgcgcggtgcgtggtgcgtgagcccccagcgcaggccgggatgttcgtcctggtggaaatggtggacaccgtccggatccccccttggcagtttgagaggaagctcaacgactccattgccgaggagctgaacaagaagttggccaacaaggtcgtgtacaacgtgggactctgcatttgtctgtttgatatcaccaaactggaggatgcctatgtattccctggggatggcgcatcacacaccaaagtccattttcgctgcgtggtgtttcatccattcctagatgagattctcattgggaagatcaaaggctgcagcccagaaggagtgcacgtctctctaggcttcttcgatgacattctcatccccccagagtcactgcagcagccagccaagttcgacgaagcggagaaggtgtgggtgtgggagtacgagacggaggaaggagcacacgacctctacatggacaccggcgaggagatccgccttccgggtggtggacgagagctttgttgacacgtcccccacagggccccagctcagcagatgccaccactttccagtgaggagctgccaaaagaaggaggctccgtacacggcttgtgggatccatcagtgagccaggcctgggccttctctcctgggggaccaacaactagcccctggggctggacagttggaccctaccagccctgcgggaaggtggtatggcccggcttgtgaaaaacacagcaaccttaagccgaatgcttaaggaagatagtggtctcgaacctggacaagttgaggcaagggccaggaaatgcccc

SEQ ID NO: 264354 - DNA, 1105 bp, Homo Sapiens
  misc_feature (230)..(250): n is a, c, g, or t
  misc_feature (1051)..(1065): n is a, c, g, or t
ctacaactgtgtctgtggggcatgttcaagcacctacatgtttgttcccccacatgaatacagtgtagtgacactgtaataagaaaaaaatccaaaataatggtaaggtaaatgattccaaactatgaattcatggaaggcttaactgtgatcctccagtttataatggacaaagacaagacaagatacaaaaattcattttggcactatgaaataggatgcaaatggcnnnnnnnnnnnnnnnnnnnnnggcatcagattgagaaatatgtggcaccaaaacatacttcctcatgccacattacacagctgcgagaaatcaaggacacaccgatgtgtgttttctgctcatatcaccccatatgctgggctgggcttgacactggatgtgaagactcagtgcctgagagatcaatagcaggtccctactgtattgactgatctttaaatttggccgccttattattctaggagctctattctaaactcaaggagttcagaaagctgtgccagccagtaagtaaagttggcctttggtcttcagaagatagggttttgtctttggttgttttttgaagcccctgtcattttgcttgatgcccttcacacttttctccctgcctttttgttaaagtttttttctcctgtaataaaatcagttaataaccactgaactaacttctttagattaaagctctattagaagtgcattcagtggtccagaatattctgagaaagtataacaacttctttcattatggagctctcagtatctttttatagggaagaagtcagaaaactccaacaacacaacacaatctagtagcattaaggcaacacagcagaagaaaagttaactgtccccatgtgatcatctctgaaaatcaaaataggcaaaaacaataggggccaaaaaccaagttctgagcacagactacaggaacctagaggatgggggaaaatctacttaatagtccctgtttcaaatcaccagcccccaaagctatcctattattgtcacattcctgtggggtatctaatacaatttacnnnnnnnnnnnnnnngtcaccaccggattatcaacatggtaaatgaagaaggagc

SEQ ID NO: 264355 - DNA, 613 bp, Homo Sapiens
  misc_feature (11)..(11): n is a, c, g, or t
  misc_feature (33)..(33): n is a, c, g, or t
  misc_feature (50)..(50): n is a, c, g, or t
  misc_feature (61)..(61): n is a, c, g, or t
  misc_feature (76)..(76): n is a, c, g, or t
  misc_feature (252)..(252): n is a, c, g, or t
ccccattgcancccatttccatagtgcccaaantggattttggtatctgnctggtctttgnccattataaactggnggatcacagttaagccttccatgaattcatagttgggaatcatttaccttaccattattttggatttttttcttatttacagtgtcactacactgtattcatgtgggggaacaaacatgtaggtgcttgaacatgccccacagacacagttgtagccctagtatttgtgacggtcnattattgacacagtgcagactttacagatggagcattatgctctcagaggactttaaaaatatgtatattaagcaattaactttctggagttggagttatcaaatcttgctgggaaattaacttccaagagctctgaattggatggaattccatctggcttcagagaacaatcagcctatatgaaacggagctttgaaatgtttttcttgtgcagaaatacgaactagaaagaaaagtgctgatctaatgctaagttttctctgtgtactgactcagttgccagaattataatgaaaactgtattttagtctaacaaatgtatagaattttttatgtaataaataaaattttataggaaag

SEQ ID NO: 264356 - DNA, 497 bp, Homo Sapiens
ggctctgaggcacgccctcctcagcgagagcagcaagtggccacagtgtcactggtcagtgcttctcaccacgggaaagccgccgacctgtgactcgcttgagatgggaaagcggcgccacagaccccgggtctccttggctgtctgtgggccgcccctggccaccttgtcctggctcgcagggtgcaggagcgcctcgttctctgggtggccggcttgctgctccggtttgggctgtcttaccataacaccgtcccagggctctgcaggccactgtgagcgctggctccctgggcagtgctcctccgtgtggactgtgcctcaggccagggctcaccagctggggtcctgtccggaaggatgggatctttctgggagctgcgccggacagagtggggagctcctagtttgtggggggaagctttgatatccatgccacgtccatccaccccaccccttttcgtcacgagcacaatggtcttacattggatttttgt

SEQ ID NO: 264357 - DNA, 833 bp, Homo Sapiens
  misc_feature (190)..(224): n is a, c, g, or t
tttcgggcacaggcacaatcttggctcagagcaacctctgcctcccaggtcaagcaatcctcccacttcagtctgagtagctgggactacaggcacgtgcaccaggccagctaatttttgtgttttgttagagatgaggttttgccatattgcccaggctcgtcttgaacaccggggctcaaggaatctnnnnnnnnnnnnnnnnnnnnnnnnnnnnnnnnnnngtgtgagtcatcatgcccagcctccttgaagtttactaacaattgggataactgagggaagagaagtgacaattccactcagtctattagaggtctggatataaggtagccacacaataactctaacttgacttctaaccattctatcttattgatttggaggctgtcttctgccagattttttgtggcttgagatgatattttcgaacccttctttcactacctttcttacccttaatgtgccaagcttgaaacaggatttgatttcctgagctacttgttcgccttctgtgcgtcaccaagtaatctggttcatctttcatctcattcatgttattttcaagtgaaacaagacattttgggggtcaagtctctttgggtgttttgtttttatgtatataaaaatggattttgtgttccctttccatgtaagtaccaacttatatggaaactcacaatcataatgtaaagaagaaatgaaagcctggtgtattgtacttcaagatgccttccctgatggatagaatcctccttgtaaaataaataattgccattgtatatcagtcttcccatcaatattaattattaaatattttagaatttttaaat

SEQ ID NO: 264358 - DNA, 1035 bp, Homo Sapiens
gggtcccggtcagggagtaagggatatcgtcgacccacgcgtcgcggacgcgtgggcagtttaaccacactacggtaccttttgtgaagaaaaattagagcataaaatcatactacaagctccataggaactcaaagatgagggcaaaactgtgagccaagaagcgagagaaagaaaatagaaccagttattcttgatttaggggacctcaaccttgggttcagtctctgaggacaaagggaaaggtagttgttggcctgcctctcgcctgcacgtcactgctggactagctgtcgcatgtggctgggagctgcaaggccagtgcttgaggggccccagcagttccacaggtggtgaagcctgagttggcagcaggaggagccagaagagaactgccctttctgcactggtggaaactagttatttatgccatgtggagagccagtgagatagatagatagtctgtttgttttgaggacttggaaagttgttcctatgaagcctggagcttggatggttttgagaggttaatggtgcctccacactcactcttccctagttccaggattactgtcctagcagctaacggttctactctcttccccagagtgtagacaggcagcaggtctccccacagctctgaaaggaccctgggtgacagctacaccctcagcaccaggagctggccttcctgatgaggggagcttccagaaacaacagaatccacatgaacttagattatttcccactcagctcatgggtgctggtggtcctccagcttaaggcctcctgaggatcaggctctcaggggtgagagcagttaacttacacactagttattcagaaagaacgtatgatccggtccaaagaagagatggcgggaccggggagtaacaaccgccctagggcaaaggctgtgacgtgacaaggggaaccacaactggacacgggtacttggaagacatgtgaacggttgaaagaaccccccttggagggaagaggaaagggagacaagatagacaaaaggggggacaa

SEQ ID NO: 264359 - DNA, 719 bp, Homo Sapiens
  misc_feature (92)..(92): n is a, c, g, or t
  misc_feature (95)..(95): n is a, c, g, or t
cacctttggaaagaagagtgacctttttctgctgtaggaagtgatgttgaggtgacggtggcctcaggattcagggcccagccctgcaggcncanggctgcctctcatctccacccactgactgcagactgggctttgggctctggggcaaacttctcttcagccccatggatccttaacctgggcagcccgttttggggtgctttcttgagcccccagttctctgtcccctagcactagactcagctgtattgtttttccttctggggagcccactccaactggcacagaagttctggggcctgacaggtaggattccagctggaaggcaggcccgtgcctggttttgcgtctgttcccctgagggccatcgtcaacctggagcttcaatggggccttggctcctgtctgcctctcagtcagagtcagggctgacaaaggactcagcttccttagcatctcagcagaaaccttgctctgaagaccagagacagaagggacagaaacaggagtgcctcctgctgtgccaagccccatgggcagtgcaggcagatccctgaaggtcagcactcctgggtcttcatatgccaacagggggcgctcttgacactgtgccttcattttccaagcccacagcctggggtctcagggatcttgaaggggtagaacatgtccggggtgggggcttgggaaataaaccttgatctaattgggaaaac

SEQ ID NO: 264360 - DNA, 1009 bp, Homo Sapiens
ccactgtttccaccctccgtgctcaagctttctttgtaggccctttaatgaagcgggctaaagagggagaagaacagggcctggggatgtggtcttgggggttctctccgaagtactcctacctcagactcaaaggcctcttgagccgtcttgctgtctgccagcagcttgtccatggtgggcgagttgcccctcaggaactccttgagcaccatgcagtcatcctgccgcacaaactctctgtgtgtcaactataggcctcgctgcagggagcgcacgtccgccaggacactgtccagggacactgagcccgccttgtccaggaagtgcaggtcgctgtggaagcctgtgagttgcgggtacttctcagcaatgaccttcaccaggtagtgcagcagcgtctgcttgcgatcagtcgacttcatctccaacagcgcatccaggctctggagccggaagccataggctgccccacgcttgctactgttcatgtagttgccaaaggccaggacaatctccaggatctggcggagtttgtcagaggacttgatggacattgaggctgcaatgatggcattcagttgcggcatgagcagctgggctgtgtccgggaagttgcccaggaaggtgagtgtggtcatgcgctccggcaggcgcgggatgcggctgaagcatagcatgaagcggtcctcctctgacagctcctccattggccgctgctcccgctcaaagcgggtgatgaggctgcgctcatactctgtgggcaggaagcgcatcagcagctccaggaagtccaggcccagagcctgcaggtcgtacgcctcaatggcttggcagatgcgctcggcccccaggttgcccttccgcagggtgatggccaagttcttggcccggttggcctcaatgagtgtcgccttgctgggggccttctgggctgccttactcttgagagcgctgaggtccaggctggggccttgggacttggtcttgaactgttcctcaaaatcac

SEQ ID NO: 264361 - DNA, 718 bp, Homo Sapiens
  misc_feature (53)..(53): n is a, c, g, or t
  misc_feature (242)..(242): n is a, c, g, or t
  misc_feature (640)..(640): n is a, c, g, or t
accggtaccgtggtggaagcgcgccctgggctgccgggggcacggccgcggtnggcacttggacccgaggaggcggcaggtgagaggttccggagctttccaggcgctctggggtccagcagtagctggtgcccgggccggttgggtctcaggcctgagaagaacgcagacgtctcgcctcatcgtcgctctgtggctttaccggcgtgagactacatttcccgccggccctcgcggcgtgncgcttttctggcgccccctttctgcttccagcctcatagcccaggtgcatggaccccttagctctaccgtcgcaggactctgcccttccccaagagaggaaccagaaggaggacctatcagcccttgaaattctaaaagtcatgtcccttgggtcagaattgttcagggatgtggccatagtcttctcccaagaagaatggcagtggttggcacctgctcagagggatttgtacagagacgtgatgttggagacctacagcaacctggtctcactgggtcttgccgtttccaaacctgatgtgatctccttcctagagcaaggcaaagagccctggatggtggagagagtggtgtctggaggcctgtgtccagtattggagtccagatatgataccangggaattatttccaaagcagcatgtttatgaagtcgaatcaccccaatgggagataatggaaagccttacaaggtatg

SEQ ID NO: 264362 - DNA, 849 bp, Homo Sapiens
  misc_feature (42)..(53): n is a, c, g, or t
gggtgtctagtattaatgttgccagtaagcacctctctcccnnnnnnnnnnnnattattttaatttgagaactcctgtgtccagtttagaagtgagagacttccatttttagttcctttacactcaccaccctagcaagtgccctgcaaagagtaataagtaaattgatttcctaatcacaattctatgtgacttatggtcaaaagagcagttttaataactttaaaagtacttcagatagacgcagaaaattggtgagtggttgaccaagaacactgcacaaatataaaaaaagttctggaaatgcagaagggcgttagatttatatttggtttgttaattttatatcactgtttttcactgttttttgtggacaaataatggttgctttgctgaagtgttcttcctcaatcttgattgccctgtacctacccaaaagctgtagtcacacgtcctaaaggccaagcaaacccaccgggatggtggggggtcttggagccaagctcttaggttcctcttatttggggcagtaccagtccataccagctgcgatttgtgagtggacctgtggtaagaagaatagaaaaggctctcagagataaggttttttacatgtgtaacaatcccaagatttccctagattaaaatcttaattgattttgaaattggatttttatttagaatcaaaattaggacaagaacagataacttcttcagatacatttgtgtaactttacagaatgtcatcaagctttggggctctgtggggcacatgatttatccataaaggagatgcagtatgcttacttaaattaataaatttaaaatcttttaagtgtgtaaaaaaaa

SEQ ID NO: 264363 - DNA, 420 bp, Homo Sapiens
tagcgcataggtaagggaattgcctttccctcttttgtgaatattctcatttctgaaaaattctaagtcatgagaagataagccctatcctttcttacaaggattggatttcttgggtgacactgtggtgtggtggaagccagcggcttctttcaggttcataaaggccatcataacaacttcaggcttcatggtgtggacagggatccaggagagctgagtggatgtgtgaagtttctgatagattctgtcatcattccaaaggaatgtagtttcctccagctcaatcatttgaagtaatacacattgccaaatctgactgtaacctgacattttagacctattggagaaataggaagaaagcccctccagtggaaggactgcactccaacctgagcgacagattgagactccatctta

SEQ ID NO: 264364 - DNA, 854 bp, Homo Sapiens
  misc_feature (819)..(819): n is a, c, g, or t
ggtcttcttaatttttttaaagattaaaaacaaagaaatcttgttccgggaccctaatgaaaaaaaatttcaaatcttttcagtttgtccatgaccaaagagttgctttaataggaaaaaatctgttcttatccctgtcagatttatggttaatgggtttgcaacggcaaggaggcaaggaatggttctatttctgacagagcagcctgcatctgctttatgctgtctggagggaagtggtctgaggcaggctcacccgtggaagtgctcacgtattctgtattatttttctacactggagctgagattcttctcttcacagccttgcagagtaagtcagtgcctacaagtgtaagaaggagctgtaatcttcatgaggatggttatacttcagtattcttaaagagaacatgaacatttttgagctgtatgttcttagggacaactgtgcttcgatgtggtcagtctcgtcacttgtgagtagctgtgaaatctttagtgtgcatgtgtttgcacctctgtggtctgtcaacgtggctgtcactgaaggagcaagagaccatcttttaggaaccctgccaccaaataataatatatccaggcttagactttggattaatgttaaatgtacatttttttggttcagtacctgaagaagaatactgaaacttgaatctataaattcctatggacccttttaatattaaacacaacaaattaaaagttgttataggtaaaataagttcagataaaatagtggtggtatttaaaataatattgctgaagtgcaggattgaaatactttttaaacaactgaangttctgagtttttataggggattttcatgttaacc

SEQ ID NO: 264365 - DNA, 324 bp, Homo Sapiens
  misc_feature (147)..(155): n is a, c, g, or t
gggagaatgggatgtgaagcagtagaccgcagccacgccgatggttatacagtgaagaagacttcacctcttcctattgagtttgcttggaatgctgacagcatcaggcaactctgaactgaacatttgctttgtcagaaaatatcnnnnnnnnnactttgaagtttggcaaccttcatgttaccccaaagcaaaaccattgtgtcaggagtcaaacaaatgtttagaaagcaaacatgacgtctctattgtacaacctcctttctcttggctgtttaaaggatgtacttcgtgtattaaagggtactttatgttgaagtaacg

SEQ ID NO: 264366 - DNA, 846 bp, Homo Sapiens
  misc_feature (110)..(110): n is a, c, g, or t
tccatgcgagtcccttcctgtggccccacagattcgtccagtccagccagttggccaatcatattcgccaccacgacaacatccgcccacacaagtgcaccgtgtgcagncaaggccttcgtgaacgtgggggacctgtccaagcacatcatcattcacactggagagaagccttacctgtgtgataagtgtgggcgtggcttcaaccgggtagacaacctgcgctcccacgtgaagaccgtgcaccagggcaaggcaggcatcaagatcctggagcccgaggagggcagtgaggtcagcgtggtcactgtggatgacatggtcacgctggctaccgaggcactggcagcgacagccgtcactcagctcacagtggtgccggtgggagctgcagtgacagccgatgagacggaagtcctgaaggccgagatcagcaaagctgtgaagcaagtgcaggaagaagaccccaacactcacatcctctacgcctgtgactcctgtggggacaagtttctggatgccaacagcctggctcagcatgtgcgaatccacacagcccaggcactggtcatgttccagacagacgcggacttctatcagcagtatgggccaggtggcacgtgggctgccgggcaggtgctgcaggctggggagctggtcttccgccctcgcgacggggctgagggccagcccgcactggcagagacctcccctacagctcctgaatgtcccccgcctgccgagtgagctggcggcccttctgactgtttatttaaggatggatggcaccctggaaccgggaagggtggcctgttccctagagagaataaattggattattttcta

SEQ ID NO: 264367 - DNA, 930 bp, Homo Sapiens
  misc_feature (799)..(807): n is a, c, g, or t
ggtaccggccggaatttacgggatatcgtcgaccacgcgtcggttccttagaaaccaggcggcgcgttcccggtggcggcgccctggactcccgggcccgcgcatccccgccagccttccttaaggcggatgggtggcccccgagaccccgtcggacccatggtttccagtgcagcgcggagtgggcgatgccagcgtgccaggagccatgtctgaccaggacgtttggaagatcatatccatgccagaggctcttgtgaggagatgagttggtaaagagagaggctgggatgaagatgctgccaggagtgggcgtgtttgggactggcagctccgcccgagttctggtcccactgctgagggcagaagggttcactgttgaggccctgtgggggaagactgaggaggaggcgaagcagcttgctgaggagatgaacatcgccttctacaccagccggactgatgacatcttgctgcatcaagatgtggatctggtgtgcatcagcatcccccctccactcacccggcagatatccgtgaaggctctaggtattgggaagaatgtggtttgcgagaaagcagcaacatcgggtggatgcctttccggagggtgacagcctcgcgctactacccgcagctcatgagcctggtagggaacgtgctgcgcttctgcctgccttcgtgcgcatgaaacaggtgatttcggaacactatgtgggagcggtgatgatcttgtgatgcccggatctaatcaggcagcctggttggggcccagtattgtgggtctggttgagtcatnnnnnnnnncttggcccctggggctctttggtggctggtggcccctgacggctggagccgagtgccggtggtccaattcgggggacgggccgggtcgggccgccgtcggtccagccgggggggtgcgcccta

SEQ ID NO: 264368 - DNA, 704 bp, Homo Sapiens
  misc_feature (234)..(261): n is a, c, g, or t
  misc_feature (402)..(402): n is a, c, g, or t
  misc_feature (595)..(603): n is a, c, g, or t
  misc_feature (617)..(617): n is a, c, g, or t
  misc_feature (649)..(649): n is a, c, g, or t
tgggcatatacaacttcccccccatttagattttcccttgaaattataatttcaaggcctttaaaatattaaaaaatatttttataacctatttcatagtttaatttgcctcgttaaatagttttgctagggagggaaacattttgtgttctttaagaaaattgatatgtgtaaatgtgttcacttaaatcttgagaaaacctaaggatgaagtctgttgttttgtttttcctnnnnnnnnnnnnnnnnnnnnnnnnnnnntgttgaagaacaagaatatttaccattaaaaagaagaaacattatccaacaaaaaggagacatatagatttgaaaacacttattttactgtcttcaacaacaacaacaaacagataggcaggggaagtccagaggactcangaattgaagcagctctatacaataatgaaggtggtacaatgatgtgactgcaaagaaaatgactaaaacaaaactttacaaacatcttcatgtttgtaatgtattaatgcacaaaatatcaaaaatagaaagtctgagtttcttccccgcaggtttatgataaactatcaaccttctatttaatgcatttccnnnnnnnnnatttataggagganggagtctcggctatggttgcccggggctgggncttggaactcatggaggcctcaaggcaatccctccccacctcggggccctcccaa

SEQ ID NO: 264369 - DNA, 873 bp, Homo Sapiens
gggagactgagcccaggttgatttcaggcggacaccaatagactccacagcagctccaggagcccagacaccggcggccagaagcaaggctaggagctgctgcagccatgtcggccctcagcctcctcattctgggcctgctcacggcagtgccacctgccagctgtcagcaaggcctggggaaccttcagccctggatgcagggccttatcgcggtggccgtgttcctggtcctcgttgcaatcgcctttgcagtcaaccacttctggtgccaggaggagccggagcctgcacacatgatcctgaccgtcggaaacaaggcagatggagtcctggtgggaacagatggaaggtactcttcgatggcggccagtttcaggtccagtgagcatgagaatgcctatgagaatgtgcccgaggaggaaggcaaggtccgcagcaccccgatgtaaccttctctgtggctccaaccccaagactcccaggcacatgggatggatgtccagtgctaccacccaagcccccctccttctttgtgtggaatctgcaatagtgggctgactccctcccagccccatgccggccctacccgcccttgaagtatagccagcccaaggttggagctcagaccgtgtctaggttgggggttcggctgtgggccctgggggtctcctgcttcagctcaaaaggagcctttctggaagaggaacagtcagctggaagcactccccatcccggctcacaacgtcccttcccccataaactatgggaaaatgggcccctaaattttctgggggaaataaaaaaatcttttttggtatttccggggggggctggaaaggttctaggaaaacaagcccccctccaggggtg

SEQ ID NO: 264370 - DNA, 1075 bp, Homo Sapiens
gggggagcgggccaaggggcggctccggcgggcggactcggagcgggcggcggagtgacccggacagctgtcctctctgacaccaccccggcctgcctctttgttgccatgagagctgcctacctcttcctgctattcctgcctgcaggcttgctggctcagggccagtatgacctggacccgctgccgccgttccctgaccacgtccagtacacccactatagcgaccagatcgacaacccagactactatgattatcaagaggtgactcctcggccctccgaggaacagttccagttccagtcccagcagcaagtccaacaggaagtcatcccagccccaaccccagaaccaggaaatgcagagctggagcccacagagcctgggcctcttgactgccgtgaggaacagtacccgtgcacccgcctctactccatacacaggccttgcaaacagtgtctcaacgaggtctgcttctacagcctccgccgtgtgtacgtcattaacaaggagatctgtgttcgtacagtgtgtgcccatgaggagctcctccgagctgacctctgtcgggacaagttctccaaatgtggcgtgatggccagcagcggcctgtgccaatccgtggcagcctcctgtgccaggagctgtgggagctgctagggtggtgctggcatcctgagtcctggccctcctgggatctggggccctcgggccctgcctgacctggtgcttttttccccatccccatgttccttttattctgtaaaaagttagtggactgcagccctgggggttgcaggctgcggtgcctcaggcccctccttcagcctgtggccacctctggggcacgatgggggctccccactgcccagtctgcccctcgggttgggggagtatcccaggcctctctgtgggacctgggccctgacgggccttctcagcccgttttgaggacagacagtcccccgaggtaggctacatccccccaccccagctggtctgcttggatttcctacagcccccgtgggcatggaccacctttattttatacaaaattaaaaacaagtttttacaa

SEQ ID NO: 264371 - DNA, 978 bp, Homo Sapiens
gggattgtcattccactccaggtcctggcaaatgtagcctacatcatcatagagtccaccgaggagggcacgactgaatatggcttgtggaaggactctctatttctggtcgacctgttgtgttgtggtgccatcctcttcccagtggtgtggtcaatcagacatttacaagaagcatcagcaacagatggaaaaggcaagttctctcgtgctcattttgtgttgctcagcttgctctgaacccacgtgctgcggcactgcggaggagtggaggcagcctatggtgtcaagatgctgtcttcctgggaggagagctaggggaggcctggggcccacttcgtgagagtagccaggggtagtttggagaaggaggtgttgagtcagttgtataaggaggaggttgggggtgactgctgcttattaagatgattcatttcatttccactcgtggttgtgattttcaccttctcaaaactgagtcagcaagagaaaatcttgtcttagaaaggccagataacacttcgctgtgagaacaggagggataatggattggagatggctatgtgtaaagcagccctgcctgctgatttaacacactttcaaaatagatgtgtcaagtattcatttaaaagcaagactctgaatgacagaaagaaccttggaaaactacctgatattgaaatggttgtgccctttatagcccttttgcatctccttgactttccagtcatgcctcctaaatcagaagaaaagctgcaaagaaaatgttttgtgtggttctgggcttatttgaataatgttcatgaccacaggctgccatagcacaagtgagaatttcagaccacaagggtttaaggagcagtgctctcttctctcaaagctcagaacggtctctggatccatggtatcgtacacccagtgtggatattaacattctttaatgcaggttatgaataataaataaaacaggtttttgtt

SEQ ID NO: 264372 - DNA, 1143 bp, Homo Sapiens
ttgctgttcatgactcagggggctgggaagggagggaagaggagaaaaagaaggacagttctctggcattcaagtgcatcaaaagaataaatgtcttttcttttggtaaagcaaatctgtcaatagtaaggaatcctggtttggaaaaatagaactttctaaaacttctatctgcggatgttccaatgcagcagagggacaaggcaggcaagtgcagccagcagcagggaccaggtgtgcctcccaggggcccggccatacaggctgcttccactgtcttctgcgaggtcctctgccctcggcgaagaggaggcacactggaccaagggcatctggtaggacgtggctctcttctctggcctgtctgggctggacccgtcgctgggcctctgaccgttgaacagcagatagcgcccccgggcatcctgttccattttgaagatctcgtactccgtgtgaggtagtttgatgcccagggccacgcagccattggtgtgggtcacatcctgctggatgccccacctgccaggagccctcggccccgcactcattcccgttgaagacgttgagcagtgaggctgtggccgcatccatgggggtgaccttcatgtgattcactttgaacacgaactcggtgcctcccatgaccctggacgagaggaccccgcggctgtagcggccccgggcgtagatggagaaggtggggtgcttgcacaccgggtctgagtagtggtagtagtggccctcccaggtgttgttgttgtcatggaagatgaagtggcgggtgaggaagaggacttcggggcgcacctcacagcgctggctcacccactccccgtgcaggccgatggtcaggtctgcctttgggggcaggatgggagggtggtgctcgtctgaccgatagatgatccgacaggcgatgcaggcatggtcgtggttcttggcattctgcagagggggctggtaactggagggccggtagaacatcctctgggtggcatcagtgtgaatgtcaccaaggaagagctcctcgaccaggtggtcgaggttgtggtgaaggtactgcttctccacccggatgagctgaagttcatgcatggcaaagttcacggccttggtgcactcacagccgttctcctctcc

SEQ ID NO: 264373 - DNA, 816 bp, Homo Sapiens
  misc_feature (39)..(39): n is a, c, g, or t
tttccaggtctttctgtgcgtgcccaatgaccaggcaancgggcaggtggggcgttcatgggtcccatggatctctgcccaccgactcatcatctgtaggaaactgatagatctggactccggttgctgacaagctcgctggtgattttgattttgaactttgttagctcactcttcgaaatggcatctgctttggcaatgatggggatgatgttcaccttactgtccagcttcttcatagtcactaggtccagagacttcagggaatgacccgtgggggcaatgaaatacaagcagacatggattcgggagtcatggtaggtgtgtagcactcttcggatctttagctcttcctgcaggtaggcctcgaattgtgcatcgatgaattccacgataggcttgtagctgtcctctttgttgatctggtccccaaagccaactgtgctaacgatcgtgagctttagcctcacgttgctctcttggaggtcataggtattagactggagctggacacccggctgtgtgtgggtggctggctccccttcgaatttggtgttgaacagggtgtccatgagggtggacttgcccaaacctgtctctcccacgcacaggatgttgaagcagaagccctggctgacggacttattcaccagctggtcaggcaagctgtcaaaccccacatgtccagccagggggacagttcggcaaccttcacccacctggcgagctatatcggtcgctgccatcgctcctgcgtccgccagggctgccacgggtgccgccgcaacgggagctactgcacaggaaacagaggag

SEQ ID NO: 264374 - DNA, 1080 bp, Homo Sapiens
  misc_feature (160)..(168): n is a, c, g, or t
  misc_feature (206)..(262): n is a, c, g, or t
tttttattttgaaatgtataaaaagcaaacccagctacaaaggccttttcacccttccactttgtaactaatcccagtctcttctcatcactcctcctcttacagtactctgctattcatgctcatttcatgttcttaatcttctttcctgtttaaaaannnnnnnnnggaaaaaatttgaaatcatggtccttttttctgctgannnnnnnnnnnnnnnnnnnnnnnnnnnnnnnnnnnnnnnnnnnnnnnnnnnnnnnnngtctggctacctcgttttagtttactttttttctgaagccctggaattctacaagagagatattttgagactgaaacatgtttgtgcctagactggaaagatgcccttgggtttgtccgtctttttgtgttggcttcttcccagcctccatccgtccagtgtgccccacttccacattctggctataatttcctttttctccttgttcattgggatttgaggacctatttctaaatcttaatttatagcacaaatatgtgggagcaatgagagttgaaccgttgtttttgttggagatgcagattgtgtcttgaaaatgatgattatatatgcaaattctgccctaccctcaccctcttccaagtttccccccaaaaaggtcacacagtgcggcttcctgtgggaaacaggagcagagctggcctgcagagcccctggggctgtgatgaagctcatatcttatctctgttctattaacaaaatgggagtttgtgggttttaaaaaattccgtttctaaatggaggaatagatgactttctttcttttggtgggggttgggacttgtggctttaaagaaatcacttctgagtaggatgtatattttcgttggatttttgttgttatttctttagaaccctccacagcaacatgcaagaccatggagttaaagaaacccagagacctttatcaattaattgtactgtttgtgaatttgtataaataataacaaagatcctcttaaaacgtttatattcttacagtaaaaggttaaactgatatttatataataaaagaggaaatatgaagtatgtttttg

SEQ ID NO: 264375 - DNA, 612 bp, Homo Sapiens
ggggctgggctggagctggagctggagctgcgaattcggagtcccggttccctgtgccacctggcgagctcagcaaactaaaagtctctttgtcttcatcgtttccggcactgatgtgagcacatcataagcacaagacctggacacctttacaatcagagggcctaggactggagctctggatctgaccggagcaaagaggaagcacgcaaatccggacatgacgacgaggaggcagtagagacccatcctcaactgtgcccttgttgagctgcttgaggcagaaggcacagacgaagtgctcggggtggaacttcttggccatggcggtgatgcagcggccggtgaatgggcttctgggcagccagaacacagcgagcccgccgctcgtggtagtgcacctcacagtagggctgcccgtcgtgctcgaagaagctgccgttcacgaatggcgtgaagcattcctgccaggcggagagaggggctcagggagactcccctcgggctagagctgcaccctgtgtgatggggccgaggtgggcatagtcggcacgctcggagtgactcctacttgctaggcgtttcccatgtgccgtgttgtcctaaacgctc

SEQ ID NO: 264376 - DNA, 1354 bp, Homo Sapiens
  misc_feature (16)..(16): n is a, c, g, or t
  misc_feature (364)..(364): n is a, c, g, or t
  misc_feature (1085)..(1146): n is a, c, g, or t
  misc_feature (1149)..(1227): n is a, c, g, or t
  misc_feature (1232)..(1232): n is a, c, g, or t
  misc_feature (1234)..(1237): n is a, c, g, or t
  misc_feature (1239)..(1244): n is a, c, g, or t
  misc_feature (1246)..(1252): n is a, c, g, or t
  misc_feature (1266)..(1281): n is a, c, g, or t
cagtactaccagaganctttactgaagaaagtctggaaagtctggcgttccgtagtgcaaaagcagtggaaagatgtggtagaaagagcttgtcaagcaagagctgaagaagtttgtatccagatttccaatgattatgaagccaaagttgctatgttatctggagctttggaaaatgcaaaagctgagattcaaagaatgcaacatgaaaaagagcactttgaagattccatgaaaaaagctttcatgaggggtgtatgtgcattaaatcttgaagccatgactatatttcaaaacagaaatgatgcagggatagactccacaaataataaaaaggaagagtatggtcctggtgttcaagganaaagaacattctgctcatttggatccttcagctcctccgatgcccttaccagttacatcaccactgctgccatccccaccagccgccgtcggaggagccagcgcgactgccgttccctcagctgcttcgatgacttctaccaggggctgcttccgcatcttctgttcacgttcctgtttctgctcttggtgcaggatctgcaggctactgctgcatcagaagaaatgtatgtgccaagagttgtaacctctgcacaacagaaagcaggaagaactattacagcccggatcacaggaagatgtgattttgcttcaaaaaatagaattagcagcagtttagctataatgggagtttctcctcccatgagctcagttgttgtggaaaaacatcatccagtcacagtgcaaaccattcctcaagcaactgcagcaaaatatccccggaccattcatcctgaaagtagtacctcagcttccagatcacttggaaccagatcagctcacacccagtctctcacaagtgttcattccataaaagtggttgactaaagtgaatatgtccatagtggggtcttttaatccctctggtcttaccaagggttagaagtcttttggttttaacttttccatattgttagaacatcatggagacatcatgttcatctgttcaaaattacaagaggctttttcaagctctaccatgctttgtaactatatgtagnnnnnnnnnnnnnnnnnnnnnnnnnnnnnnnnnnnnnnnnnnnnnnnnnnnnnnnnnnnnnngannnnnnnnnnnnnnnnnnnnnnnnnnnnnnnnnnnnnnnnnnnnnnnnnnnnnnnnnnnnnnnnnnnnnnnnnnnnnnnggaanannnnannnnnnannnnnnnaaaaattggggcgnnnnnnnnnnnnnnnnaaaagtttttcaaaactttcttttggggccggggcccccaaaaggaaaggacacagggcaaatattggttccc

SEQ ID NO: 264377 - DNA, 720 bp, Homo Sapiens
  misc_feature (450)..(501): n is a, c, g, or t
ggggacactttgctacggagtgcatcggacgtcgaagcctagagtctctgcgtctttccctcttccgctgcctcattcctttccttcctagccttggtcgtcgccgccaccatgaacaagaagaagaaaccgttcctagggatgcccgcgcccctcggctacgtgccggggctgggccggggcgccactggcttcaccacgcggtcagacattgggcccgcccgtgatgcaaatgaccctgtggatgatcgccatgcacccccaggcaagagaaccgttggggaccagatgaagaaaaatcaggctgctgacgatgacgacgaggatctaaatgacaccaattacgatgagtttaatggctatgctgggagcctcttctcaagtggaccctacgagaaagatgatgaggaagcagatgctatctatgcagccctggataaaaggatggannnnnnnnnnnnnnnnnnnnnnnnnnnnnnnnnnnnnnnnnnnnnnnnnnnntatcgtatggaacgccccaaaatccaacagcagttctcagacctcaagaggaagttggcagaagtcacagaagaagagtggctgagcatccccgaggttggcgatgccagaaataaacgtcagcggaacccacgctatgagaagctgacccctgttcctgacagtttctttgccaaacatttacagaccggagagaaccatacctcagtggatccccga

SEQ ID NO: 264378 - DNA, 671 bp, Homo Sapiens
  misc_feature (24)..(24): n is a, c, g, or t
  misc_feature (33)..(33): n is a, c, g, or t
  misc_feature (43)..(43): n is a, c, g, or t
  misc_feature (58)..(58): n is a, c, g, or t
  misc_feature (415)..(529): n is a, c, g, or t
tcccaaaattagcaaaacccttcnatttaaaancaaacccttngtcaaagcctaccanagcagctgatacgtgtgcataacagtgaggcattgtgccctggatcgtctgggagcccagtgtcaagtctgctggaatgcaggaagtagaacagaatcgccacaggactgttctggggccagcttcccttaactctgtagcctggcagtctgacccaaagttgccctcacccaaaggttctggctcttccctccctcacttttactttcccttcccccataagttggaggataaaatgggtatcaatgctaatatttccagggagaacattaaaccagaggtttctttctttctctgtaatctgctatgaaagaaaataacaaatgaaaataaagtgtgtactacactttgaaatannnnnnnnnnnnnnnnnnnnnnnnnnnnnnnnnnnnnnnnnnnnnnnnnnnnnnnnnnnnnnnnnnnnnnnnnnnnnnnnnnnnnnnnnnnnnnnnnnnnnnnnnnnnnnnnnnnttgccggccccccttcgccccttcaaaaatttttttaaaacctttcctttggggggcgggcccccaaaaggaaagggaaatgtggcctaacgttggttcccaagaaaaaccggggacttgacaaggggcttgggttcccccc

SEQ ID NO: 264379 - DNA, 714 bp, Homo Sapiens
ggtggaaaagaaggcagcctaggccctggggagcccagtccactgagcaagcaagggactgagtgagccttttgcaggaaaaggctaagaaaaaggaaaaccattctaaaacacaacaagaaactgtccaaatgctttgggaactgtgtttattgcctataatgggtccccaaaatgggtaacctagacttcagagagaatgagcagagagcaaaggagaaatctggctgtccttccattttcattctgttatctcaggtgagctggtagaggggagacattagaaaaaaatgaaacaacaaaacaattactaatgaggtacgctgaggcctgggagtctcttgactccactacttaattccgtttagtgagaaacctttcaattttcttttattagaagggccagcttactgttggtggcaaaattgccaacataagttaatagaaagttggccaatttcaccccattttctgtggtttgggctccacattgcaatgttcaatgccacgtgctgctgacaccgaccggagtactagccagcacaaaaggcagggtagcctgaattgctttctgctctttacatttcttttaaaataagcatttagtgctcagtccctactgagtactctttctctcccctcctctgaatttaattctttcaacttgcaatttgcaaggattacacatttcactgtgatgtatattgtgttgca

SEQ ID NO: 264380 - DNA, 1618 bp, Homo Sapiens
  misc_feature (1407)..(1407): n is a, c, g, or t
  misc_feature (1493)..(1493): n is a, c, g, or t
  misc_feature (1495)..(1495): n is a, c, g, or t
  misc_feature (1501)..(1501): n is a, c, g, or t
  misc_feature (1503)..(1504): n is a, c, g, or t
  misc_feature (1508)..(1509): n is a, c, g, or t
  misc_feature (1511)..(1511): n is a, c, g, or t
  misc_feature (1513)..(1531): n is a, c, g, or t
taatgagcaggtttccactgtgggcggttggcactctgccatctgagtcctctgcctaaagcattcctcagaactgtcccatttgaagggcaagcaaacctggggtatttatccactgacttccatctgacactggttgaggaccactgccagggatgctaactccctggtaattcttgggcttaccctttgtacaaaccaaaccttagtgtcttcaggtaaagactcagagatacttgcaggggcaagctgtaaagggcatgggaacagtgagggacatatgtggggtcctaacaatatctgctaggctggtctacctcctaaatatactctggaatctatcaccctctattgccttcttgcactgaggatttttcagctggatttctgcaatccaagctactcaagtctgggagatgctgctctgagctgctctcagtactctcctcatcatggcacgttaacacattaccaattttgttattgtctgtttgcttgtttgcattatttctaaacagaacctagcacagtgcttgggcagccaataggcattaatcagtatctattgagtgttatgaactagcctcctagctcgtgcttccctcattaccctccagagttatgtttacgaataacaaattgaccatgctaaactaatcatgttccaatgaatacatcacctttcttcatttcttgatgctcttcccaatccttgtctacctgataataaattcttacttgtccttcaagacccaactcagatagatagagcttcctgagtgaaacctgctttgattgttcaggcacttggccaccttctcctcactcctcccacagccttctgtcttggccttgtcatcacatcaatcctgttgtgtggtgctgtgtgtcttctgggtcagtcctaggcacatgctgcccagcacatgtccacctgggaaatgagatgccatcgtcacattcatttggtcaccctcagtccagccagtgggcttgctctcatttggcctgttctcaggggtgggaaggaagagcgtcccttccttctccttttgagaaaaccacagaactatgactctcatgatttttcctttgtgaaatccctggttttcagctggaagcggtgggtaaatgaggtctgatgatagcagtcctgccaccttctagttcatcccataggaatgtttttccaagtccttccagtctttttagaacgtggtggaggagggttgtgtgtgccccagggggtcgggggtaggggatgcagggaggatcttagcatttgttgttttctagtgcagggctttagccacaattgtaaacaacaggaaaaggctctttagagatcctattagatttgctttgccgattgtcactcttcatcacaggcacatttcaaaaagaggntagactttcagacttcttttttctcaaacctcaaaacttccaccccaaacttcgctctcagctggtgactttgcttctttatgtgngngtatgngnngccnnanannnnnnnnnnnnnnnnnnnagggaggatgagaacgattggggggaagagataaactttatgcataacattagggtaaatcaataaagattggcctgacacatcgtt

SEQ ID NO: 264381 - DNA, 955 bp, Homo Sapiens
aaaagcaaaggcaagaagagcaagtccccaaagcccgtgaagccagtggaggacgaggatgaggccgggctgcagaagtccctcaagttcaacctgatgagcgatgcccctggggacagtccccgcatccacctgcccctcaactacccaccaggcagccctgacctggggccgccactattcgctctaactccccactgccttccattccagctgcagccccagttcaccctcagcctccaagaagcaccaggtggtacaggacctgccacctgcaaacacattcgtgggcaccggggacaccacgtccacgggctctgagcagtactccgactacagctaccgcaccaacccccccaaataccccagcaagcaggtaggccagccctttcagctcagcacaccccagcccctaccccacccctaccacggagccatctggaccgaggtgtgggagtgatggagcaggtttactgtgcctgcccgtgttgggggccagcctgagccagcagtgggaggtggggccttagtgcctcaccgggcacacggattaggctgagtgaagattaagggagggtgtgctctgtggtctcctccctgccctctccccactggggagagacctgtgatttgccaagtccctggaccctggaccagctactgggccttatgggttgggggtggtaggcaggtgagcgtaagtggggagggaaatgggtaagaagtctactccaaacctaggtctctatgtcagaccagacctaggtgcttctctaggagggaaacagggagacctggggtcctgtggataactgagtggggagtctgccaggggagggcaccttcccattgtgccttctgtgtgtattgtgcattaacctcttcctcaccactaggcttctggggctgggtcccacatgcccttgaccctgacaataaagttctctattttaaa

SEQ ID NO: 264382 - DNA, 1420 bp, Homo Sapiens
  misc_feature (32)..(32): n is a, c, g, or t
  misc_feature (1186)..(1194): n is a, c, g, or t
caaaaatcaataggtgtgtattctctacaagncccatgctgtgccagaatgccagtattgctaaatgtcatgcaaggatttagacacttttttaaaggaaactctgggagtgcctgttgtctggagagttgacattgtccaaagcaggccaacactggtatgggtatggagaacccacgtcctagctgtggctcacctgcagatgccttgaatttacctctctgggttggaagtgggaagacttcttttaaaagtcctttctaagtttaaaaatccaaaggttacgaaggtaagtttttatttatctcaataagtggcctatttgcttaaagcaagtgtacctctgtatatcaagcccaaagcttagggcagtgcttcttggctttagtatctgagaaaggtgcctttgggaagagtttgggtcagacagaaggtagtctgaatcttaaaggtttcagatgaatgtttgaagtagaacctgggaaatctgcttcctagggctgttagaaggaaattggtctccttaaattacgtcagcatctgaggcagtttcctaagggaatttcttttaaattcaaaagttcaactgcaggaataaatagctgtacaggactagatcttcccatccctcatcttttccccttccccgagtaacgactcaaaaaggcttctgaaattctactcagaatcggagccgtttgcattccaacaaggatcccttaagccaaatgctggtgtgttggtgtagaatgtcccctggggtagggggcggtagctgtggggagggaatgtggtgcaggggacacctgcccctctgcccttgaaattgcaccataagatgctgcctatgtcactcacagtggtgctgatactatccgccaaagacaaattgtgaacacggaaaaatggtcgttccctactgtacatcctcaggacagacttaactaaacttggagacaggagattgttcagaccatattgtagtgggtggtgatcattgttttattttgggggagtctggtctattgagcagattgaatgtttccttattgtgcagggcttaattgactatgtctgaaagtttttactgagagctctaagaaaactattgaggaaaatgaaatgttattttgtagtacaaggattatttttgtctatttaggatatacatagctgtagctttgtnnnnnnnnngatctttataaacaatatatgaatgtgccgtcttatttattgattactgtaaattaagatataaatggctatttgaataatttatacctgtgggaattaactggagtatttgttatttgactgttttctattaaggaatattaggcttggtgctatgatgaatgatcttgtaaaatcatgtgtattcttaagaaaatttttgaatataaacctcttgaactgaaaa

SEQ ID NO: 264383 - DNA, 807 bp, Homo Sapiens; identical to SEQ ID NO: 10523
  misc_feature (779)..(780): n is a, c, g, or t

SEQ ID NO: 264384 - DNA, 790 bp, Homo Sapiens
  misc_feature (664)..(705): n is a, c, g, or t
ggacctgcgccctggccgaggggcagtcgtgcggcgtctacaccgagcgctgcgcccaggggctgcgctgcctcccccggcaggacgaggagaagccgctgcacgccctgctgcacggccgcggggtttgcctcaacgaaaagagctaccgcgagcaagtcaagatcgagagagactcccgtgagcacgaggagcccaccacctctgagatggccgaggagacctactcccccaagatcttccggcccaaacacacccgcatctccgagctgaaggctgaagcagtgaagaaggaccgcagaaagaagctgacccagtccaagtttgtcgggggagccgagaacactgcccacccccgtgatcatctctgcacctgcagatgagacagggagtcttgagcagggccccctgccgccagacacatggaggctttccctgcaggagctcaaaagccagcccacgcatggtgccccgtgctgtgtacctgcccaattgtgaccgcaaaggattctacaagagaaagcagtgcaaaccttcccgtggccgcaagcgtggcatctgctggtgcgtggacaagtacgggatgaagctgccaggcatggagtacgttgacggggactttcagtgccacaccttccacagcagcaacgttgagtgatgcgtnnnnnnnnnnnnnnnnnnnnnnnnnnnnnnnnnnnnnnnnnngactccagccagcgcctccctccaccccaggacgccactcatttcatctcatttaagggaaaaatatatatctatctatttgagg

SEQ ID NO: 264385 - DNA, 743 bp, Homo Sapiens
gggttttgagcacactactatcactttggatagtcactccatttatatttttataaacttccattagagaatcattaaggctgtttaatatctgctctggatattacgcattggctttttgttgcctagtgctacaaaccttcctgtgggactcagtgtcttcaggcaatgattgtgtatcctgttacagatggttgtgatacaagaagaaccactcttctttgaaaataaactcttggaagcttttgccagctatttggggggtaggaggaatattagcaactgtattggttgtctacagatacagaattgcctgttgtgagggaactgattgttttgttgggaaaagaaatttaccaggagaaagagttttgtgctgtattgtgagagatctcgcctctcagttaaatgagccctgggttaaagtcagtgtgaagggcagctgtgtgcgggcacgagccagagtgtctgcctcagactagatttgacttgagttctttatgacccaggactctggataatgtgaatttgctttcctatttaactagaagatacatgtactatagatcattgtctcattttagtgattgttccttaaactagtgaaactagtggatttctcttcttcctctttattttttgcatgttaaatgtgaaccttagtgtatttgtattttgtagaaaataatgaaaaattttaatggagaatgatttaaaaacatttacaatacattatttttgca

SEQ ID NO: 264386 - DNA, 524 bp, Homo Sapiens; identical to SEQ ID NO: 77827

SEQ ID NO: 264387 - DNA, 1246 bp, Homo Sapiens
  misc_feature (297)..(297): n is a, c, g, or t
gaacttcggggcagtgggcatggtgtgcatccactggaagggccctctggtgctgcagcaggcctacctcatcatgatcagtgcgctcatggccctagtgttcatcaagtacctcccagagtggtccgcgtgggtcatcctgggcgccatctctgtgtatgatctcgtggctgtgctgtgtcccaaagggcctctgagaatgctggtagaaactgcccaggagagaaatgagcccatattccctgccctgatatactcatctgccatggtgtggacggttggcatggcgaagctggnacccctcctctcagggtgccctccagctcccctacgacccggagatggaagactcctatgacagttttggggagccttcataccccgaagtctttgagcctcccttgactggctacccaggggaggagctggaggaagaggaggaaaggggcgtgaagctcggcctcggggacttcatcttctacagtgtgctggtgggcaaggcggctgccacgggcagcggggactggaataccacgctggcctgcttcgtggccatcctcattggcttgtgtctgaccctcctgctgcttgctgtgttcaagaaggcgctgcccgccctccccatctccatcacgttcgggctcatcttttacttctccacggacaacctggtgcggccgttcatggacaccctggcctcccatcagctctacatctgagggacatggtgtgccacaggctgcaagctgcagggaattttcattggatgcagttgtatagttttacactctagtgccatatatttttaagacttttctttccttaaaaaataaagtacgtgtttacttggtgaggaggaggcagaaccagctctttggtgcccagctgtttccatcacccagactttggctccccgctttggggagcgcctcgcttcacggacaggaagcacagcaggtttatcccagatgaactgagaaggtcagattagggtggggagaagagcatccggcatgagggctgagatgcgcaaagagtgtgctcgggagtggcccctggcacctgggtgctctggctggagaggaaaagccagttccctacgaggagtgttcccaatgctttgtccatgatgtccttgttattttattgcctttagaaactgagtcctgttcttgttacggcagtcacactgctgggaagtggcttaatagtaatatcaataaatagatgagtcctgttagaaaaa

SEQ ID NO: 264388 - DNA, 543 bp, Homo Sapiens
ggggcggactcaatgaccacggcgatttcgtaacgcccccgttccgaaagtgttcttctgggcagtgcaaccccgacggcgcggagctatgtagcccctgcggcggcggagccgtgacccctactcccgccgcgggcgggggcagaaccccgtggcgctgcagagagaactgtccagtctggcgtcacaacccctgtctcgcctcctggatgagctggaggtgctggaagagctgattgtactgctggaccctgagcctgggccaggtgggggtatggcccatggcactactcgacacctggccgcaagatatgggctgcctgctgcctggtccacctttgcctattcgctgaggccgagttcgcacgccgctgcgggctctgattgagatggtggtggcaagggagccctctgcctccctgggccagcttggcacacacctcgcccagctagggcgggcagatgcattgcgggtgctgtccaagcttggctcatctggggtttgctgggcttaacacccaataaagaactttgctgactact

SEQ ID NO: 264389 - DNA, 917 bp, Homo Sapiens; identical to SEQ ID NO: 10569
  misc_feature (525)..(533): n is a, c, g, or t

SEQ ID NO: 264390 - DNA, 872 bp, Homo Sapiens
  misc_feature (355)..(355): n is a, c, g, or t
ggtcatactaattttcacctttaatgctaggaatggatatgatagacagtaaagagcatctatgataaggcttccttagtgtgaaagtaaacttaagtgcccaagtcatggagacttgaaaagggtaaacctgtttcacctcccaaatttatatattcaaagtatttacttaaaattcagaagccagaagttcatgtcatgattaccagggaagttcaggccagaatgaatccctaggagaagccagggccaagccgggattaattgcagctgggatgaccctggcccgaaagtcacagttcagttgccttattcctagttcaggcttactatctagaacctcatgctagcttangttgcatgtttacattgctgcagtgtctttactggaagcttagttggatcgaaatggacaccgagatggagatgcttctggctacatttcgcagaaccccaggagacctgcatttagaccactctgtccatttgtgtgcccacccccacccccagggtctaagtgtagactccaagaggagcagcccagagcttggaggagaggtgtgtctggggcaccactggtgggtggtgctgctcttctttttgttgtagttaatgcggtgtcttttaatggactctcaggcctcccagacagccttgttcctttaaggcagaagctcttcttcattgtgtacctcctgggattcatgaggtgtgagatttggcctgcttgactttgaattcaagtttttcaagtgactctcagtgtcagaagaagcatttcatgctgtccacatgtggtatgtccacagctcaccttcaaaggcttagatgtagccatcacagagagtggtattttattaagaacccaagtc

SEQ ID NO: 264391 - DNA, 986 bp, Homo Sapiens; identical to SEQ ID NO: 178935

SEQ ID NO: 264392 - DNA, 451 bp, Homo Sapiens
gataccctttaggccagtccaggtccactggagctgagagtagaagtggaggcccacatgagggatatatggggacagaaaggatagtttttttaaaatccatggttctgataggaaaaacatgagcaacgcacaatatctattacatttgcctagaagcagaattttttgaggaactttaaaaaatgtacagatacctaggtcccaactttgtagactgattcaagagtgtttgggatttggtataggaacttaatagactcacagggtgttctgatgcataatcagagctgagatcaactggagttgatgatagtgacttggattattagttttgtgattagtgcaaaacaaatgtttaatctgatcttgacttttcttgccacccagtatgtcagggtggtttttggtttttgaatgttacaaaataaatattttaatttataaaaaa

SEQ ID NO: 264393 - DNA, 664 bp, Homo Sapiens
gggggggctgagtgctcagtggagagcggggagttgtgtccaccttgccgacgtcgctagccgtggggctgtcctgggaaggcggacggcgagcgcccggtgtccgcactcggccgcctgccgtgcccgtctgcgcccgtgtcatcctcactcgggacgcagggaccgtttttaaatcacaggggcgtgtgtcagcctgccctaggacttcatgtctatatatttccccattcactgccccgactatctgagatcggccaagatgactgaggtgatgatgaacacccagcccatggaggagatcggcctcagcccccgcaaggatggcctttcctaccagatcttcccagacccgtcagattttgaccgctgctgcaaactgaaggaccgtctgccccccatagtggtggaacccacagaaggggaggtggagagcggggagctccggtggccccctgaggagttcctggtcccaggaggatgagcaagataactgcgaagagacagcgaaagaaaataaagagcagtagagtccctgtggactcccatgggtcataccagccagcatctgttcctgaactgtgtttttcccatcatgacggaagaagagagtgagccgcaattgttctgaaaatgtcaaacgaggcttctgttttgcacctgc

SEQ ID NO: 264394 - DNA, 872 bp, Homo Sapiens
ggggggaagggccccggaggcgggcacttggggggaaagttgagacgtgattaccgggttgggcgggccccatctgggaggggtttgtgggtgaactcggggtccaccgcccgctgaggagatggatgaggacgggcttcctctcatggggtcaggcatagacctgacaaaggtgccagctattcaacagaaaagaacggtggcttttctaaaccaatttgtggtgcacactgtacagttcctcaaccgcttttctacagtttgtgaggagaaactggcagacctttcacttcgtatccaacaaattgaaacaactctcaatattttagatgcaaagttgtcatctatcccaggcctagatgatgtcacagttgaagtatctcctttaaatgtcaccagtgtcacaaatggagcacatcctgaagccacttcagagcaaccacagcagaacagtacacaagactcctggactacaggaaagtgaagtatcagcagaaaatatcttaactgtagccaaggatccaagatatgccagatatctcaaaatggttcaagtgggtgtaccagtgatggcaataagaaacaaaatgatatcagaaggactagacccagatcttcttgagaggccagatgctccagtcctgatggcgaaagtgagaaaactgtagaagaaagttcagatagcgaatcttcttttagtgattaagcttaattttgataagaattacatatgcatgcataggggtacatttacattctgtaagagattgagcctgaactctcttagtcataaaaacatcaaatggccacatgtccactaccaagcttcttctatgttaaaaaaataataataaagcagttttaacctgcga

SEQ ID NO: 264395 - DNA, 635 bp, Homo Sapiens
  misc_feature (17)..(17): n is a, c, g, or t
  misc_feature (49)..(49): n is a, c, g, or t
  misc_feature (55)..(55): n is a, c, g, or t
  misc_feature (65)..(65): n is a, c, g, or t
  misc_feature (89)..(89): n is a, c, g, or t
  misc_feature (98)..(98): n is a, c, g, or t
  misc_feature (104)..(104): n is a, c, g, or t
  misc_feature (112)..(112): n is a, c, g, or t
  misc_feature (127)..(127): n is a, c, g, or t
  misc_feature (219)..(219): n is a, c, g, or t
gcagtcatccctctccnctctgtatggtaaacgctctgggggaagaacnaatccnaattctgccnaacgctctgggggccaagggaaangtgtggcangggcangccagaantccctagggaaaacnggccccaaaaagaattacctgtcaaaaactgtgtcccatgaatgatcaccttcaaaacccagatgtgacccacgggggactttgacataccnggtttttgtgtcctatggttctgacaatatctccttacaagagcaatcactctcttaatgatcttctgttctgggtttttaggagacaccaatgatacaatgtcaccacggtgtacttcaaaattcctcactttccagtggttcaaaagcaccacatcagatgactggctccccccaggattcaaagaaggctgcatcgatgctccttctactcttgccacacaggcgacccgatccaagaaagtcaactccaacagcaccgccacaaagaagcctttacaaaaggccttgatgtatcttttcacccacccttgtgactgtgccataccctttctcccgctcttcctcggtgagaaggggtaagtggttattttgtgccctcgcccaatttggccaaaaccccgctgcgcagcccc

SEQ ID NO: 264396 - DNA, 820 bp, Homo Sapiens
ggggtgccagggaccgggacgagaagaagggccccctggagaatggggatggggacaaagagaaaacaggggtgcgcttcctgcgatgcccagcagccatgaccgtcatgcatcttgccaagtttctccgcaacaagatggatgtgcccagcaagtacaaggtggaggttctgtacgaggacgagccactgaaggaatactacaccctcatggacatcgcctacatctacccctggcggcggaacgggcctctccccctcaagtaccgtgtccagccagcctgcaagcggctcaccctagccacggtgcccaccccctccgagggcaccaacaccagcggggcgtccgagtgtgagtcagtcagcgacaaggctcccagccctgccaccctgccagccacctcctcctccctgcccagcccagccaccccatcccatggctctcccagttcccatgggcctccagccacccaccctacctcccccactcccccttcgacagccagtggggccaccacagctgccaacgggggtagcttgaactgcctgcagacaccatcctccaccagcaggggggcgcaagatgactgtcaacggcggctcccgtgcccccccttaactttgagcccagggacccctctccccttcttccagccaaggcctctccactcctttccactttttctggggcccttttttccccctcttctacttttccccagctcttcccaccttgggaggtgggggggcggcttttttaaattaactttttcatttatttggtacttaggaaaaaccaaatattcctactttattttcca

SEQ ID NO: 264397 - DNA, 830 bp, Homo Sapiens
  misc_feature (369)..(369): n is a, c, g, or t
  misc_feature (759)..(759): n is a, c, g, or t
gggataccaagcccatgcaaacacagaattgcagaagttcaggagaggcttatcacttccctgagaagaaaaacacattttcagttttgcctgcatcataagagtgagcactccattgctttctttcctggccacactgctacaatccagcactaactatccatgtccagggtaaggatcgagatcgagaagcccacactgccagtgaaaaagctacgtctttactgcataaattagaggaagcaatttcggaacaacggaaccttcaaactataaatactgaattatcgaacacttgccaggcacttcagcagaagacaaggaaactgaagacaacaattgagtcacttcaaaaggagttcattgaanggggaacaccatggcttgctgtttcagagctttttagatgaggaatttcctcactatgattccctgtcctgcgcagatgcaattcaacaacctcttcaagaaaaattgaagcagtgttgccacaaactatatggtggtcaagaagcaagaatacatcagacacccctgaccttgaaacatacgtgctggtacacacctctgctggatgccttatctctggatagttttacagcagttccaaccctgtaatcaacacctttctcaggtgtagccaaccaaatccacactctgtgtgaaaagcccacatatgaaggagtaaaaggatggtgcttttggatgtaaaaagacaacccaagtgccccagcccccacaagtggccccagcccaagnaacgaatctctcaggctgcatcaggaatgatgatggacccagtatggaagaaaatggggttggaaccgtgg

SEQ ID NO: 264398 - DNA, 966 bp, Homo Sapiens
  misc_feature (72)..(72): n is a, c, g, or t
  misc_feature (124)..(124): n is a, c, g, or t
agggaaaggcccctcacgtttcccaaacccacgggagaaaaatgcagatggtgacaagctgcatctggactnccaggatgtatctgacaaagagggagatgtttcttccctccccttcaccagntccactttcccgctgaagaaacagagatgtggaggcaggcgtgacctgtcccagctctaggacagttactcaagagggctagtctggaaccctgatgtctgttaccagcggccatggctcagctacagtgaaccttgaagtgtccccagatacgtcagacaccgaggggcttgctttctgaggctcagtaaggagggggcatgtgtgatcagccagcccctccacaacaccacattcctgagctcccctgaccccgagtccccaccccaggggagaacttctcacagcactgctgacaaagcgcgcagccatctggcgtccgtcctgggcaccgccagtgagagccctgcacagaggcgctcaggtgtgaatccgcaggtggcgcgtcaggttcgtgttgcggctgaaggtcttcccgcactcgccgcatcggtagggcttctcgcccgtgtggatccgctggtgcacagtgagggaggagttcttgatgaaggacttcccgcactggccgcacctgttacggcttctcgcccggtgtggatccgctggtgctcgatgaggtaggcgctctggctgaaaggccttgccgcactcgccgcacacgtagggcttctccccggtgtgcacgatctggtgcacgatgagggacgagcgccccgtgaagtgcttcttgcagatgtagcactcgtagggcttctcgccggtgtggatgcgctggtgctgcgtgagcgaggagttcttgctgaaggccttgccgcactcgctgcactcgaaagcttcacgccgatgtggaagcgctggtgctggatgaggtaggagctctggctgaaggccttgtccga

SEQ ID NO: 264399 - DNA, 339 bp, Homo Sapiens
  misc_feature (24)..(24): n is a, c, g, or t
  misc_feature (47)..(47): n is a, c, g, or t
cttccaaggaagcttgttgggaanaaatggagggatgtcttgtcccntgtctgccttgggcaggcccaagattccttcccccagcaagcccggtctctccagaccctgattcggtgcctttctgtttaccagctacttcaatcccaaagtttgaatctgcagataccttactcccagccactttgccttcttactgtgttgtgtgtttttcctggtgcttcaagagcgtgtgcagggcaagtgccgtcactgggaactgcaccagatgctcagacttggttgtcttatgtttaccaataaataaaagtagactttttctatttttatttgctgctaaaa

SEQ ID NO: 264400 - DNA, 850 bp, Homo Sapiens
  misc_feature (760)..(768): n is a, c, g, or t
  misc_feature (825)..(825): n is a, c, g, or t
  misc_feature (833)..(833): n is a, c, g, or t
caggctggtaccggtcccgaattcctcgggatatcgtcgacccacgcgggtcggtataccgcagacatcatttctactacagtggcggagccgtacaggacctgtttcactgcagggggatccaaaacaagccccgtggagcagcagccagagcaacagcagccgcaagacattgtttctctccctctgcccccccttccccacgcaaccccagatccatttacactttacagagcatcgtgcatcaagtcaccagggtggtccattcaagctgcagatttgtttgtcatccttgtacagcaatctcctcctccactgccactacagggaagtgcatcacatgtcaggtcacagaacagaaagtgctggtggacatctcttcttgccccaagatcttcgttggaagtccccgggacttggtgtctttgccgttcaaagtgtttatgaactcgccaggaggcataatgtgtcaccattttattctgggccaccctaaaggatgacacccagcttcagagacctcctcttggacgacatccctgagaatcaatgttttagctgtcccatagtctgacgtctgtttccgaccgcttttgacgctggcgcaggcttagtcattaatggccaggacgatgttaaatgttctgcctgattggcttgcagctacacacccttttgtcatttgcagagcagcaactccctcttgagctcttgggggagtctttacacaaaatacactagaaaaaaggcacccatccannnnnnnnnccatcttgggcattttagctcacaggcataggtccctggggatgaccctggaagtanaaggcagntgggagggataaaattt

SEQ ID NO: 264401 - DNA, 429 bp, Homo Sapiens
  misc_feature (227)..(227): n is a, c, g, or t
  misc_feature (247)..(247): n is a, c, g, or t
  misc_feature (324)..(324): n is a, c, g, or t
  misc_feature (370)..(370): n is a, c, g, or t
  misc_feature (391)..(391): n is a, c, g, or t
  misc_feature (400)..(400): n is a, c, g, or t
  misc_feature (419)..(419): n is a, c, g, or t
gtatctgcttatgtaaacactagaaatccagggagaaaattcttccaatccaacaatccacacattcctacacaaaaccaatcacttgagtatttaaaagctagatctgtggcgagagacaggctagaactagcacaaacaagtctgtgcaagatgaatttatcctccactgcctctactccaggggcatcccaggagctatgcctgtgagctaatgccaagatggnaaaaaaatggatgggtgccntttttctagtgtatttgtgtaaaggactccccaagagctcaagaggggagttgctgctctgcaaatgacaaaagggngtgtaggctgcaagccaatcagggcaggaacattttacatcgtccnggggcatttaatgactaaggnctgcgccanttccaaaagcgggtccggnaaacagacgt

SEQ ID NO: 264402 - DNA, 570 bp, Homo Sapiens
  misc_feature (301)..(301): n is a, c, g, or t
  misc_feature (308)..(313): n is a, c, g, or t
ctactacagtggcggagccgtacaggacctgtttcactgcagggggatccaaaacaagccccgtggagcagcagccagagcaacagcagccgcaagacattgtttctctccctctgcccccccttccccacgcaaccccagatccatttacactttacagtcacagaacagaaagtgctggtggacatctcttcttgccccaagatcttcgttggaagtccccgggacttggtgtctttgccgttcaaagtgtttatgaactcgccaggaggcataatgtgtcacccaattttaatttttnccctttnnnnnncctgggccaccctaaaggatgacacccagcttcagagacctcctcttggacgacatccctgagaatcaatgttttagctgtcccatagtctgacgtctgtttccgaccgcttttgagctggcgcaggcttagtcattaatggccaggacgatgttaaatgttctgcctgattggcttgcagctacacaccttttgtcatttgcagagcagcaactccctcttgagctcttggggagtctttacacaaatacactaga

SEQ ID NO: 264403 - DNA, 497 bp, Homo Sapiens
ttgctgctctgcaaatgacaaaaggtgtgtagctgcaagccaatcaggcagaacatttaacatcgtcctggccattaatgactaagcctgcgccagctcaaaagcggtcggaaacagacgtcagactatgggacagctaaaacattgattctcagggatgtcgtccaagaggaggtctctgaagctgggtgtcatcctttagggtggcccagaataaaatggtgacacattatgcctcctggcgagttcataaacactttgaacggcaaagacaccaagtcccggggacttccaacgaagatcttggggcaagaagagatgtccaccagcactttctgttctgtgactgtaaagtgtaaatggatctggggttgcgtggggaagggggggcagagggagagaaacaatgtcttgcggctgctgttgctctggctgctgctccacggggcttgttttggatccccctgcagtgaaacaggtcctgtatcgccgccact

SEQ ID NO: 264404 - DNA, 988 bp, Homo Sapiens
  misc_feature (791)..(802): n is a, c, g, or t
gggtacatggaattttttgaatatgccttaatttagaaactgaaaaatatctggttatatcattctgggtgtgttcttactgacaccaggggtccgctgccccatgtgtcctggtgagaaaatatatgcctggcacagcttttgtatagaaaattcttgagaagtaactgtccgctagaagtctgtccaaatttaaaatgtgtgccatattctggttcttgaaaataagattccagagctctttgatcgcttttaataaactgcaagttcattttaaaggaagggccagcatatatacttgcaagataattttcagctgcaaggattcagcaccagttatgtttgaatgaaccctccttttctctgagattctggtccctggaaatccctttctgctagtggtgagcatgtaagtgttaagtttttaatctgggagcagggcataggaagaaaatgtcagtagtgctaatgcattttgcactagaacgcttcgggaaaatattcatgcttgccatctgttcatttctaaatttatattcataaagttacagtttgatacaggaattattaggagtaattcttttctgtttctgtttataatgaagaacactgtagctacattttcagaagttaacatcaagccatcaaacctgggtatagtgcagaaaacgtggcacacactgaccacacattaagctgtgtcaccatttgtgtggtgtacctggctggaagaaattctagcatggctacttggggacataatttcagtgggaaatatgccactgaccgannnnnnnnnnnncctctttgcagtggggctaggacagttgattcaacaaagtattttttccttttttctcagtcctaattggaacaggtcaaagatgtgtccaggcattccaggtaacaggtgtgtatgtaaagttaaaaataggctttttaggaactcactctttagatatttacatccagcttctcatgttaaata

SEQ ID NO: 264405 - DNA, 944 bp, Homo Sapiens
  misc_feature (163)..(221): n is a, c, g, or t
ggcagggcgcgcagccgggccgtcccgaccccaccggccatacggtggagccatcgaagcccccacccacaggctgacagaggcaccgttcaccagagggctcaacaccgggatctatgtttaagttttaactctcgcctccaaagaccacgataattccttnnnnnnnnnnnnnnnnnnnnnnnnnnnnnnnnnnnnnnnnnnnnnnnnnnnnnnnnnnnatgcccgccatgccctccagcggccctggggacaccagcagctctgctgcggagcgggaggaggaccgaaaggacggagaggagcaggaggagccgcgtggcaaggaggagcgccaagagcccagcaccacggcacggaaggtggggcggcctgggaggaagcgcaagcaccccccggtggaaagcggtggcacgccaaaggaccctgcggtgatctccaagtccccatccatggcccaggactcaggcgcctcagagctattacccaatggggacttggagaagcggagtgagccccagccagaggaggggagccctgctggggggcagaagggcggggccccagcagagggagagggtgcagctgagaccctgcctgaagcctcaagagcagtggaaaatggctgctgcacccccaaggagggccgaggagcccctgcagaagcgggtgagtcctcagcaccaggggcagcctcttctgggcccaccagcataccctgagagtcagggacttggctctccagcaggtcccaggaaggatggtctgggtcgtggctaaaggtctgcttgccaaggctatggcctggaggctactggctggatgcagcctgcgcatatgttttatttggcccatagagtgttttaaacatttaaaaaattagttgccagtatttaaaaatcaaaaaatttcacataaaaatctggagcttttggcttctcatg

SEQ ID NO: 264406 - DNA, 933 bp, Homo Sapiens
tttgatcctccagcaagtagattgatattttctcctggtaacaattctaattgctcagtacattcaacaaattttccagactcgaagctgcttaatgatctcccagacggggcggcggggcagaggcgctcccatctcagacgatgggcggccgggcagagacgctcctcacttcctagatgggatggcggccgggcagagacactcctcactttccagactgggcagccaggcagaggggctcctcacatcccagacgatgggcggccaggcagagacgctcctcacttcccagacggggtagcggccgggcagaggctcatgtgtggcttcttcagtcctctcttcattcactcatgtattcatttattcaacgacatattactaaggaacctccttaagccgggatgctgaacgtggaaaaatagttgactcttgaacaatgtgggggcttggggcaccaaccccctgtgcagttgaaaatcgacatataactttgactcgccaaaaacttcactacaatagcctgctgtcaacctgaagtcttaccaataacatcaaacagtcaattaaacatattacgtatgttatatgtattctatgctgtagtttttacaataaagtaagctggaaaaaaacaaagacgacgacacgagcatctacaacagacaaaaagaggggggggcgccaaagagataccccatgggggcccaagcttaacgccaaccactttttttcggacaaggggcccccaaagatggggcgaataacaacagagagcgggccgccgtaacaaccgtgtcatgggaaaaggaccccgggaatcagggaggcagccaccgcgggtgagcaatgcgaccaccacagaagtacgccggcatagactaggtatggaccaccgatgtgcgaatggcgactataatcgagcacaaa

SEQ ID NO: 264407 - DNA, 1284 bp, Homo Sapiens
  misc_feature (697)..(748): n is a, c, g, or t
  misc_feature (753)..(866): n is a, c, g, or t
  misc_feature (897)..(975): n is a, c, g, or t
gggagacgtggcgcagcgactcggaggttcgcctccagcttgcgcatcatctgcggccgggtcccgatgagcctcctgttgcctccgctggcgctgctgctgcttctcgcggcgcttgtggccccagccacagccgccactgcctaccggccggactggaaccgtctgagcggcctaacccgcgcccgggtagagacctgcgggggatgacagctgaaccgcctaaaggaggtgaaggctttcgtcacgcaggacattccattctatcacaacctggtgatgaaacacctccctggggccgaccctgagctcgtgctgctgggccgccgctacgaggaactagagcgcatcccactcagtgaaatgacccgcgaagagatcaatgcgctagtgcaggagctcggcttctaccgcaaggcggcgcccgacgcgcaggtgccccccgagtacgtgtgggcgcccgcgaagcccccagaggaaacttcggaccacgctgacctgtaggtccgggggcgcggcggagctgggacctacctgcctgagtcctggagacagaatgaagcgctcagcatcccgggaatacttctcttgctgagagacgatgcccgtccccgggccagcagggatggggttggggaggttctcccaaccccactttcttccttccccacgctccactaaattccctcctgccttnnnnnnnnnnnnnnnnnnnnnnnnnnnnnnnnnnnnnnnnnnnnnnnnnnnngaaannnnnnnnnnnnnnnnnnnnnnnnnnnnnnnnnnnnnnnnnnnnnnnnnnnnnnnnnnnnnnnnnnnnnnnnnnnnnnnnnnnnnnnnnnnnnnnnnnnnnnnnnnnnnnnnnnccgacgaaacaaagggaggcccaccaacatnnnnnnnnnnnnnnnnnnnnnnnnnnnnnnnnnnnnnnnnnnnnnnnnnnnnnnnnnnnnnnnnnnnnnnnnnnnnnnngctcgcgaaaaaaacaaccaaagaagagcaagagaaaaacacaactaagggggcgaccaacacacaacaacggcgggcagggcagactacgttcgcacgcgcacaccccgcaagagaggagaccacggacacaagaagagggaaaagccggcgagcaccacagcgcggcgagaaacaccaggcgtggagcagaaagcacggaacagagcgaagagaaacaacgggaggaaaaaacaaggaataaccgaaaccagcgggacagagccataagagacagcaagacactccgacaccaacagacgacggggg

SEQ ID NO: 264408 - DNA, 781 bp, Homo Sapiens
  misc_feature (11)..(11): n is a, c, g, or t
  misc_feature (41)..(41): n is a, c, g, or t
gatttctgttntggaaagcccaaaaaaattaattgatgcancatagcacgtgtgcctgataccacccacagtgaatgttgtttaaggcctaacaaacagtggtcagcaaagcatacattacttttaagctttgggtccaaggaagatgtcattccctacctccttcaaaagcagactcatcatagcctgggcacctaggcctggagcctattttttcgagtctaatatgaacatctggatttcaagaggtgctaggcttgaggtatctttatggcttaaaaggcacaggtcatgcagctgaattaaaagctatcatgttggtctctggaatgcaggccatgagccacgccttgtaagggggagacctgaggccctgtccttggctcctcagtgtaacccacacatcattggctctgttcctctcgccctgctcctgcaactgctcatcagctgtgaatgctggaattggaggacgaggttggggctcctgcacagtctgctgccaggtagagagcaacacaggctgcagaatcctaccctccagcatatcgcggggagggggggacctgctgcacagccaagaagtgactcacatgcaggcaaggacgggaaggcttgttcttcaggcacaacgtggtatggggagaagaaacctggttttcttggaatggtcctactaagcttgaaagtggtgctgcatttacgggcagggcacacccagccataggcaacccctttgagcgatgggagaagtagcataagaaggatgccaagaagaaca

SEQ ID NO: 264409 - DNA, 566 bp, Homo Sapiens
gaaatggaatacacattcattagcatgcaaggggaaatcagagtgactgccccaccacgaaatggggtacagatgagcaatggggaagtgtgggtaatttcagggggctagtaaatgattttcaggggaattcagtgggcttgaagaacatacagtggcctgggacaaagtctgttgggctcacagagcagacaacggtttgcaaaatctgtccaggtatgtgagcaggcttcagtctttcttcctgtgacagcagttcagtcagagaaaactccgggaagggaccagtggtcattgttttcttctttggtgggtccagacttaaggcagatgaggaacttcagagaacaacttcactgtatgctttggaagagacaaagggttggggggcctgtgggagtctggtcggagagaccttaaggcttcttcagttcagaatgtcacaccactatatttcggggtattggtttctgagccccaacaatgggtaactgaaactttaagtccccacctggcaaagaaggtccttagttcctccacctccagctctctcctccgtattctcc

SEQ ID NO: 264410 - DNA, 1002 bp, Homo Sapiens
  misc_feature (130)..(130): n is a, c, g, or t
  misc_feature (922)..(922): n is a, c, g, or t
  misc_feature (961)..(961): n is a, c, g, or t
cactttttaacaaaacaaaaagcatctgccaaccacagaacattgcaacacctaggccctgggctttcccccagcattcattcactagcacctcatgttttggggccacaagcacagggctttcttaggnctgtaaaatccacctatatcatctgtctgtccactgctcaaactccttctgcagtatccctgcaacaatattacatgcttatgaaatgctgcagacagggaatttcctgtccttctaggatcctcttctggctgtgggcagctttaccataagttcttgtcttcttatgctgaaattgatttcattttcatcttcacgtattattgcttctttgctctctcggtgtccaactgagtctcatcgctctcccttctaatactccttctgtcatctattttgtcttttcttcttcagactgaaaatccctggtagtacctgtagtttccttccaggacacgatttttagtctgttccttcaattgcccttttatgcttcttgtttcttctccatcaataatatgtcagtcaactgcttgtcagagacacttagctgctgacaggtcctcataacctgactcaggtaaactgccaagagatgcttgcacaggatgctgtcacttcttccgtagcactgagaatgcaaatgcaggacatgaacagtaatgacaagaagccaaacatgtgtatgttttactggaacttccaaggacctggtaaacacgccttccactgggtgatgagattaaggtgatggactgtcgatcaactaggtccaaggcctgggtggctgatgagccaaagagaaacttcagcgataacagatattcatcaggaattcgcgcgctctcctgcaccgccgccgccatcgtcgctcaggagctcctccacaaccgccggcaacactacggccantcgcgccgcaggacacgccctccaccgaacgcggaccgncgcgacgctcccagctgactgcgcctacctgtggaggatcc

SEQ ID NO: 264411 - DNA, 467 bp, Homo Sapiens
  misc_feature (41)..(41): n is a, c, g, or t
  misc_feature (43)..(43): n is a, c, g, or t
gggcggtcaggatgaagttctggttgaagtcccgttgtttntncccctcaaactgcactgatccacagatgacaacaaggaccctggtctggaatggcaatgctgtttcaggacaagaatccttgagtgagttttttgaaatgttgccttccagcgagttccaaatcagcgtggtagactgccagcctgttcatgatgaagccacaccaagccagaccacggtccttgttgtcatctgtggatcagtgaagtttgaggggaacaaacaacgggacttcaaccagaacttcatcctgaccgcccaggcctcacccagcaacacagtgtgggaagatcgcaaagtgactggcttccgcttccagggactggggccagcctagtggggggtgggcagaaggtctcttttgcttccattcaaccccctaggctctggtagaggaaatggcaaaaccctcgaattctccaag

SEQ ID NO: 264412 - DNA, 611 bp, Homo Sapiens
  misc_feature (24)..(24): n is a, c, g, or t
gcccaaagaaattcggccacgagnagcgagtccccaattcaggctgccagtctacccacgctgatttggaactcgctggaaggcaacatttcaaatcagcgtggtagactgccagcctgttcatgatgaagccacaccaagccagaccacggtccttgttgtcatctgtggatcagtgaagtttgaggggaacaaacaacgggacttcaaccagaacttcatcctgaccgcccaggcctcacccagcaacacagtgtggaagatcgcaagtgactcgttccgcttccaggactgggccagctagtgggggtggcagaggtctctttgcttcattcagccctagctctgtagagaaatgcaaacctcgactctcaaggatgtgaggaacacaagttcatttctgttgttgcggagacactgcagactccactgtgccgaggttgaactcttttttgttgctcaagttctaggagtccctttcctgaatatatacttgtttgtcatagtttccttttcaaagtagtaaacttttctatttttctacttgcccagtagagactctgattctggaaattctgacaaataatttaataatacacatgttgcttctt

SEQ ID NO: 264413 - DNA, 566 bp, Homo Sapiens
  misc_feature (408)..(408): n is a, c, g, or t
  misc_feature (410)..(467): n is a, c, g, or t
  misc_feature (496)..(496): n is a, c, g, or t
ggcagtgggacctaaccaacatccaggatgctatccgggctgctacccctcaggtagctgcagagctggagaagagcttgagcccggggctggacaccaagcagctccccagtccgggatggtcctgggactcccagggcccgagctctaccttggggctggagaggggtgcggggcagtgaatgcccaggcagctcctggggcagtggatggataaatagaagaactgctatgagctggacctgatagctgtgcagaaagtgagagcaggggcaccttttcctacgtaagacacaaaactcaagctgtaacagaaaggtcaatggacttgacccaactgagaaggaaaaacttctgtatggaggaaaagacagtaaacatgacagactgatagaaagtattggcagncnnnnnnnnnnnnnnnnnnnnnnnnnnnnnnnnnnnnnnnnnnnnnnnnnnnnnnnnnntgcttgagcccaggagtttaaggttgtangtcgctagacggcgcctgtgaatagccactgcactctagtctggggaacatatgagacccctgccatctc

SEQ ID NO: 264414 - DNA, 884 bp, Homo Sapiens
ggtggatgtggtggtctgcactctggtgctgtgctctgtgcagagcccaaggaaggtcctgcaggaggtccggagagtactgagaccgggaggtgtgctctttttctgggagcatgtggcagaaccatatggaagctgggccttcatgtggcagcaagttttcgagcccacctggaaacacattggggatggctgctgcctcaccagagagacctggaaggatcttgagaacgcccagttctccgaaatccaaatggaacgacagccccctcccttgaagtggctacctgttgggccccacatcatgggaaaggctgtcaaataatctttcccaagctccaaggcactcatttgctctttccccagcctccaattagaacaagccacccaccagcctatctatcttccactgagagggacctagcagaatgagagaagacattcatgtaccacctcctagtccctctctccccaacctctgccagggcaatctctaacttcaatcccgccttcgacagtgaaaaagctctacttctacgctgacccagggaggaaacactaggaccctgttgtatcctcaactgcaagtttctggactagtctcccaacgtttgcctcccaatgttgtccctttccttcgttcccatggtaaagctcctctcgctttcctcctgaggctacacccatgcgtctctaggaactggtcacaaaagtcatggtgcctgcatccctgccaagcccccctgaccctctctccccactaccaccttcttcctgagctgggggcaccagggagaatcagagatgctggggatgccagagcaagactcaaagaggcagaggttttgttctcaaatattttttaataaatagacgaaaccacg

SEQ ID NO: 264415 - DNA, 1047 bp, Homo Sapiens
  misc_feature (46)..(84): n is a, c, g, or t
  misc_feature (87)..(122): n is a, c, g, or t
  misc_feature (169)..(177): n is a, c, g, or t
tgaatagactcactaataaggggcggctcaagcgtgcttgccaagnnnnnnnnnnnnnnnnnnnnnnnnnnnnnnnnnnnnnnncgnnnnnnnnnnnnnnnnnnnnnnnnnnnnnnnnnnnnagtcgacggtaccggacatatgcccgggaattcggccattacggccnnnnnnnnncggcggcggcggaagcggatcgcactctctttgtgggcaaccttgaaacgaaagtgaccgaggagctccttttcgagcttttccaccaggctgggccagtaataaaggtgaaaattccaaaagataaggatggtaaaccaaagcagtttgcgtttgtgaatttcaaacatgaagtgtctgttccttatgcaatgaatctacttaatggaatcaaactttatggaaggcctatcaaaattcaatttagatcaggaagtagtcatgccccacaagatgtcagtttgtcatatccccaacatcatgtcggaaattcaagccctacctccacatctcctagcagcaggtacgaaaggactatggataacatgacttcatcagcacagataattcagagatctttctcttctccagaaaattttcagagacaagcagtgatgaacagtgctttgagacaaatgtcatatggtggaaaatttggttcttcacctctggatcaatcaggattttcaccatcagttcaatcacacagtcatagtttcaatcagtcttcaagctcccagtggcgccaaggtacaccatcatcacagccgtaaagtcagaatgaattcttatccctacctagcagatagacattatagccgggaacagcgttacactgatcatgggtctgaccatcattacagagggaaagagagatgatttcttctatgaaagaccggaatcatgatgaatggagccatggactatgataacagaagagacagtagttagaagatggcaaagggggctcaattttgaaaataacccatggttaacaggcactgggtcaaaggggcatttaaggcctttgacataatggaatgggactct

SEQ ID NO: 264416 - DNA, 516 bp, Homo Sapiens
  misc_feature (400)..(444): n is a, c, g, or t
  misc_feature (459)..(459): n is a, c, g, or t
gggggtttctttgcagaaagaaacctccagcaagggaagagaggtgtgtgtccacaggaaggggctccgtggggatcccatgaagggatttgagctctttcagctccatgtcatttaacttttttgtttaaccaccttggctttctctccttttttgctgtcctccttacggaccagttaccagattcagaggctaacagttagttacttgttaatgctagtcacagccaggaggtcagaaggaattttctacttctggatccaaatgttacctcttaggggaagttatgccccctcaactattgtcttattataatgaatctttcctttttggtccttttaagtaaccactcaaaacttttcatttcactgaaaaaatatgaaaaaccatgacaatagnnnnnnnnnnnnnnnnnnnnnnnnnnnnnnnnnnnnnnnnnnnnngagaccaaggcaggncgggatcgttttgaggtcagggagttttgaggaccagccggggcaatgttggcaaga

SEQ ID NO: 264417 - DNA, 861 bp, Homo Sapiens
  misc_feature (37)..(37): n is a, c, g, or t
  misc_feature (297)..(297): n is a, c, g, or t
  misc_feature (316)..(316): n is a, c, g, or t
  misc_feature (671)..(671): n is a, c, g, or t
gggagggcgggggtgatgccgcgcggtcgcaggctcngggatggtgttcgcgcctccgagacccggacagaggcaagcaggggcgccgtgggtgcaagagaggcggaagaggaggcctgatggggataccttcctgctgtccttcctgagcacaacctggctgaaaacctggaggtcacaacagtacaaagaatcaaagtcaagatcttgtgccagagagcaaatgaactcttcctcttgctgagaaaacccaccctgctcacctaaaccctggccttgcctggtaattccatccantgcgcctggaacgccccangacactcaaggctctgaggggccaggcacggggaagaacccagcaagtgccctgccctgcattctgagctaccagattccttgtgaagataatttgaggaccatgactcacccaaccacatttcctggggcctcaaattgaaaattcaggatgggcttttctatatgactggctgatatccaactatgccatggtctttacatgccatgaacattctttcctgccgagagttctaagaatctgtgttctctgccttagacccttctgcagatgagcccacagggaagctccacgtgtagctgagctacatgcaccaaggcctcaagtttgcccccaagtcccctgtgtactctcntcatggcctgtggccaagaaatgtattctctcactttggacttaggagtccaaaggagaagcccagaaacaaaattgcttgaacttgaatttgtgtgcgtgcgcaccgtgtgcacgtggtgggggaaggtgcatgtttttggctgttccattgcgtcactgtcacccaactcccaaataatagtaccctt

SEQ ID NO: 264418 - DNA, 859 bp, Homo Sapiens
gggaacgcgagggaaggactgggtttggaaagtggtgtgtagcgtacaagcacggccggaggggatgcgggcgcggcgggaaaaaaacggggcgttttattagggggggcgatcgccagattcgggctcgtccattagcgggtccgtagaggtctggccggccggaacgtttttcgcgttatgggtagccgccttccttaccccacccgccagtctttggccggggctcggggggctcccgatgcaataggcgcgaccggggccaaacgctgcggatcggtctcggtaggacccggaggcctttgtaaatgtcggggcgatttcacagtagggaaccgagaagaggaggaagcgaacgtgagtaggagcgcagcgctcttcggacctgtgaggctctctttgcaacttgccacactcgcagccctcacccgacactgaacaacaaccgcggggaggagaggccacttgcagccgaggctcgcaaactgtcggttccactcgggcagcgccaacccggtgcccgcggacggtgacttccgagccccagcgatgcgctccactgggttcaaaacagatctaattccacagccagcgccgctgcctgccccagatccactagggctggtcggctctgcaggaactttcctctgtctagggatggccccggcaggaggtttaggtttgcgggaaggaggttgatgacgaaaccctcccgacaagttttgcttcttttcttcgcccgacgcagggcgcgcgtcctttctcgcagccggaggaatgggcagctccaaagagctgagccctgggaaggttagggctgcagcagtctgaggtccgaagccaggaaaaaaatgtgttt

SEQ ID NO: 264419 - DNA, 930 bp, Homo Sapiens
  misc_feature (775)..(775): n is a, c, g, or t
ggcacagatgttactgaacctgtgaatcagacgccaggagtgagggctggggagggacctaactggagcctcagtctgacattccacgccggggtgggggtgggcatgagcggtgggaactgaggctgcccaggacccccttcctaggatgccccggcttcagtcaccccactttaactttctaccaggaccccctccccctacctcaccttgctatttattgctgtaatttattgacctcaaaaatgctgcataacagacctcactggggcagggaggatccccatgggctcccaccctccacttggcgggccccgtgcagccaggtgcttgatggggatgcctctctaccccacccatcactagcttccctctgccctctcccaccccgggggggacccaggttgggcacctggctcatttccccgcaaatacccccgaaggggaggggggagggatggggttatagctgttttgtttaattggaactggaagagggatcatgttttgttttatgcccttcccagaaggggggagggacaccggggatccgcactcctgtactggccaccgccgctgtcacctgtcacattgagttcatgtcccttgagagtttgtataaattcaggtcagagctgcagctacacagctgcccagtgtcatagaaaagcaattcatcaacgactgatctctccattcagaagtgtgcagtcttaaatgtacagcgataagaaactgttattttatgatcttttcattaaaagcttgactaatncccacaacacccaccacacaatcccccttggtgggccgcccccggccctccagaaatctttctaaaaccttctgttttggcccggcgggcccccgcaggcaagatggaacctggggcataagcctggtttcctaaggggaaccctgggcaatgac

SEQ ID NO: 264420 - DNA, 1157 bp, Homo Sapiens
gggtctccattctgtaagctttccgggaacatccaaggcaagactggcacccagcacagcagtgactgaccacataccccactctccaggacccatggagtccttcagctcaaagagcctggcactgcaagcagagaagaagctactgagtaagatggcgggtcgctctgtggctcatctcttcatagatgagacaagcagtgaggtgctagatgagctctaccgtgtgtccaaggagtacacgcacagccggccccaggccagcgcgtgatcaaggacctgatcaaagtggccatcaaggtggctgtgctgcaccgcaatggctccttttggccccagtgagcttggccctggctaacccgctttcgccagaagctgcggcagggtgccatgaacggcacttagcttttggtgaggtagacttcaccttcgaggctgctgttctgcctgcccctgctgaccgagcgccccggatgtgctgctagagctggcggaacaccacctcacgcccaagtcacatggccgcatccgccacgtgtttgatcacttctctgacccaggtctgctcacggccctctatgggcctgacttcactcagcaccttggcaagatctgtgacggactcaggaagctgctagacgaagggaagctctgagagccctgagcctagcacattacaccttgacaaaatggttgactgagaaaacacagataatgggcttcctaaccctgctcacctggcactaacacttttcaatcttcaggcttcattccttcccaagagtgcttttgactctgagaccagcccacccccaaacagctagtggagaaggagcaatgctgaggggtgaggcctctctcccactccagccccaggacaggaaacagaactgcctgaaaaaggtgaagtgaaacttggatctctatttctcccataagggacttctgaaacagggaagccccctcccatgtgaaccaaggaaaggagcacagcccagagaaaccctttggggatactaaagacagaagaggggaaggtggcccttagagacagagcttggacagattccagaggctctgttccagagtgcaggaagaaggggctagggcaggggagattctcataggggaaataaaactactaaaatatgaaaata

SEQ ID NO: 264421 - DNA, 890 bp, Homo Sapiens
tgaatcttcagctaaaccgggaaccattagtcaagacttcctgttacactggctataaagcatctcaacaggtggattccagaaaaggtcacagcacctacaggaaacaactgaggaaaacatccttgaggtttcaagttaacaaattttctggatctgaagcacttgtttaaaaagatgtcccctggaagaattgtcaattttggttaatacaatcacataaggtaatgcaaatttcttcacacatttctagggcaatatggtctgttttttgaattccaacaacgctatccactaataaaaatgttctcttcaagttccttcgttctttaagataggtctctaccatgtcaacaaaatcttcaggtgctctaaagccataacctggcatgtccaccactgtaaaatgttttccaactttgaaaaaattcattttctttgtgtgtcctggttttttggagactctgacttcaacctcaggggccagtgaaaataaagccttgattagagatgattttccaacattgcttctgcctataaaacacacctctggccgcggaaggtccggggcgtggtcgatacggacggcggagctgacgtagtcgatgcggttccgttcagtggccgtgaagatgttgtccgccctggctatgtcctccgggcttgggtcaaagatacgcaggtgaaggtcttgcctcccgtagggggcgaggaaccgctctacttcctgcagcgggtacagcagcttcctcagctgctgcttcgacaatagcagcacctcagcaaaagcttgggacgtgctattatagcggctcagtcgctctagcaccgcaggcatttcaaagagtcttcccgctcccagccgcagcccgggcgccgccattctcccc

SEQ ID NO: 264422 - DNA, 864 bp, Homo Sapiens
ggtgggggcagaataggtagtatttaagcaaatacttaagtccaagcaaatcatccccattaaaaagcttttcctgtaggctagtaggatttctaaatagatgaattcaacagacttggtaattttaatccaagagtatgtatgtgaagaaagtgagcatgattcaacagtttcactctcagggattttaggatggcaaaatacttcacagaaactcaatgattaagttcccttccacacttccagagcttgaatgaacacaggtagccacctaaattgagcagtattgcaactcagagagaaaatcatctgaatagtaggacaagctcagaaggtacattgtgactgagggcttaaaaggagaccaaaacatggccccatcagggaagcttcttaatgcttggggggccagctaggtagggttgcttccaaaagctggagcccacccctgcctaggggttgtcagagagccacacctgcaggggaacaggtacctccgagggtgagagtcgtggtctctgggagttgttttctcacctctggcttagaaggggtcaggcagaaaccacaggatgtggggtcacactctgtcccaagtttgggaacctgaaaaagtctccattcagaacatggttggttctccctgtcccatgctatcttatcttcctaaatgactaatgagggaagcgggggttcctttttctgcactttggatccccatctggggtcctgtaggggggctctgaaggtggggatctgcccttctggctgatgggggaggaaaaaacaagcggccttcccaggggcacaggtgtctcacctctccggaagaaaattttaaggaagccctccggggggccttcc

SEQ ID NO: 264423 - DNA, 883 bp, Homo Sapiens
  misc_feature (11)..(11): n is a, c, g, or t
  misc_feature (22)..(22): n is a, c, g, or t
  misc_feature (608)..(670): n is a, c, g, or t
  misc_feature (678)..(759): n is a, c, g, or t
tccccttaaangctactgtgcncctctggtgttcctgaatttccctgcctttaatctgtcttctcttgcccctatctcattccaaccccaaaatcttctccttccctgaattacttttgttgtccctgcctcttcaaggtaaatggtcaacaaatttggctgtaggcacgttacccagccctgtggcttcttgactcttggttcccctgttaactctgtttcctgaagaaatgtgggtatggaggtgggtgggaaagctcacttcccatgaaggatgtctcccatgctaggagctgcctgcacccctggcagaggtggccagtcacgtgaaggtgggcagggcccttagcatggccacacatgtcccccagggcagatcaaggggcctctcagaaccatgttccccagccaggtgaggaccattttcactgggacccaggccaaaaccatgtgggtgcacaaagccagcactgccaagtggaacatgaggttatttccaaatcatgggagccaccagcagggagagggcaggatggaaaatcccctggagcccggtcaactttttgctcatggctagtgaaataaagttgtttgagtactacgatgcnnnnnnnnnnnnnnnnnnnnnnnnnnnnnnnnnnnnnnnnnnnnnnnnnnnnnnnnnnnnnnngccgcggnnnnnnnnnnnnnnnnnnnnnnnnnnnnnnnnnnnnnnnnnnnnnnnnnnnnnnnnnnnnnnnnnnnnnnnnnnnnnnnnnncctgcgcgtcccccgctcctccatcaaacttctttcccgccctttccctcgtggggagggagccctctccaactattccctgttactcggcgcgcgaccactcctcaccaacaaaatcacctgg

SEQ ID NO: 264424 - DNA, 555 bp, Homo Sapiens
  misc_feature (510)..(510): n is a, c, g, or t
  misc_feature (520)..(520): n is a, c, g, or t
gcttgctgaggcttctctaaaggtggttgggcaagcacctatatagtatcacggggacagttgaggcaactcgtagatggagatttgggaaaagacgatgtggcctcctacctttccagtttctgttggcagcccttcacgtagcctcctgcctcgcctctacacctactaccctgtcggcccttttgccatgctgtcctcgtataactcgggattctctcctcaggtgtaggtgcagggagtcagggaacccttaggactcccctgtgtgcaagagcccagggtgttgggtgtgtccctttaatgctactgtgctctctggtgtttctgattttcctgcctttattctgtcttctcttgtcctatctcattccagcccacatcttctcctttcctgattacttttgttgtcctgcctcttcaggtaatgggtcacagatttgggctgtaggcacgttaccagccctgtgggcttctttgactcttgggttccctgttaaactctgtttntgaagaaaangtggggaatgggaggtggggtggggaaaagcccac

SEQ ID NO: 264425 - DNA, 1039 bp, Homo Sapiens
ctcagatgctggaggaagattctaaccaggggcacctgattggtgatttttccaaggtatgtgcgctgccaaccgtgtcagggaaacaccaagatctgaagtatgtcaacccagaaacagtggctgccttactgtcggggaagttccagggtctgattgagaagttatgtcattgattgtcgctatccatatgagtatctgggaggacacatccagggagccttaaacttatatagtcaggaagaactgtttaacttctttctgaagaagcccatcgtccctttggacacccagaagagaataatcatcgtgttccactgtgaattctcctcagagaggggcccccgaatgtgccgctgtctgcgtgaagaggacaggtctctgaaccagtatcctgcattgtactacccagagctatatatccttaaaggcggctacagagacttctttccagaatatatggaactgtgtgaaccacagagctactgccctatgcatcatcaggaccacaagactgagttgctgaggtgtcgaagccagagcaaagtgcaggaaggggagcggcagctgcgggagcagattgcccttctggtgaaggacatgagcccatgataacattccagccactggctgctaacaagtcaccaaaaagacactgcagaaaaccctgagcagaaaagaggcccttctggatgggccaaacccaagattattaaaagatgtctctgcaaaccaacaggctaccaacttgtatccaggcctgggaatggattaggtttcagcagagctgaaagctggtggcagagtcctggagctggctctataaggcagccttgagttgcatagagatttgtattggttcagggaactctggcattccttttcccaactcctcatgtcttctcacaagccagccaactctttctctctgggcttcgggctatgcaagagcgttgtctaccttctttctttgtattttccttctttgtttccccctctttcttttttaaaaatggaaaaataaacactacagaatgag

SEQ ID NO: 264426 - DNA, 933 bp, Homo Sapiens
  misc_feature (11)..(11): n is a, c, g, or t
  misc_feature (870)..(870): n is a, c, g, or t
ccttggcttcnccgctcgggagctttgccaatctgagccacgcctcctccaggccatgctccttgaacttggaaatgtcaaccggagcccttacaccagccctccagcatctaatagacttgaatctactctaaacgaatatttaatccaacctcactacattgtagctcagtccaacgactaaccctgaaatgggggtgttccagccttcagcgagatggccaagcggtcccctgggggctgtggcagcggacttatccttctctgttgccaaccttgccgtccgacctcctccgcccccatgcggtgaccccgtccgtgtctgtgtctgtccatacgtgtgagtccagctaaaaagacaaaacagaacccgtgggcccagctcggaaggtgcgtggagaaggctccgacgtctccgaagtgcagcccttgggatggcattccgttgtgtgccttattcctggagaatctgtatacggctcgcctatagaaatatagcctcttcatgctgtattaaaaggactctttaaagcctccccccccacttgtgctttgccaacccccacccaaccgccgccgcgggggacatatgaactaccctcttcttgtgcggccggcctcggccccccgaaaaagcttcttaaacccattctttttggggcgcgggcgcccccctagggaacgggaacatggggccatagcgtgcgtccctaagaaaaatccggggcaatagacaagggcgtgggaattccccaccaacaaaaaaaccccccgggcgggaaacccgcgagcgggttctgaaaaacgtccccacaagtggcgccccccccgcgcgctcttttacccgcgcttcctttccacaagggagantccacagccgagcgccgccgaacatacaaaatcacgggcgcccgcgccgcggcgtcgatattc

SEQ ID NO: 264427 - DNA, 1065 bp, Homo Sapiens
  misc_feature (28)..(28): n is a, c, g, or t
gtgaataggcgggggcgcgggggggcgntgctctgcgcgtaacaccgaaggcgccggcggcgtgtatacggcgcggcttgggacttctcgagccgacccggcgggattttcttcgaggggggtggcgcccagggcgtggcggagcgggaaacggtgccgcgcgtgccccacgcagaaaatagtcggaggggggacttgtccagggggaggctcgccagtgggaaagtggtttcagggcaagaatagcaattgtgtcttatgaattggtcccaattcaaacccggattcccaaaactttatttacagaaatgaggtaagaactgtgcaatgtttaaccaagaaacatattgcagaattaacatgttcttccagctaagtacacagtggagggtgtaattacagctgggtcttttccactaataattcacacaccaaagaagagtttgatgatgacatcctcagtgggggaatcactctgcggtactgtcacatcaaaagcgtggctccccaaagtggaagggctgtcacacaggtttcacctgtttcaggaactctagtggtgagcttttaatggtcagtaatgggaagtggtttaaataaaacaaatctctattcttaccaaatccactccttttcttgtgactcattagtggataaatacccaggtaatagttttgcctgagctatctacagtggcacagaaagttctgaataaaggcggaagcatgggaaggctgcaggtgacgggatgattcctgctgctcggaggactgactgtcccaccctgctgtctacagcccttgcagcacaatggaggcacttgatcaagggcaaaccccaccagcactttccacagtggcccctttctgaaagaagtatttagctttgaattgatctggttcccccagcagcctcagaactcacttaactcaagatttcttcaaaatatgagtaggtcttaacactaaagaaagcaattctcaaaagaaaattacctttagcagatgcagacattaccatcctaacttcattaccaaaattggccaaatcccattagaaaggaaa

SEQ ID NO: 264428 - DNA, 915 bp, Homo Sapiens
ggaggcggcgatactacagacatagtcttcttcacttacagggtgccattgaagactggaataatgaaagcagcatgccctgttgtgtccttcagcttggagatatcatcgatggatataatgcacagtataatgcatccaaaaagtccctagaacttgttatggacatgttcaagaggcttaaagttccagttcatcatacatggggaaaccatgaattctataacttcagtagagagtatttaacacactctaaacttaacactaagtttctagaagatcagattgtacatcatcctgagaccatgccttcagaagattattatgcttatcattttgtaccattccctaaattccggttcattttacttgatgcatatgacttgagtgtcttggggcgtgggatcagtcttctccaaaatacgagcagtgtatgaagatattgagggagcacaatccaaatacggaactgaatagccctccaggactttctgagccccagtttgtccagtttaatggaggactcacccaagaacagctacactgggctgaatgaagtggttaaatttctctgaaccacaaccaaggaaaagggggcggattgcggacccatcctttccatttacccggaaggcctctggacaatgggcgccttggccctggcaactaccgaaaacgcccctcgggaaggccatctccgggccccacgagaaccgcggtggccccgcccccctcttgcatcctcgcccgccccctgtactcgtctcccgcgctccttctcaccgtcgccgcccatccctctgcgcgctcccccctctagttcgagcgggcggaccgcgcgctcctccctcctgcgccctcacacgcaccgcccggtgtgcccggcggcgcagcgcgcgcgctgtgagtgctccg

SEQ ID NO: 264429 - DNA, 980 bp, Homo Sapiens
ctgtgggtgctggtggccctgtgctggccctccggggaatagatgcacaataatggtcgctgtggtgctgaggtggggggtggaggggcctgcatcggccacacagatcagtagctcataggtacggggctgctctggccagaacggccccaacacaaggtcactgtgcaccaccatggccccttgcaggatgaatcggttctggctattccctcccacgatgctataggagtagatcaggcgctgtggctcctgagggatctggcatgacatcttggtcacctccacgctacggcccagaggagcatagatggtgagttcctgaaatgggggctcacactcgggggcatggtcattcacatcctcaacctcgatggtaatggtacaggagcctgagaggtgatggttggggttctggtcttggccatggtcaatcacaaggacagtgagcctgtacagcctctgctgctcatagtccaaaggtcccaggaggtgaacttccccgctgagacggtccacagcaaaggtggtaggaccaccagaggtgtagtactcaatgttgtcatgagggtaatccatatccgtgcccaccacggagcccagtagagtgtggggcgccgcatcctcctgaacccggaacgtgcgaggggcacaggctggggagaactcgttgatgggtgtcaccatcaccagtaccggcacctcagtggtcatctggggctggccaccatcgagcaccaggatggaggctgcatgctggaagcaggctccaggagtgtcacagtccagtgtggcattcacctcaaggactctgtcataaaggcagaggctggcagggttggaagagatgcggaaccacagcttgtagtccagggtggcaccaacagaatccggatcttcgcaagtgagagtattcagcacggtgcccacgggtgcagtctccgggatttgggacaccagaagcgctgggaggcagcgtg

SEQ ID NO: 264430 - DNA, 685 bp, Homo Sapiens
catgcaccatgcagacaacaccctgaagagcttctgcaagtccattttaaaagcatcaacatgaagggagacgcccaccccctgcaccttgacactgccatcctgctcatcaggaaggacctgtgcgcagccatgaactggccctgtgagaccctgggcttgccccatgtggtgggcatgtgccagctgcaccggagctgcaacatcaaggaggacatgggcctgccgctgaccttcactgtgatggcccctgcaagcacactggcctcaagaacagtcttgagcacaactcccgtacgacgccgctcccctcacctggtcctgctgcagctgccagtacatcaccaggttccttgaccatgggtggagcctgtgcctggatgaccctgcctgccaaggacatcattgacttcccatcagtgctgcctggggtcctctatgatgtgagccaccagtgccacctccagtatggggcctactctgccttctgcgaggacatggatgagtgtttccagaggaggcgctgggccgggagaggtgtggacagctgaggaccactctgagcagtgcagccccgggcgccccacaccaccacgtggtctggggaggaagaatgtctgccacacactctggtgctctgtggggaccacctgtcactccaagctggatgcagccgtggacggca

SEQ ID NO: 264431 - DNA, 758 bp, Homo Sapiens
tccagcacaaggagctgatggccgctgacaggggacgcaggatattgggagtgtgtggcatgcatcctcatcatcaggaaactctaaaaaagaaccgagtggtgctagccaaacagctgttgttgagcgaattgttagaacatcttctggagaaggacatcatcaccttggaaatgagggagctcatccaggccaaagtgggcagtttcagccagaatgtggaactcctcaacttgctgcctaagaggggtccccaagcttttgatgccttctgtgaagcactgagggagaccaagcaaggccacctggaggatatgttgctcaccaccctttctgggcttcagcatgtactcccaccgttgagctgtgactacgacttgagtctcccttttccggtgtgtgagtcctgtcccctttacaagaagctccgcctgtcgacagatactgtggaacactccctagacaataaagatggtcctgtctgccttcaggtgaagccttgcactcctgaattttatcaaacacacttccagctggcatataggttgcagtctcggcctcgtggcctagcactggtgttgagcaatgtgcacttcactggagagaaagaactggaatttcgctctggaggggatgtggaccacagtactctagtcaccctcttcaagcttttgggctatgacgtccatgttctatgtgaccagactgcacaggaaatgcaagagaaactgcagaattttgcacagttacctgcacac

SEQ ID NO: 264432 - DNA, 693 bp, Homo Sapiens
tcctgtgtgcagggtgacctgcacgttgcggttgaggctgagggctggcatgaagaccccgtccacgtggctgaaggctgtggggccctgctgctgcccgttgatgaagaaggtgagagtgtgcttattcaggtccagcagcacgcccacggtggcccccttgcacacgccaccttccgtcctgttggtgtgggagttgcagtgcatgaaccagctgcggttgttgtccacatacatggcccaggccttgtcatccttgcccagcatcatgtccttgaccacgctggccctggccaccccgaaggcggggtctgggtggttgtcgtaccggtccacgtgcagctcccagtagtgcacgcccttggagaacgcagctgtgcccagcaccacccggtcgtcatagctgctgcaggtggctgtctggttgtcattggataaaatgatgtcccgatgcccagagttggggtcaaatgtgaaccaggccacatcggatgtctgcaggacgacagttttactgtaaggcccgacaccagaagagttgaaagctttgactcgggcgttgtaggtgctgttgaagtgaagaccgtcgatggtacacaaagtctccttaccgacgtacacttcccggaactgtcccccggcaccgtcgtacagctccaggatgtagccgtccacggggctgtgggtgaaggg

SEQ ID NO: 264433 - DNA, 524 bp, Homo Sapiens
ctgaaggcatattcgtaatttgttgtgggatccttgataacaacatcatcaagaaaccaaccatttcctgggccaagtccatcatggcctatcacaatcttacacaaatctccaaggtgcacagcctccaggaaaaaggtgtcagtttgtcctcttaaaaaattgaaggagctcttcgatctaaatagttgtctggatcctgtatctcccttttccccatggatagaaatgtagacgtttgctactgttccagcattccatagctcacccgttgccacattcacttcatatattgtcactggaaggacaggttgtcctttacttaaaagaggaaattctcgacagatttccccatcctcttgatctcgtgccaaccatcgttgaacaggtacataaaactgttttccagaattcatattatgcagctgtatctccttgcagtgccaggaaggggaggatccagaagacactatttagatcgaagagctccccacttttttaagaagacaaactgacaccttttt

SEQ ID NO: 264434 - DNA, 884 bp, Homo Sapiens
tcttgattgagtcttgaaggttgaggatggcttcctggacagcagagtctagagctttcataatctttgcccatcactgcctaagcacagagttgaacacagcaaggggagggaggcagaaacctgagactgagatcttggcaggtgtagctctggccaatggagaacgatggaggattctccgacgcttctccctgtccatccttcaagacttcgggatgggaaagcagagcattaaggagcgaattcaggaggaggccagctacctactggaggagttccagaacaccaagctaagattcacgaagagattaaccaggtgattggaccacaccggctcccaagggtggatgaccgggtcaagatgccctacacagatgtcgttatccatgaaatacagagactggtagacatcgtgcccatgggtgtcccccacaacatcatccaggacactcagtttcgaggttaccttctgcccaagggcacagacgtatttcccctgcttggctctgtcctcaaagaccccaaatacttccgctacccagatgccttctatccccaacactttctggatgagcaggcccgcttcaagaacaatgaagcctttgtgcctttttcctctggaaagcgcatctgcttgggcgacgccatggcccgccatggaactctttctctacttcacctccacctttctcaacttctctctatgctcgctggtgcgacttgtggacaaacaccccattcttgctgttaatgaagcatcctgaagtggaagctaagatccatgaagagattaaccaagtgattggaccaacaccggctccaaagggtggatgaccgggtcaagatgccctacacaaatgccctcatccacgaaatacaga

SEQ ID NO: 264435 - DNA, 308 bp, Homo Sapiens
ttcatccacccttgggagccggtttcgtccacccttgggagccggtgtggtccaatcacttggttaatctcttcatggatcttagcttccacttcaggatgcttcattaacagcaagaatccatagcgcagtgtagagctcaccgtctccgtgccagcaaagaagaggttcagagtggagaggaccaagttcttgaggttgaattctgtacgaggattatttttatcctggtgcatcttgatgagaaagcagtcaatgaagtcccgagggttttggggggtcaaaacccgagggttttgggggtcaaa

SEQ ID NO: 264436 - DNA, 686 bp, Homo Sapiens
aggctggcatgtccttaaactgcttcacgcacttgtgcatggtcttgaaggcttcaaccacgttcttctccagctgctcagcatcgatggcagagagggggtcattcatccagctctccgaccagcgcagccagtcagacgctgtggtccaaaggtccaggtagggttggaactccttcaccatcctggagagcttgtcataattggtgatgggcaagctgaagatgcgctcgcggttgttgtagagcatggccagctgctggcagtccttcagctgcttcttgacacgccgcacctcgttggcgatctcgtgtgcacgtgaaatctccacatggatggagaagccagctactaccagctgcagcccttccagcttctcttggaagttgttctgatccatgatctggattttgcggaacttctcctcatcctccacatgctgctgctgcaccagctctatctgcccaaggatcttagaaggccagttgctggcaatccatttgtcattgaagtcatctgagctgaggttgtagaggaattcatccatgacctggtagtcatccatgaccttcacaatccgctcctccaggcaaaccagcctctccgggatgcccttcatccactctcgcagctcagccagctcctcaatgctgttgggcttctcatagatcttgcggctgatgctg

SEQ ID NO: 264437 - DNA, 333 bp, Homo Sapiens
tcacagcgtcatggaagcaggccacccggtccacatcaatgtcattctcccccgctgagatggaggccaggtccacaaacaccttcagctcattgatgcctccaagagcctcccggacccagcagatgaactcctttctcagggacagagcctgcagccccttgcaccgggcctcgctgatgtcctggagcagctttttggcctggatgagctcctggttgatctggtccagtgtttcacggcgaaagttcgtcgaagttatcagtaaaatttagtaaagtgttgagaacactgaagtcaccgttcagtcccaggctctctttgacctgcaag

SEQ ID NO: 264438 - DNA, 332 bp, Homo Sapiens
ctctcttggctttgtgtccggcacctcccctggacaccgggcggccccggctcctccggggagcccctcgctgaccttccatcatccaccggtgcttggctcctgtgttgtgagcctgaagctgggaggccgagttcactgtcaccttacacgtggggcagtagaggtgccccttctcactcctgccttccccactcatgctgcttcccacggcagctgccgctggctcaggccccggagcctctctccctaggctctggggagcaaggtgggcaggaggaagaagaggatgaggaggcagcatccaagagctctgagtgggctggctccct

SEQ ID NO: 264439 - DNA, 641 bp, Homo Sapiens
gcgggcgatcaaggcatgatcagccaggctccacagcctgacagagcggtcatcgctgcctgtcacagccagaggcttcttggggtgcaggcccagtaacccagagctcaccctcgcagtggccctgtaggatcaacatcggcttgtctcgctctcgcacaatcacttcaaatatctcactgtcctgggtccctgctagaaggcggtctgctttccagcacacgctccggatagagaggcctttgtatccttgttctgtctccctgagatcaattttggttattggtttgaaatcagtgtcccacagtcgtatacacccatctcgcccaccagtggcaaagccttcttcacaagcatacatgctaaagattccagcactatgtgctccttgaatggtgcggactaaattgagccctttccagacatagatgtcaccatttaaagcaccagagtaggtgatgtcttctttggcacatgcaacgcaaaggatggtctgaagatcccctgttttgccaaatatccctctttttgcagtcagggcatttccacacagtgtccaaaactttatgtgttttactccacagctaaacactctgtttggctgatatggatccccaggaaatatcaaaaatcctgtcaga

SEQ ID NO: 264440 - DNA, 1076 bp, Homo Sapiens
  misc_feature (34)..(34): n is a, c, g, or t
caccagggccttttgctccgggagcttccttcanaacccttccttcaaggtgcccacttggggatgcagaattgcagcggagctaggacccccttcaacggcctggaccttcggctgcaagtaaagttacgtgaggcctgtctctcggggcctggaagtggcagccatcagttgctcttgctgacccctcggagcaagcgccgcacaggtggtggctgagacagctggcgcggggggccccaagctgcgccggcctccagcccacccacagctgttgctgaagtcaggccaacctccccagcactggtatctgagtaacggctaagaacctccttcctctggttttgaaaagcagttcgggttgtccaattctgtaacattcatctccattttttaaaaaggtttctctgaacgccccacgcccgagccgcggtgagcgtcgtgttgcatgagcctgggccccgggcttcccgtgcgcctctgccgcaggtgcttctgggcacccatcctctgcgtttcatttgcagtcgactgtacagaaggcactcaccacaataaacctttcctgaaagcagaggctggcgctcttccgtgtattgtgtgttcatcttcaggagggagggaaccccttccccagaggcctcctccccatccttcactcctcactcaaccacaaggcttcacgtgaagctggggttccattttctacattaaacaacattgcctgttatacatggacaccgctattttggggtcactgatggtcttcaagtgcagtgtccatgtttctcccaggactgtcctctccggcccccgcctcagggaggaccttttctttctgacaagagctggcatttcctctctcactggcagggtctgtgttctccctcacctgctgtgtggggtcctgaaaggcgaacaccgtgggcacggcattgtgctttaggttcttgcggtttccaaaggcgctgaagcactctaaccggaagtgctcggagcagatgaccgtgtgctgcttgggcatggagttgccccggcgcgatgttcagcacccattccttcagcagctccgggcg

SEQ ID NO: 264441 - DNA, 652 bp, Homo Sapiens
atgagagtgcgctgcatgcgggggagaaggcacctcgggcccagctggacttgcagcatcccctaggaccgtgttgttacctgcaagctgttccctgatgagcggagcctgatcacagggggtgcgtcccaggccgagaatctctgggacttggcacccaccccccaggtcagggcacagctgacctctgacgggccccacgtgctattctctggctgtctcctctgatgcaccatatctgtttggcttgtttccacggatgtgttgagatttgggatttgcagaaccaaatcttgatcaggaagcacgaagttcctgtatacgagacccgatatgtggacatcaccggcaatatattctggacaggaggtgaagacaccatcctgtattaatgggacctgaggagctaccagaggctgcaccaacacaacttacagaatgagatcctcagcattacccacgaccccggtgaagaatggatattggcgggcctgagaacgagtgatatcgtgttccttcacactcgtcggaatgagcagtttaaggctctcatgaaaaaatacaaccgccaccacagcctcaagtttgcctcctgtgggagctagtttgtgacccccatagatacgcgcctcagtggcttggaggcaccttc

SEQ ID NO: 264442 - DNA, 671 bp, Homo Sapiens
ttggtgaaagagatgcatacagggtaggcgtctcacatcttctccatcttccagcatacacagacaaattgtgcatttctcatctgtgtctgactcctccccctcatccttcttgcccttgccatcctggggtcttcgcttcttatacttgtgggggaaggtgaacctctcaatggtgttctgtacagctccccgagtcacattacccaacctgtcctcgagctgcagcagctcctcatagctctcccgtacggcggaggtgtgtctgctgggatttagtccctggagagcaaggaagtgaagctgagggtaagggtagtttcggatttcatggacgaccatctgtgtggaggaggagtttctgggaaagtggtgcattcgaggagtggctaggtaatgctgatagtgctgagggatgggccgcacctggaactgagcaggactcaagccagcatccacactgagatcccagtcagtgccctcagccaaatacctgggctgaggtgtctgcagttggccgaagtcgaagctgggatggaggcggagggggtggacagatacacgctcctgactccgcctggggtaagagaccagcctgcggtgctgggcttccaggagctgctgctgcaggaggtattgctggtgcagggcctgaggtatgaaggagggac

SEQ ID NO: 264443 - DNA, 1193 bp, Homo Sapiens
ggcgccggggcctagcgctatgcctgcggcggagactgcatcaggctctcgcgtctgcttctgcgctttgcctgggagaggccctggtggcctcgttcctggcgcccggagtccctgctgcggccccacccccgggcggtcacggtgacccatgctgcccagcctggaggtaaaatcgttcgtggctgtggcttcagcatgtcgtcctcggtgaaaaccccagcactggaagagctggttcctggctccgaagagaagccgaaaggcaggtcgcctctcagctggggctctctgtttggtcaccgaagtgagaagattgtttttgccaagagcgacggcggcacagatgagaacgtactgaccgtcaccatcacggagaccacggtcatcgagtcagacttgggtgtgtggagctcgcgagcgctgctctacctcacgctgtggttcttcttcagcttctgcacgctcttcctcaacaagtacatcctgtccctgctgggaggcgagcccagcatgctaggtgcggtgcagatgctgtccaccacggttatcgggtgtgtgaaaaccctcgttccttgctgtttatatcagcacaaggcccggctttcctacccacccaacttccttatgacgatgctgtttgtgggtctgatgaggtttgcaactgtggttttgggtttggtcagcctgaaaaatgtggcggtttcgtttgctgagacggtgaagagctccgcccccatcttcacggtgatcatgtctcggatgattctgggggagtacacagggctgctggtcaacctctccctcatcccagtcatgggcgggctggcgctgtgcacggccactgagatcagcttcaatgtcctggggttctcggccgcactgtccaccaacatcatggactgtttgcaaaatgttttttcaaaaaagctgctcagcggggacaaatacaggttctcggccccggagctgcagttctacaccagcgccgctgcggtggccatgctcgtcccggcccgggttttctttacggacgtcccagtgatcgggaggagcgggaagagaatcagctacaaccaggacgtggtgctgctgcttctgacagaaaggagtcctgttccaccttcagagcatcacggcgtacgccctcatggggaaaatctccccggtgactttcagcgtcgccagcaccg

SEQ ID NO: 264444 - DNA, 627 bp, Homo Sapiens
ccccgagatcagaaacgtgaatggggtggaccgcctctgtgtcctgcatgtggaggaggccatggtgttcttccgggagctggggtgcggccctgtgctccaggccccccgccgggacgtgggagtcgtcaggaagttcctggcctgcaggggtaccgagcctgtctctgggagtgcagccttggctcatggtgccagagcccgtgcccccacgcatgggtggtggtcgcgctgtgctccaacggcactttccgggagctccggctggtgaagggccgcagtccctgcgcgggactccccgagatcagaaacgtgaatggggtggaccgcctctgtgtcctgcatgtggaggaggccatggtgttctgccgggagctggggtgcggccctgtgctccaggccccccgccgggacgtgggcgtcgtcaggaagtacctggcctgcaggggtaccgagcccaccatccgcagctgcagactggacaacaacttccgcagaggctgcgacctgcggctggacgcagaggtggtctgctcagggctggggaaggcccaagtatggagcggagatcaggtctgcgttgagctccaggagctggcgtccggggcacaccgctgtgccaccctc

SEQ ID NO: 264445 - DNA, 639 bp, Homo Sapiens
agcagctggaccatgttcctcattaacatctgtctgtccgcttagtcatcacatcatttcactgtggtggcagggactcagctcggaattctgtatagaaaaagcacctggatcccagtctttcaatggcttcaagacaaccagaagtgcctgctcttgaggctagtgcgcctctaggcaagatgtccctgcccatcgggatataccgccgggcagtaagctatgatgataccctcgaggaccctgcgcccatgactcctcctccatcggacatgggcagcgtcccttggaagccagtgattccagagcgcaagtatcagcacctcgccaaggtggaggaaggagaggccagtctaccctcccctgccatgaccctgtcatcagccattgacagtgtggacaaggtcccagtggtgaaggctaaagctacccatgtcatcatgaattctctgatcacaaaacagacccaggaaagcattcagcattttgagcgacaggcagggctgagagatgctggctacacaccccacaagggcctcaccaccgagaagaccaagtaccttcgagtggccgaagcactccacaaactaaagttacagagtggagaggtaacaaaagaagagaggcagcctgcatcag

SEQ ID NO: 264446 - DNA, 562 bp, Homo Sapiens
cgtcgctcagggctggctttgaaggaattgctccaagtcttctcacacaggtcagctggggtggggaaataatgggagaaagggaggcactgggcccctttggggcagcggttcttcccctgactccagtcccagccaccacgccagttggatttgcatgtgtaagacatgcgacagtcttcccaccactcctcacagtcctcctggcacagcggcacattcacaactcgctctccctgcccactcggggccacctcccaccccaggcttcccactggctggatccagggccccaggtttggggagcactcatagaagcagatagcctggatgaagtgcttccgacagccaggcatcaccagtacacagtgaaacaggctgaagttgtagagtggggatacatacagatgggcttcccagcttgtcgtgagggtgcagcaggcattgtccttccaggggatgcactcctcatagagcttgtcttctgggctgcgcactctcttgtgagaatcggcaagtgtctcctcatagagcttgtcttctgggctgggcactctcttgt

SEQ ID NO: 264447 - DNA, 395 bp, Homo Sapiens
cagcaacatctgaactggcttgagatgtttgcacagcgcttacatctgctgcatccaccagtttaatgtgttccttcgaattttctgggttaccaaacctccattcctgacatagttttgctcctggatgggtacgcgcgggggctctcaggcgctctggtgcagccgcggcgcttctgggagtggagcgcctctgcaggggaaagctcggcgcagggggcaggcgcctggccgctgccgcaggctcgggctgccgagcgactgagcgaaaacgtgttccccaggaagaaacccgccacagtggacggcaacaggaaggcttaaagtcggaagtggcactggagagtttctacctcgccccaaactcggagccatcagctcccaccgttctgttt

SEQ ID NO: 264448 - DNA, 327 bp, Homo Sapiens
ggcctcaagcggcagcatgaaggctaagaggtgctcaagttcgaagacgtggtcaccaacctcggaaaccaatacgaccccaccaccggcaagttcacctgctccatcccgggcatctacttcttcacctaccacgtcctgatgcgcggaggggacggcaccagcatgtgggctgatctctgcaaaaacaaccaggtgcgtgctagtgcaattgcccatgatgctgatcagaattacgactatgccagtaacagtgtggttcttcatttggagccgggagatgaagtctatatcaaattagatggcgggaaagcccatggaggaaaa

SEQ ID NO: 264449 - DNA, 294 bp, Homo Sapiens
acctggatggtggtctgtccgggaaggttgggcgggccctgggcggcgccgggcagacccccggccttgctgcgcgtggcgcggatgatggagaagtgttcggccgccgacaggatctcacgcttggccatctccacgtcctccttccggccggtcacgatgaagaccggctcctcgccccgcactggggtcttgatgtagatggttgtcttggcccgcagggccttgatcttgcagccctggcgacccacgatctcggcgacgtgctcggagctgggcaccgggacgcactcg

SEQ ID NO: 264450 - DNA, 322 bp, Homo Sapiens
taaagctccccacagcccccaggaagaggctctaaagctccccacagcccccaggaagaggccatccattgtgagggctgtgctgaagccttcttgggacatctcgtgctggaaggagctgcttgccctggactgggttccctcaactgcatagatcttctcctgcagctgcttctggatgctaccaagggctgcaaagttgtccaccttgaacacgtggtccaacggaggcgctgagctgatggtattcagctcctgcctggcagtgggtccctggaaagcgtgtcccaccccgatagcgtagcggatgatgccagccttc

SEQ ID NO: 264451 - DNA, 718 bp, Homo Sapiens
tgagggcgatgccgatggagagcttgcggctcatgcccccgctcaggaagcggctccgtgagttccacttgtcctccaggcctatgatgtgcagcacctgcttgacttcagggcacttctgacgtgacaggcccttcagctgaccatagaaagaaagatgttctgctactgttaacttatcagataagacatcatgttggggcaccagcccaggctcttcctaatgtgaaatatctcttgtgaaatttcatatccattgacatatgcacatccacttgtagggggaataagacctctgtgcagaagagaatggtcatgaaagaaacagcaatgaagacagaaatgaagaacgtgatgaaccaagcaacccagtgtaaccagctttccagtcccatcacgcacaggtaatccttcagtcttttctctttctccagtacaatggaactgatgatgatgagctcaatgtacatgaagctgagtatgaagaacacagaaaactcattctgaaggactaggaagaacctgtcctcgatatagggtccatatgggaatctcttcacaagtacattgagattctcaaacatgttggtcattgcattgtgagcatggtaccacatgatggctttatccaaagcatactgtatggccaggaagccttctttgttgtatccaggactccccccaacagcaaatggaaattcccggggttcttggcgtg

SEQ ID NO: 264452 - DNA, 272 bp, Homo Sapiens
gtcgcgaagaggagcagcctcctccgccagcagggctggggtgcggggcgcgcggggaaacccggccgcggccccctagagcacggccagcagtggaacaaatttttatattgtgagccacataagagaattaaggaagtactggaagaagaacgtcatattaagagagatgaatgccacattaaaaatccagctgcagtggccgtggaagggatttggagcattaaaaggaatctgcctgtgggaggcttgaagccaggactgccgagcag

SEQ ID NO: 264453 - DNA, 698 bp, Homo Sapiens
tctgtcgtgagtgcacaatgggccggcatgggggccacagcttcatctacctccaggaggcactgcaggactcacgggcactcaccatccagctgctgccagatgcccagcagggacgacaggcaatccagctgagcatcgagcaggcccagacggtggcggaacaggtggagatgaaggcgaaggttgtgcagtcggagatcaaagccgtgactgcgaggcataagaaagccctggaggaacgcgagtgtgagctgctgtggaaggtagaaaagatccgccaggtgaaagccaagtctctgtacctgcaggtggagaagctgcggcaaacacgtggtgacgcagcggcaagagaggctggaggatgaggaggagaggaacgcggagctcagctgccaggaagcgcaagctggaagacgactgctcagagctcgagacggacattgatgacctggagctgacactggccgaggcggagaaggagaggcatgcagcacagaacaaggtgaagaacctagcagaggagatggctgggctggatgaagtcatctctaagctgaccaaggagaagaaagctctacgagaggcccatcagcaggccctggatgaccttcaggttgaggaagacgaggtccacagcctgtccgagtctagggtcaagctggagcagcaggtgtatgatctggagggatccctag

SEQ ID NO: 264454 - DNA, 542 bp, Homo Sapiens
agagctgtggcaaccgggactcctctgtgggctcagtgacaggttccggtattctgaggatgacgtggccacttacatggtgcagctgctacaaggcctggactacctccacggccaccacgtgctccacctagacatcaagccagacaacctgctgctggcccctgacaatgccctcaagattgtggactttggcagtgcccagccctacaacccccaggcccttaggccccttggccaccgcacgggcacgctggagttcatggctccggagatggtgaagggagaacccatcggctctgccacggacatctggggagcgggtgtgctcacttacattatgctcagtggacgctccccgttctatgagccagacccccaggaaacggaggctcggattgtggggggccgctttgatgccttccagctgtaccccaatacatcccagagcgccaccctcttcttgcgaaaggttctctctgtacatccctggagccggccctccctgcaggactgcctggcccacccatggttgcaggacg

SEQ ID NO: 264455 - DNA, 708 bp, Homo Sapiens
tgcctcgagcccccctgtacgaagtggacactctcatcttttgctcagtagcactatgctcctttcctcttgaaaccaaaagccaaggttgtggtgatcttcctttttctgggcttgctgggggtcagcctttatggcaccacccgagtgagagacgggctggaccttacggacattgtacctcgggaaaccagagaatatgactttattgctgcacaattcaaatacttttctttctacaacatgtatatagtcacccagaaagcagactacccgaatatccagcacttactttacgacctacacaggagtttcagtaacgtgaagtatgtcatgttggaagaaaacaaacagcttcccaaaatgtggctgcactacttcagagactggcttcagggacttcaggatgcatttgacagtgactgggaaaccgggaaaatcatgccaaacaattacaagaatggatcagacgatggagtccttgcctacaaactcctggtgcaaaccggcagccgcgataagcccatcgacatcagccagttgactaaacagcgtctggtggatgcagatggcatcattaatcccagcgctttctacatctacctgacggcttgggtcagcaacgaccccgtcgcgtatgctgcctcccaggccaacatccggccacaccgaccagaatgtgtccacgacaaagccgactacatgcct

SEQ ID NO: 264456 - DNA, 905 bp, Homo Sapiens
  misc_feature (30)..(30): n is a, c, g, or t
  misc_feature (33)..(33): n is a, c, g, or t
  misc_feature (68)..(68): n is a, c, g, or t
ggctgggaacgcctccacaaaacttcactnttncctttgacactggctcctccaatctctgggtcccntccaggagatgccacttcttcagtgtgccctgctggttccaccaccgcttcaatcccaatgcctccagctccttcaagcccagtgggaccaagtttgccattcagtatggaactgggcgggtagatggaatcctgagtgaggacaagctgactattggtggaatcaagggtgcatccgtgattttcggggaagctctgtgggaatccagcctggtcttcactgtttcccgccccgatgggatattgggcctcggttttcccattctgtctgtggaaggagttcggcccccgctggatgtactggtggagcaggggctattggataagcctgtcttctccttttacttcaacagggaccctgaagtggctgatggaggagagctggtcctggggggctcagacccggcacactacatcccacccctcaccttcgtgccagtcacagtccccgcctactggcagatccacatggagcgtgtgaaggtgggctcacggctgactctctgtgcccagggctgtgctgccatcctggatacaggcacacctgtcatcgtaggacccactgaggagatccgggccctgcatgcagccattgggggaatccccttgctggctggggagtacatcatccggtgctcagaaatcccaaagctccccgcagtctcactcctcattgggggggtctggtttaatctcacggcccaggattacgtcatccagtttgctcagggtgacgtccgcctctgcttgtccggcttccgggcctgggacatcgcttcgcctccagtacctgtgtggatccgcgacgacgttttcttgatggcgtatgtgactgtt

SEQ ID NO: 264457 - DNA, 656 bp, Homo Sapiens
gcacgctagagatggaggccaaggcgaagaccccgaagagcgcgaaggctccggtggtcagcagtgccaggcctccgtagagcggggccggcgtggagagcagcacgttggagaggagccagaagcagaacgccacccatagcgtggccgaggcgtagtgtcccgccaggtggtactggtggtacaggccgcaagggctactcggtgtgaacttctccgccaggtagagcactgggtccggcagccccttctccagtgcgttcgcgtactccgcggcgtaattctctttcagacgccaggtgaactgctcgttgtagtcaatggtctcgttcagctgatgcactggggtccctgtgagtgtaatattaatgccctccaggcccacgagcagaccgacacgggctgtaacgcgcgctgcgctgaaggctttgtaggatgtgttggtgttcactgtacccacgaaccattctgcactgaagtgcacagccacaatttctgcgcctatgaacagactgagaagaactctcaccaaccaaaaccagcgcgagtggccacggatccccggcaagatgagcaggaagcttgctgctagagccaaaaacactagaataacgatgagcagtggaacgctgaagcctgcggcatgccggggctgg

SEQ ID NO: 264458 - DNA, 453 bp, Homo Sapiens
attaatccatcccctccaatgccctcaagtgcaaaggcctgtacaattggccatttctccaccacaaacatatcaaatatctgcaagtgaccttgggagctgtaaggaatgccaattctactacagtctcgaaccatgtccacaaagctggtaattttaaattcttctgcggcttcttcatcttcatactcattttcggtcatgcagtggaaatgcagatttctccaatgtgccacataaggtaagagatagcgaaagtttacaggattacagtacagatggacgctatccgatttaatcaatataattacatcatctagtacttcttcagaaaatcccgttttctcaaaatcactggtattctgattgtacaaaccaaatagaagaaattgcagctctctgcagcttcattgacctgctatcgattccaggatgaaggacccatccggccga

SEQ ID NO: 264459 - DNA, 748 bp, Homo Sapiens
tctgccgccgcagggccacgaagagcaccaccagggcaagcagggcacccacacaggtgatgatggcaagcagggcgccggtgctgagcccagcagctgagaggtgagcctcaggccagcaggatgccacagagccgtcaggctggcagcggcacacactaacagtcactgtggcagtgctgctcagcgccggctgcccccagtcccacagttctatgggaaccaagtagggggcatggcggggtggagcagggcgggagggcagcagcaggctggcggagccatctcggttgtcctggacagtaaagttggcatcagggcccagaggaccttgaaaggagacatggctactgttgccaacttcatctctgtccagggcccggatgacctgaatcagctggccaggagctgcagagtcacacacaaaagtatcgtagggctcagccagctggggagcattgtcattctcatccagggtctggatggccacttgcacgcgcgaggcctgtgcagaactgtcgagctctgtagccagcacagtgaggttgtgccaggcgcgagcctcgcgatccaggggtgctgctgtatggatggtgccttcctcgggctggatagagaagcaacgctccggatctgagtgggggaggatggagtatctgattgggctggcaggggagtccaggtcagccgcggagatctggcctaccagggtccccggggccttgttctcaggcactgtcaggtggta

SEQ ID NO: 264460 - DNA, 531 bp, Homo Sapiens
tctggacgtgagatgtaatcagagaataacactgtggaagaaatcgtgcctgtggcagaaccttgacgtgtggagcaaatgaccattagttcctggcttgcatctccagatcgtcttactggaatcaaaagttccccaatgtcctcttctattttgtattccgcctctggaatataaactgttgattcatctccagggtctacaatttcaaccgttgccatttctggaaactccagtacagccatgagaggttcagacagaatgatctggaaggtctctgaagtctcatattcattgtcaggtataattctcaccctccatgtggctgtagtctgtccaggattgaactggatctgtttattggtcttccatttgaaatctttgtctttttttgcagtttcatctttggtaccaatgctgataaatgatgtttctccaaggtatactctgcgtgtaagggtcacttctaagaatgtggaatcttcatccacaatgtagtactctttctccaaacaaatccaagcccagttt

SEQ ID NO: 264461 - DNA, 604 bp, Homo Sapiens
ccgtggatgaggatgcggggcaccagaggtctctggagagcaggcggcggcgcgctggggccgcggtacaggtagagcgccgcgccggcctccaggttggaaaccagactctgcgggtagaaataaggcgacgggaacatccgctggagcgctgagtaattgcctgcctccgccagcagctccaacccgacggccgtctgtcgcttccatttagtcctgcggctctggtaccaggtcttgacctgcgtgtcggtgaggttgagcgaggcggcgagctccatgcggtcctgcacgctcaggtacttctgccgctcgaagctgcgctccagctgcgccagctgatggtcggtgaaggccgtgcgcgccttgcgtggctttttcaggcgcaccgggggactgtccctggagctggagatctcgcggtcgccctcctccttcactttatactcagagtccgatgaggcgttgctgccacttttgtccagcttgtctctaaagtcctccgcggccttaaaagcaaggcggcccccaggctcaggggctgccggctgcccgctgctagagtagggtgcacaggccgcgagtggtttgcagtcggcaagga

SEQ ID NO: 264462 - DNA, 596 bp, Homo Sapiens
ctcgtgagagttggtgccatgagccactctggttttgcaaatgaatggttgagcgtcgccatagccttccttctgtttctctcggaacagtttatagcaggcactggggctggccaggagcagcaggaagccctttttgtcctcattcttgtcatctgtggggatgaagcacatgaactcatccacgtggccagtcattagtcaatttgagtagagctccaccggcgcttggacctgctgggcataagaggaagtctcggagggtcttactcatggcccgcccctctgcgctggggtaaaagctgctgccaatgaggactctgcccagcgggtactctttcccttgaaccttgacaggtggggacaccatcaggttcccaatggaatccatgctggccactttatggtcctcagcgtcctggatcatgtagcctataccagggctcagtgagtacttcatgaggaactcatcgagatcggcggcctgaggtgtgtcgagaatcaaggacgttgtcttgtggggagctgggtgtagcagagatgaggcctctggaccacgggtaggactcccaccacgaacaccttgtacaggacgg

SEQ ID NO: 264463 - DNA, 618 bp, Homo Sapiens
ctcaggagcgagcagccagggtgaggtgtgagctgtgcccacacaaagacggggcattgaagaggactgataatggaggctgggcacacgtggtgtgtgccctctacatccccgaggtgcaatttgccaacgtgctcaccatggagcccatcgtgctgcagtacgtgcctcatgatcgcttcaacaagacctgttacatctgcgaggagcagggccgggagagcaaggcggcctcgggagcctgcatgacctgtaaccgccatggatgtcgacaagctttccacgtcacctgtgcccaaatggcaggcttgctgtgtgaggaagaagtgctggaggtggacaacgtcaagtactgcggctactgcaaataccacttcagcaagatgaagacatcccggcacagcagcgggggaggcggaggaggcgctggaggaggaggtggcagcatggggggaggtggcagtggtttcatctctgggaggagaagccggtcagcctcaccatccacgcagcaggagaagcaccccacccaccacgagaggggccagaagaagagtcgaaaggacaaagaacgccttaagcagaagcacaagaagcggcctgagtcgccccccagca

SEQ ID NO: 264464 - DNA, 592 bp, Homo Sapiens
agcaatggttcgctgcaacaacgaagccaaggacgtgagctccatcatcgttgcatttggctatcccttcaggttgcaccggatccaatatgagatgcccctctgcgatgaagagtccagctccaagaccatgcacctcatgggggacttctctgcacccgccgagttcttcgtgacccttggcatcttttccttcttctataccatggctgccctagttatctacctgcgcttccacaacctctacacagagaacaaacgcttcccgctggtggacttctgtgtgactgtctccttcaccttcttctggctggtagctgcagctgcctggggcaagggcctgaccgatgtcaagggggccacacgaccatccagcttgacagcagccatgtcagtgtgccatggagaggaagcagtgtgcagtgccggggccacgccctctatgggcctggccaacatctccgtgctctttggctttatcaacttcttcctgtgggccgggaactgttggtttgtgttcaaggagaccccgtggcatggacagggccagggccaggaccaggaccaggaccaggaccagggccagggtccc

SEQ ID NO: 264465 - DNA, 392 bp, Homo Sapiens
  misc_feature (66)..(124): n is a, c, g, or t
gtccacgtgcaatgtctgcagcgcgcgcccgtccgccgccacggcagccaacgtgcggttggtgannnnnnnnnnnnnnnnnnnnnnnnnnnnnnnnnnnnnnnnnnnnnnnnnnnnnnnnnnngccaggcagtcgtcggtaacgtggccgcagcccgagagcgtgacggacgccaggttggggcacctgtcgcacacccggaggaggaaatcattgaccaggctctcgtgccggctgcagatgcttctctggaaggcactcttgagccagtcctcaatgctgcacacctgcacgaagcgggagtgccagcagatggagaggctgcggagtgccgggcccaggaggaagttgtccttctggagttcagtgagggaacggaagtgcagcaggg

SEQ ID NO: 264466 - DNA, 1067 bp, Homo Sapiens
gaactacaacattggcaaatgcctgttgacctttcccacgttcggaacagctggagattagtgggattatccatatgaacaatgtgttctatgtgacaggatggagtaagagaatcactcatttcctgttccacaagaccaagccagtgctcttgtgctaccactggcagacctaccacacggaggacatcctgagcatggccaagtaccggaaccagttccttgggacctcctcctacagtggggacatcctcttctggaacaccggcacactcaagcccatcttcaacttcaatgcctctaggagccccttgcccttgcagcccaagagggtgcaagatgtgaacaactgcctggctgagagccacaggcccagcagaccctatgtggagcgggagaagtggacatacaagacctccaggaagctctccagtctcagccccgagtctgtggccaataccaacctgaggcggagcctggtgtcggctcccccagtgatgcggtgcccgagagacaaggagccagacaggcctgtgccccagcagaaaccttccagtgcttctggcacatccaggcagtcaagcaagatccacagcaaacagtccatttacaaagaggatgaaacgagaaaaggagaatggcagaagaatatgttggttcaatccagtgcctcggtggagaagataatcttcctgcagaccaggcctcgcctgccgcacacggctgccctgctgagcagctgcatggacggctacatctacgcctggtccctccatgagaatggaggcctgctggggaagttccctgtggacctagacaatggggatgttgtcgtgggtgccatggccactgataaaaatgactggatcctcatcacgggggattgtaaaggatacatcaagatctgggacatcaaggattactgcgcattgattgataaacagccattccaatccagtggggccaaggttgtctctgaagcacacaacaagttccggttgttaattcctcaacgacttgggaccaacttcccacactaccattcccttggaggataaagaggttgt

SEQ ID NO: 264467 - DNA, 385 bp, Homo Sapiens
tcccagcatgcttgagatcaccattcagaatgctaaggcttacctgctgaagactagcagcaattcgggctttaatctatatgatcatctttctaatatgcttgaccaagatattaaatgagcgtcctgaaaatgctgttgacatctttgaaaatattagccaagatgtgaagatggcacattttagtaaaaaatttgatgcactacaaaatgagaatgagttgcttccaacatatgaaatagcagaaaagcaaaaggctctttttctccagggacatttgaaaggagttgaccaagaattggaagatgaaatagcagaaaacgctcttccaaatgtaatggagtcagctttttattttgaacaagctggagttggtttgggcac

SEQ ID NO: 264468 - DNA, 382 bp, Homo Sapiens
gcggagtccacgcaggaagggcggccaggcagggccaggcaactcgtggccgagtgtgcgggtgaggtgggctatgtagctggcggcgagcaccagcacgtccaacttggagagcttggtgtcgggcggcacggcaggcagagcagcctgcaaggccaagaaggcctggcgcagcgtcctgacccggctccgctcccgcgcggcattctcaggactggcctcgctcctgccaagagccaggcccccagcccgggtccctcgagggccaggggtagctctgctccatctctggttgctccagcttctttcttcccacgggtcctgccttgtcctgctgaggcggctcctcttcctgtcagcgcctggcagcaaccgtgctttg

SEQ ID NO: 264469 - DNA, 665 bp, Homo Sapiens
  misc_feature (606)..(614): n is a, c, g, or t
gggcgccttttacgagtgcgcggccaccgggagcgcggccttcgcgcagcgcctgtgcctcggccgcaaccgcagctgcgccgcggagctgccgctggtgccgtgcaaccaggccaaggcgtcggacgtgcaggacctcctgaaggatctgaaggctcagtcgcaggtgttgggctggatcttgatagcagttgttatcatcattcttctgatttttacatctgtcacccgatgcctatctccagttagttttctgcagctgaaattctggaaaatctatttggaacaggagcagcagatccttaaaagtaaagccacagagcatgcaactgaattggcaaaagagaatattaaatgtttctttgagggctcgcatccaaaagaatataacactccaagcatgaaagagtggcagcaaatttcatcactgtatactttcaatccgaagggccagtactacagcatgttgcacaaatatgtcaacagaaaagagaagactcacagtatcaggtctactgaaggagatacggtgattactgttcttggctttgtagattcatctggtataaacagcactcctgagttatgaccttttgaatgagtagnnnnnnnnnttgttttgaattattgctttattaaaaaataaacattggtattttttgagt

SEQ ID NO: 264470 - DNA, 677 bp, Homo Sapiens
  misc_feature (492)..(492): n is a, c, g, or t
gttgtcggcttgcagtacccagctccaaagaccaagttttccagagaaatgatagactgttcttgtccggtgtctgggccacctttaccaagccaggagcctcttcctggacgagtaaaactgatcaatggctgctgcagagccaccagggcagcatggacggtcaccgagatcacagacaggtggaaatagtcgaacatgaccgggacctggtggtgcagaccattccgggggtggaagtgcaggccaagcgttcggctgctgaccatcggtgccccagccacatccctcaactgctgttcactgtccgtaaagtgcagatccaccttgagttgaaaatctacttcactcagtgcgtcttccatcctttcaccacccaagagtaaaggaactcggaagaccacagcatcatttatgggtacctcttcattccggtataagatctgaaagacccggctgtgcacggtgctgtcatggacacaggcagcacanattaggaatagatgtgtgattattcaaatttatcatatttgagtttatgatcatcttcctctatctctacctgtttgattttcatcaattgatataccagtaatgttcacttatactcgtattcttttttaaatctcttctgttttatatcttttctaatggatggtttgtcatattgtggatac

SEQ ID NO: 264471 - DNA, 627 bp, Homo Sapiens
gacaaaaggccactcctttcctcgtgcgggcacctggctggctggtgagccctcctccctgcccacagcctgcccccacggggactttccccagcgctaatctatgcacaacgagacttggcccgtccgtgccctggctctcttttaggccctcagcatcctctcctccagatgcccaagagagctgctccatgcgctgtggcgccctggacgggccatgttcctgccacccgacgtgctctggccttggcacctgctgcttggatttccgggacttctgcctggagatattgccctactcaggatccatgatgggcggcaaggactttgtggtgcggcacttcaagatgtccagccccacagacgccagtgtgatctgcaggtttaaggacagcatccagaccctcggccatgtggactcctccgggcaagtgcactgtgtgtcacctctgctctatgagagcggccgcatccccttcactgagtcactggacaacggccactccttccctcgtgcgggcacctggctggctgtgcaccccaacaaagtgtcaatgatggagaagagcgagttggtgaacgagacgcgttggcaatactacggcaccgccaacacctcaggcaaca

SEQ ID NO: 264472 - DNA, 458 bp, Homo Sapiens
atcaagcggttaccccctggggctcggctctgctggggatcctgcttaggccggagacatctgcagcaacaggctgccaccagggaccccaagatgataaaggcgacaaacacggagccaacaatgaggaacggcacgtagatgggcactgccgagccgtcggggccgtctttgtccgcccggccaggctcgccagcgccctgctggcggtcattgtcgcagccgccctggtccaggcgcgcctcggcgctggagcagcagtagcgcaacgcgcagctgccgcagcagatggtggcgtcgccgccgtcgaagcgctcgggacactggaagccgatgcgccagacgccctgcgcgtccagccagcagtggcagtactcgccgctggccctcgcccccgccgccagcagcgcagccaacagcagctgcaggagcgaagcggcgttccaggatgaggagac

SEQ ID NO: 264473 - DNA, 502 bp, Homo Sapiens
atcgggtggaggggcaggtgctctctcctccgcaccgcacagactgggacgggcctcagacactcatggattatcaccttctgcaaagaaaacaccagtgccctggaggctgccttctcttgcttcagattcacagagactaaaaactcccaacatctatagtgacgaagttcttcggggaacaaaactgccgactggcgtggaccacatggcttccccactggttcaaacgtcacggagcaggttccccccgctagtcacggagaccagggggcagaatacagcagttcctggatgccgccttgtttcttacagaggaaggcatctacaaaaccgtgtgttgagtgccatgcctgacggtacagaacgatcgcgtcttcgagaaagaacagccaccctggaacgattgtcaaggcccagcacaacccacacgttccggcagtcggatacgcctcgaaaaagttcattgacacaaatggaatttgctgctcacacatggaca

SEQ ID NO: 264474 - DNA, 833 bp, Homo Sapiens
aatttgcaccggctccagattctatgcaactcagctgaaaatgagcttcgatatgaacgagggcagaacttggacttaaagcaacataatagcttacttcaggaagaaaacattaagataaagattgaactaaagcatgcccaacagaagttattagacagcacaaagatgtgctcttcactcacggcagagtacaagcactgtcagcagaaaatcaaggaactggagttggaagtacttaaacacactcagagcattaaatcacagaacaacctacaggaaaagctggttcaggagaaatctaaagttgctgatgcagaggaaaagattttggacctgcagcggaaattagaacatgctcataaagtctgtctcacagacacttgtatttcagagaagcagcagctagaggaaaagataaaagaagcaacacaaaatgaagctaaagtaaagcaacaatatcaagaagaacaacagaagaggaaacttctatatcagaacgtagatgagttacacaggcaagtgagaaccttacaagataaagaaaatctactggaaatgacctgttctcagcaacaatccagaattcagcaacaagaggccctacttaaacaactggaaaatgaaaaaagaaaatatgatgagcatgtcaaaagcaaccaggaattgtcagagaagctatctaagctacagcaagagaaggaagctctacgtgaagaatatttgcgattattgaagctgcttaatgtccatgtgagaaactataatgagaaacatcaccaacaaaaagtcaagcttcaaaaagtcaagtatcgtttaactaatgaagtaga

SEQ ID NO: 264475 - DNA, 511 bp, Homo Sapiens
tctgttcccttgtggtcaccgtagttactgtttccattacagttgtctgtgttagtgatggctgagtggtggtgacagcctgtgaaatctgtgctgtactcttttcaagtttttggactaaattatcccaacaccgggcaaagttatccagccatgcttccgtcttctgggtcactgacttattcttcagtgttgaaagaagatcttgtttgagtgaatacagtttgcccatggattgctttttcttttctagatccgcttttaaaacggccagtttttgaagacttgataacatttcattttgatctttaaagccagttgtgtgaatcttgttcactgcatcttctttttctgaaagccatgcactaaaaaggcactgttcttcagtaagacgttgccatttgagaaggatgtcttgtaaaagaacccagcggtcttctgtccatctacagatgtttgcccatcgatctcccaataccttaagttgttcttccaaagcagcagttgcgtg

SEQ ID NO: 264476 - DNA, 372 bp, Homo Sapiens
tgcgcctgctctacacgctggctgtcaactcgcaccccatcctcctacagatcttccctggggctgagggatgcacgctgcccaagtacctgggctcctgtggcagattcctcgtcagcaccagcaccagaccgctgcaggaattctatgatgcacccccagatcaggcagccgaccttgcctaccagctcctgggtgtcctggagtctttgaggagcaacgatttgaactatttcttctacttcacccacattgatgcaggcatgttcggcgtctttaacaacgggcatctgtacatccgggatgccagtgcagtgggcgtcatcgacaagcaggaaggcagccaagaagccaacagggcaggagagaaaa

SEQ ID NO: 264477 - DNA, 444 bp, Homo Sapiens
gccgtggaggcctggtaccggcccagctgcctcctggggagagacaaggtcaaggagcccagggcaggcagctgtgagaccagcttcacagaggacagggagccccaggaggggcctccagagcagcccacaggacctggccaagctgcagagaatgtcaccatccagactgtgtcctatggggtacaagaggagctgcgggaccaggaggatgaccaggaggaagaggagagcgatgccacttcaacggagagtgaaagtgaagacaacttcctcacgctgcctcccagggaccacctgggacttactctcttctccatgctctgctgcttctggccactgggcattgctgccttctacttctcccaggggaccagcaaggccatctccaaaggggacttccgcctggccagcaccacctcccgccgggccctcttcctagcc

SEQ ID NO: 264478 - DNA, 949 bp, Homo Sapiens
  misc_feature (768)..(768): n is a, c, g, or t
  misc_feature (809)..(826): n is a, c, g, or t
tagaacaagtgcagggttggagggtccacattctttgtagatatgttgttctggacatctttgtgtttcacaaaccacatcggagtcgcttcgccaggattcaaaggtgccaggaccatctgaggcacagaggcgggacagttctgaataagtgtcacatgtagatgttttgtctctagtttggcagtattcatcaatgcagatcattttttcggtgcaagaccactttgcatcttggcatgtgcactgagaaccacaaggaccttctcggacttctcctggctgatacactgttccactggattcacaccgaaattcagcttataatacacattttcctttctctccaatgtcatccaacagataaccttctgggcaggtgcagccgctcacacattcactgtcttgaaaaggagccacattagaacaagttgcagggttggagggtccacattctttgtagatatgttgttctggacatctttgtgtttcacaaaccacatcggagtcgcttcgccaggattcaaaggtgccaggaccatctgaggcacagaggcgggacagttctgaataagtgtcacatgtagatgttttgtctctagtttggcagtattcatcaaagcagatcattttgtagtcattggatagagcagcaaccttaaaacatttctcaaagtaggttccaataattttgttacagtgctgtattccatcttcacaaacttcatagcttttaccaacagcattgggacaatcaccaggaaaaantaatgggcaataaggaatcgtttaaaggataaatacagaannnnnnnnnnnnnnnnnngcattatatcctgtagctttgacaaggaaagtgcttggatgcttgttgaaatagaggtttttgaagtattatggttggtaacatgactcctaaatgaatactgttggattcttggcattttgg

SEQ ID NO: 264479 - DNA, 464 bp, Homo Sapiens
agtgggtgagggaagaggcccaggttggaggcgccgcaggtggcaacgacgacacagtaggtggcccgccaggggatagcaacggcgtccctcctccccgctcagctgcagcccgcagtcctcacagtggtaacatgccacgtggtagtctctgtccatggacaccacacggatggttgtctcgcagccctgtgcagggaggataggacgggcacaggaggcgcattttggtgcaaaaaccgtgtgatagtctcgcacgcagtagatgttgttctccacgtccacggtgaagggaaccccgtccaggcactcattgcacacggagcaccggaagcagcctgggtggtaggacttgcccagggcctgcaggatcatttccatgatgagatgtccacacacgctgcatttgtcggccgtctgctggaacccggagtacaggaagtcctcctggcagtacactttct

SEQ ID NO: 264480 - DNA, 329 bp, Homo Sapiens
cagattcccatgagctcggcattctcctgtctggtcacctaaggtcttggctacatccaagtcctgctgcatatatccggtgctcttctctgtatttccaagagaccagtaagcactgctcagggcagagaaaacagaacctctcagtttgaggctgcaggtgccaatcttcagtgcggcttctaagacaaccacagaggccccatgatggccagctgtcaggagttcctgcccaaccacagacacgaccacaaagggactcttgtccagtttcattttctgaagctgctgataagtgggctcgagggagtctctcatgggagatttca

SEQ ID NO: 264481 - DNA, 349 bp, Homo Sapiens
ttctgggactcgttgatggcggtgctcacgccctgcagccaggacagcatctcctcctcatccttgccatggaagagccactcgctgccattactcagcctcagcttaaagacgtgcttcttcttcttgtagttggcagcaatctcacagatggcatgtctcagggccaggggttcctccccatggtagggcatccccagggccaggttcttggcatccttgtagaaggttagctcactgttcctgagcacacagtacaggttgttccaggacctgttggaagccttcttgttgggcccctccaggtcatgcttgcggcccaggtagccttccatctgcacactctgcc

SEQ ID NO: 264482 - DNA, 941 bp, Homo Sapiens
agcgccatggcgagcgtcacggtgacccacaggatggtcagcggcatccggacccacagccctgaggggtcggccagggcgctgggcccccatccccccaagcagctcctcctccagaagtcctgcatcactgacctccccaggaagagcacgatggggtagacagttacgatggagacagcaaaaaggacccgggccacaatgatgaccatatcattgcctgggtaggacatcaagacgtcagcagaaacttctgtcccaaaagtcaggaagccataaacccccgtcagtgaatacatgaggcagcaggccagcaaggacagcacagacaccagggcccagtgggagaggctccgtttgcgcatgctgcagtagatggagacggcagcttcgtgacactgaaacccgaagcagatggtggggaagacactgaacacagaggtccaggaggcagggctcagtgaaggatgggactcacgcacgaggccctggggccagaggtagtactgcacggtgatgaccagggccaggtaacaggcagccagagtgcctaggatgcttgtgtatttctggaaggcgatctcccgcggggcagacaggggcaggatgaccagcacggagagcaggggcagggtgaagcgctggtctgcgtaccacggctgcggggcgggcggggtgccagacaggagggagtcacacagcttctccagctggtccccgatcaccctgaggaaggccacggagatcatgagcaggttgaggaggaagcaggcctcacacagcttcccaatggcagggccacacagccccctgaccacaccctggtaggtggcctggccactgacagcagcagcatagcccaggatgaccagcccaccgatcaggaagaccaacgagaccagctccaccaggaaggcagggaccactccgcccgctttgga

SEQ ID NO: 264483 - DNA, 1140 bp, Homo Sapiens
  misc_feature (24)..(24): n is a, c, g, or t
agtttgaatgccagactctccccngtccatgatggcccaaatatcgaaaggggtggcaagatggcccacgtacagatcataggacatcaccacccggaggagacattctgtgacagcaaaagtggaaaacagaaaggtctgcatcatcggcccgcaaaggagatgggcttggctggatgcaggaggttcaccagcatccggggcaccgtgttgcaggcataggcgatgtcgacgaccgcccaggtgtgagaggaagaagtacatgggggcgtgcagtctggagtccagtgagatgagccccaggatggtcccattccccagcagggtgaagacatagaacagggagaagagcccaaagaggagcatctgaatccttgggccaacgggaaatcccagtaggaggaactctgtgatggatgttatattgtcccccatatcctgtaacactccagaaggtccaactcctctcttggcatggccaaggctgagatccaccgaagcttttcactttgagtctccgtgcggaagaggaactcggcctgggcgccctgagtgttctgccgcagaaagagtcggaacaggtttttgtgaggtccatgtagcttcatttcacacttttccccccgaatggaggagaagggagcatggtcaaataccaggaatcggctaccctctcggggccgagacagcagcagacagtcattgaagaggtgcaggtggactggacgcgtgttcagcttccttcgtagccctggggaagcactgaactccaaggctgtcagctccccacttttcaccagccagcgtgactgagaaatgagcgggaatattttgcactcaaactcaatcttctggctcaggtagattagctcctctgtccgtcgcatactctggacattgttattgcagtcccggatcagctgctccagggcgtggtgtgccttcgtggcctctgcctcctccgaggagccaggctgtgttctcttcagaatgttctggagcagcagtattgaggcgggtgatgcgttggaagggcagaatcagaaaggacttgagggaaaggcgctggcagacggggtcgctctccagcttctccaagacctcccggaaattgctgttgctattcatcaggctctggag

SEQ ID NO: 264484 - DNA, 424 bp, Homo Sapiens
ctcttccttggtgccatccagctgattagtgtggttgccacaggtatcacgaggaggagattcactgactccaaaaatgtctctgacatccctgatagattgcttatcctttttcctcatggtttgggtataggtatggtatctcttttgcacggcagctgcttgggttcgagtcaatgtggagagcaaggctttgccatcttcctcttcatcacctgagatcagagttgataaacccacatcttgcagccattctgcttcaagttctccttcatccacaggtgtgacctcagctggcggtggctcttcttgccctcccatgctgctgtctttaatactttctatttcccgccagaaatcctccatggaggcgctgtctacggaggcttctgagttggaacggctgaaggcaggaggatggaaa

SEQ ID NO: 264485 - DNA, 594 bp, Homo Sapiens
gctggtagtccccaagcggctgcgggcacaaaatccatgaataaaggtcatcctcggctggtcctaggggcacccatcggccgatggaccacagctcctggatctgtgggcacgaattggctggactctggcctgtgtcttcccaagtatctcgatagcacagaaagtagtaatccacaagggaatcttgtccccgaccaggggcctctggggtggcttccaggtgccagcgcatcttcttatagaggtagcgggggaagcggctggcagtgtaggcggttggggcacagtatctgaagatggagacctcatgggacaggctgatggagaacctcccgcaaaagaaacaggagatgctaagggggttcatctcctccaggtccacgaacccaaagaaagcgtacatgaggaccagctgttccaggcgcagggtcagctgttgggagatctctaacagcccctttcggaccagctcctgcaggggtccatagatggggagagaataaaggtcatcctcggctggacctaggggcacccatcggccgatggaccacagcttctggatctgtgggcacgaattggctggactctggc

SEQ ID NO: 264486 - DNA, 430 bp, Homo Sapiens
agtcggttggggcacagtatctgaagatggagacctcatgggacaggctgatggagaacctcccgcaaaagaaacaggagatgctaagggggttcatctcctccaggtccacgaacccaaaggaagcgtacatgaggaccagctgttccaggcgcagggtcagctgttgggagatctctaacagcccctttcggaccagctcctgcaggaggccatagatggggggtatgcttctcgcggctgcctccaggtacaggaagtagggctcacacatctgtaagaaggtgggcatggccttggccagctgctccttctgtacttggtctctgctgtagagcaagtagctctggaaatcatctaccttcttcagtaggtagcgcagctgttgggtgatggggctgaacaaagtgtccagggataggcggggagg

SEQ ID NO: 264487 - DNA, 618 bp, Homo Sapiens
tcctagctatgatgaccaaaactttcatgtctacgtttcaaaaaccaaagatggcccaactgaatatgtcctcaaaataagcaacaccaaggctagcaaaaatccagacctgattgaagtgcagaatcacatcatcatgtttctgaaagccgctggatttccaacagcctctgtgtgtcacactaaaggagacaacacagcttctctcgtgtctgtagatagtggctctgaaatcaaaagctacttggtgaggctgctgacttacctcccaggaagacccatcgctgagcttcccgtcagcccccagctattgtatgaaattggaaaactagctgccaaattggataagacactgcagagattccatcacccaaagttaagtagtcttcatcgggagaacttcatctggaatctgaaaaatgttcctcttctggagaaatacctgtatgccctgggccagaatcgaaaccgagagattgttgagcatgtcattcatctgttcaaggaggaagtaatgaccaaattaagtcattttcgagaatgacctagcaccgtgccaggcccctagaagacccagtaaagatctgttgaataaactgtaagaatgaacacaccgaa

SEQ ID NO: 264488 - DNA, 601 bp, Homo Sapiens
gctcgtgctccggctgccctggcgggtgccgggccagctggaccccagcactggccggcggttctcggagcacaaactctgcccggacgacgaatgcagcatgttaatgtaccgcggtgaggctcttgaagatttcacaggcccggattgtcgttttgtgaattttaaaaaaggtgatcctgtatatgtttactataaactggcaagaggatggcctgaagtttgggctggaagtgttggacgcacttttggatattttccaaaagatttaatccaggtagttcatgaatataccaaagaagagctacaagttccaacagatgagacggattttgtttgttttgatggaggaagagatgattttcataattataatgtagaagaacttttagggtttttggaactgtacaattctgcagctacagattctgagaaagctgtagaaaaaactttacaggatatggaaaaaaaccctgaattatctaaggaaagggaacctgaacctgaaccagtagaagccaactcagaggaaagtgatagtgtattctcagaaaacactgaggatcttcaggaacagtttacaactcagaagcaccactcc

SEQ ID NO: 264489 - DNA, 702 bp, Homo Sapiens
gcccagagtatctcttcagagagaagggagagacgacccaggagcttgagagttccatctcgatacagcctgtgatcagctctgttcccattctcacaggactcagctgagaagaagatgtaatctactgtcattccaagacccaatggcattgtagtgacctctgggcggccacgctggggcaggaagtgggtatatactgacgtcaggtggaggcagtgctggatggtacctacagtcctggagaaggcaggctcaagctccgatgcatcttcctcaaggacagactcagcccaacccgcaggtcgctctggcttagtatctgtcactccttccataaggaccagtcctactggtcgctgacaagcgatgctgcagaagcggaaacgtagcaggaagtctcggccatacttgcgtctctctgatctcttggggtgacaggaggtgacatactgacagcaatcagtgatgcccagggagctgggccacagtggggcctgcagcttcctctggtaaagctgatgggagaagtcttcctgtccagataccttccaggctggcatcccatggtacatggagctctccatccctgatgaagttgtagagaggtgaataagggacagaatttaggtccccgcacaagatgatggggcagtggctgccatctgacagtctggccaccttgtccacttccgccaggag

SEQ ID NO: 264490 - DNA, 750 bp, Homo Sapiens
gagccctggtatcagggaagtccacagccaaaaaggtgtatagcttcttggataagatgtctttctacaatgaactttataaacacaagcctcatgatgtgatctcccatgaagatggaactctttggcggagacaaacacccaaactcctttatccccttgggggtcaaaccaaccttcgcatacctcaaggcactgtgggccaagtaatgttggatgatagggcatacctggtacgctgggaatactcctatagcagctggaccctctttacctgcgagattgaaatgttgcttcatgttgtttcaactgcagatgtgattcagcactgccagcgagtcaaacccatcattgatctcgtccataaggtcatcagtacagacctgtcgatagcagactgtctcctgcccatcacatctcgcatctacatgctgctgcagcggttaacgacagtgatctccccacctgtggatgtcattgcttcttgtgtcaactgcttaactgttttggctgcccgcaatccagcaaaggtctggactgatcttcgtcacacaggttttttaccatttgtggcccatcctgtctccagcctgagtcagatgattagtgcggaagggatgaatgctggagggtacggaaacctcttgatgaacagtgaacagcctcagggcgagtatggggttactattgcctttctgcgcttgatcaccacccttgtcaaggggcaacttggtagtacccagagccaag

SEQ ID NO: 264491 - DNA, 1127 bp, Homo Sapiens
ttagacacaaacacaaaacactggtctttatgtataacactagtggcagatgtgataacagacccaataattagatcctcagtacaatctgggctaaaattatgagtcttcacacgaatcatataatcctttccatttgactgaaggacaaatttgactaaactgctcagcttagagctctccggcaatgtctgggtcagcaggctatctagaatgcccttcagatgatccagcagtgattgaagacagccatccttcagattttgattaaccccaaggataaatatagtttcatgaaatgctggcattgtgaaaggcaaaatgtggcacttctgaaagacaggtccactgaggatgtgcagagaacctgagaggaagtctggtacttcgatgacatcctgaacatgcactaggagagaaggtctaaggcagatcttggcctggccacaggttccttcacaagcttcttctttaccatctcttccaggattcttgagaaggctaagttctgaaaatgacactagaaagtcttccacatcttgtgatgtcccaccagtcagggactcagaatttgagttatcttcatggagactaatccaaaaagcagctgacagaaagtcacaattccaaaaaggaagaacactggtaccttcctgtggcagcaaagggaaggaacacttcagcctttttagcgggaaaactttgcctaattcagcaatgagtttctcatttatggttttgataggatgacatgaaggtgcttccaggaaacccctgttcaactttcctacaagtgcttctggttctggaaaggaaaaccactggttacccagtttgatcctgaagattctgggttgagaaccttcaaaaggtaagctcctggtgaagatatggttcaaagcaccttctacatgaaaggacttatcttgactcctatatccagtgcacttgtaccctgccacagccttacagctgaatggatacacgtcgcttaaaatgagcccccccagggctgccatggcaaccacttgccaactgttgtgccattctctctggggcttatccgcaggagttccaccttgtcctctacataatgccacgtggacttctccttcctctgcaagaac

SEQ ID NO: 264492 - DNA, 706 bp, Homo Sapiens
  misc_feature (196)..(239): n is a, c, g, or t
cactggcctgggagatctgcagtgcctgcgcgagcgaggtatccatccattgtttcggtgtgaactgcacccagctggcagatgtctttgaactgcacgagagagaatttgatcaaatttatttcaacttcccgcattgtggacgcaaagctggcgtagctaagaacagggaactgcttgccaaatttttccaaannnnnnnnnnnnnnnnnnnnnnnnnnnnnnnnnnnnnnnnnnnnttatgaagaggacaaggtggaactcctgcggataagccccagagagaatggcacaacagttggcaagtggttgccatggcagccctgggggggctcattttaagcgacgtgtatccattcagctgtaaggctgtggcagggtacaagtgcactggatataggagtcaagataagtcctttcatgtagaaggtgctttgaaccatatcttcaccaggagcttaccttttgaaggttctcaacccagaatcttcaggatcaaactgggtaaccagtggttttcctttccagaaccagaagcacttgtaggaaagttgaacaggggtttcctggagccaccttcatgtcatcctatcaaaaccataaatgagaaactcattgctgagttaggcaaagttttcccgctaaaaaagctgaagtgttcctaccctttgctgccacaggaaggtaccagtgttcttcctttctg

SEQ ID NO: 264493 - DNA, 410 bp, Homo Sapiens
acagctgcttccagggctggtggcgcaggccctgccacacgtcgaagacttcccagccggccggcggcgccccctgcgggtccagggtccgcgcccctcagcaggaggggcgaaaggcaagggaagagctgcacgtggagcggcccggctggtggcccccagggcgctgagggcgcctggcgaaagagccgcagctccgcgcccaccagctcttctttgtctgagagcatggacacatcaaacaaatacttctgtctccggagaggagtgtgcgagagatcgtctagtcccctgtctacaaagctggtgatcataggagccgacttggaagactggaaaaagctggcattgatgcccagcttctcagcgatggagtaagtcctgtagattgacagcatgtactcgtgggg

SEQ ID NO: 264494 - DNA, 730 bp, Homo Sapiens
tgtcgggatcgcttcccagaccctcctcagtgtgcttaatccaactgaccgctggctgcaagtcagcattggggtcctcagcattagtgttaatggtgaaaaggtggatctttcaacatatcgttgtttagttttcaagaataaagccatcataagacctcatgccacagaagagataaaagtgctttttataccatccagtcctggggttttcagatgcacattcagtgttgcttcttggccatgttcgacagatgctgagaccatcgtacaggcagaagctttggccagcaccgtcactctcactgccattgccgagagtcctgttattgaggtagaaacagaaaagaaagacgttcttgattttggtgacttgacttatggaggctggaaagccctcccactaaaattgataaaccgaacgcatgccactgtgccaattagactgattattaatgctaacgctgtagcctggcgctgtttcacgttttccaaggaacccgtccgagctcctgtggaagttgctccttgcgctgatgtggtcactcggctagcaggcccttctgtggtcaaccacatgatgcctgctagttatgatggacaggatccagaatttctgatgatttgggttcttttccatagtccaaagaaacagatcagctcttcagatattctggactcagcagaagaattctcggcaaaagttgatatcgaagttgacagcccaaac

SEQ ID NO: 264495 - DNA, 607 bp, Homo Sapiens
gcagaagagcatcagtggcaggatgatagggcagtttatgtttgacaccatgggtatgaccaacattctaaacaaccaagatactgcgcaagctctggcagatggattgatggagttgttattactgcagaagagcatcagtggcaggatgatagggcagtttatgtttgacaccatgggtatgaccaacattctaaacaaccaagatactgcgcaagctctggcagatggattgatggagttgtcaaaagaagattctgaaagaaatgttgtagaagacaattcttgggacacaaagtccaggctcagcaaaaatgatttaaattttgaagcactgattaatctggagagaatactccagaaggactcagcgagaaaagcgagctagagttgtcagagaactcttacagagtgagagaaaatacgtgcagatactggaaattgtgagagatgtttatgtcgcgccactgaaggcagcattaatttagaaggactcagcagaaaagcgagctagagttgtcagagaactcttacagagtgagagaaaatacgtgcagatactggaaattgtgagagatgtttatgtcgcaccactgaaagcagcatt

SEQ ID NO: 264496 - DNA, 400 bp, Homo Sapiens
ttggcacgttttttacggcccccactgggattgcaactggctcttaccagcacattcttagtgattggctgggatcccaatggggaaaggccccctcttccatctacttctgcgaatcgaagctacagacgtggtccagcttcacagacttcctagaagaaaccttgaaaacagtaaggaagcagctgtatcctttcttcaaggaactgcagaagagcatcagtggcaggatgatagggcagtttatgtttgacaccatgggtatgaccaacattctaaacaaccaagatactgcgcaagctctggcagatggattgatggagttgtcaaaagaagattctgacaaacctctggaatttttgtcgtattttctgctgaagaaatgtggcagaaagatcaa

SEQ ID NO: 264497 - DNA, 856 bp, Homo Sapiens
tgcggttatagtttagactggtcactggtagaaaccgtttctgaattacaaatggagagaatctttgaagaccatgaaaacttggttgaaaatcttcttaattggacaagagatagccaaaacaagcttatatttatggagcgtatagaaaaatatgcacttttcaaaaacccacagaattatcttttggggaaaaaagaaacagctgagatggcagatagaaacaaagaagtcctcttggaggaatgtttttgtggaagttctgtaactgtaccagaaattgaaggagtcctttggttgaaggatgatggcaagaagtcctggaaaaagcgttattttctcttgcgagcatctggtatctactatgttcccaaaggaaaagcaaaggtctctcgggatctggtgtgctttctccagctggatcatgtcaacgtttattatggccaggactatcggaacaaatacaaagcacctacagactattgtctggtgctgaagcatccacaaatccagaagaaatctcaatatatcaaatacctttgttgtgatgatgtgaggacactgcatcagtgggtcaatgggatccgcattgcaaagtatgggaagcagctctatatgaactaccaagaagccttgaagaggacagagtcagcctatgattggacttccttatccagctccagcattaaatcgggatccagttcttccagcatcccagagtctcagtcaaaccactccaatcagtctgatagcggagtttctgacaaccagccagacaggacacgtccgttccagagcattgtgagctccgtattctctgaaggctggaacgaggcactcagttggaaaagtcaca

SEQ ID NO: 264498 - DNA, 707 bp, Homo Sapiens
tagcttgggaaaaagagaaacatgaactcggcctaaccaagctaaagaatcgatttcgagatccactggaaagtgatactattgtggttcatgccatactgagtgaccacaagatatcctcttacaggctggtgcagccctctaagtactccaaattcaaacgagctagtcaatcagagagaaaaccaagcaaattggacaggtttgaaaaagagggacctggaagaaaggacagccagagagatgcaggtgggagtgttaccatacaagaagaatcaataatagaaaaagggaagaaatttcggcctaaaaacctaagtgaaatcatcgtggaaaatcaaattgagaaaacgagaaaacttatattaaaagctgaaagggcacaactaaagattcaacagcgaaaaaaagaatgggaggaactatacaagagtaaacctggtgatgactatgaagatcccaaagatcttcaagccatcaaagaagcccaggtgtatatgggagatttcaatctgaagacagccccagactacaagatacctgagcacatgagaataaatgctgccaagaaaaaaaaggaactaggacacctagattcttttggtccatggaaataaaaggcacatgaacaagtgcattctctctcttaaaggccttaaagtggctgttgttgaggaaatacagtgcctggtacaagaactgaagaa

SEQ ID NO: 264499 - DNA, 562 bp, Homo Sapiens
tgctcgccgtagatggcgttgtcccggtcgcgctgggacatgcgcacccagacggcgtcgcccgccgccagcagcagcatcaggctcttggcctgcatgacgctgcgctcgctgggctgcgcgtagagcacggccgcgggccgccggttcagcatgatgtgcaggtaggtctccttgtagttccaggtgtgcacgttgaggctgaggaagtagacgccgggcaccgtgcagaggaagcggcccgcggccaggtcgaaggcgccgtccaggttcaccagctccgtgtcgaagggcaccgcctggaagtggtcggagctgtgcaggccctcgcgccggcccacggagaaggcggcgtaggcacgtcggcacgcggcgcccggcggccccacctgccccttctggcctctgcggccctgcaggccccgggcgcctggcggcccctctttcccgctcctgccggcccgacctcggacgccggcctcacccttctcacctttgaggatttcgatgtctatagtgggccgtactcgaggcagccccctccacaggtcccccctccaca

SEQ ID NO: 264500 - DNA, 764 bp, Homo Sapiens
agccatcaatgaggaagtggatatcagcctcttttgtatccacacagccagttttatcaagattcctttgttcagcataagtagaaatttgggaccatatttcattctggagctttttcaggaactttgtactgtaagtttctaagtctgcataggacttcagcgtggaaattgtctgttctggaggataagacactatttcttctaactgggtattgttagccccttggatgctcaaggcaaacacgtttacatcctccagtcgaaggttcagcgcagcatcatgcacctcatcatctgatggtctgtgggtgaccagaactgcaatctgaggcactccttgtgctcttctgctgccatatgactctgagaagccgtctcttctcatctgatcaatggcagcccctgtattggatttcccaacttggatagaaagattcttgatttgctgctgaaattcagattgggttgtgcttgatttaagaaaagaaatagtcttggcactattgctgtaactcatcagtccaagtcgcatgcaattttccttcacatccatggagctggtaatgttctcaaggaaggtctgaagatgccttaaatttcctccggtcccaagtgactcatccaccaggaacacgaggtcagcgagtgaatctttctgacaggatatggggaagtgaacttgcatatcagcatcgacggctccctcaatatacttggttacatccttgatgatctgtgtcatgtttgggaaaatgtgctga

SEQ ID NO: 264501 - DNA, 733 bp, Homo Sapiens
aaatacgcccccaggctgccagcagactattacaacgaaaagcttctgaaggttggagatagcctttgtcaaatgaaagaatacaaactggcccttttacaatgctatggaagatatcttcagcagttcaataccaattttgatgagaataaagtggatgtaactcaattcaaagctacctttttcccaaaaggctttaaagataaaactgctggacttacatttcatgctttgagtggcaaaaatatgtgcaactaccagctggtctgcgacagtgatgaaaacctgaagaataaagaatctgtggtccagtgtctgcatatcttgtcctccttaaggctcatcatgcaagtggctctgccacaagagcatctttgctggattatcttcaatggtaccatttatatttacaccatttgcagaaaactgatggtcataggtcagtcttccaaggccttagagtatctcctgtgggccagcatgtgtatggagtccttggtcccgctcctgtcactcaggtacttgacatggcgcgctactctctacacagctgtttgccagtgctgctatgactgccatgccgggattcacggagaggcatttgctcggcgtgctttggctaaaattgatgagttaaggcaactggaattaatgagttcctcaaaatcccaggaagaatcgcgaagatattttcgagaggccacaatgaagatggcagtgatgatcttcaaaa

SEQ ID NO: 264502 - DNA, 373 bp, Homo Sapiens
ccacgtgaaagcccacggggtggaagcctcccgagaggtagtagttaatcctgaaagtcaggacggtgagaggccggtaggacttgtggctggtgttgctgctcagtctactgccccagaagtcaggatgccacaggtcccccaggggcgtttctgcttggaggtccttattgttaacaatagcttctgagtcatcaaagacaaagtctccatcatagctgcgtgcaaaacacacaatggcaaccgatcccactactaacttagcccagaatggaggaagaacagaagatggaagaatgtgatccaaatcagtgtccaacacggccattctgaaaactgcaggttggtggctcccggctccagcattatatac

SEQ ID NO: 264503 - DNA, 724 bp, Homo Sapiens
cagatgctaagtaatgctgccaggccttgagcatcgtctcctcccagagcggtgtgacctctctcaatcttcacttccctctctccaggtttcacagagagatcgatcttgaaggcatcctccagggtctgctgcctctgtgccaccagctgctgccagagagtctgcactgtcttctggatgttgtgttggacatcactcaaacttggtaagtcttctcttttttctttcacgtcttcatttggggaaaggaagacttgatgataagtagacattctaggcttgggctccaatccaaatccttctgggtaacttctctcattgagtagcaaaaggcaatgcatgagacacaggaggaagctgatgttggaattgtaggtggcaaagacaacatcccagtgctcctgcagaaagcccaggatgctgagaaggccgaggcattcggagagggactgctggggcttggataggcaataaagaatgactttatttaaactgctgtataaagtgctgaggacagtgtccctttgagaagaggcagtctcaatgaccaccatgatgtgctccaggatgaagaggaggatatgcctggggtctgccgagaacatcccactgtacagcttctccaccagcttctaagtgaagcaggagatgttggcaagagaaggggcagcagcagcttctgcacttggctgaggctctttgccgtctctgaacatcgctg

SEQ ID NO: 264504 - DNA, 306 bp, Homo Sapiens
ttggagtggactttaccgtgcgttcccttgatattgacggcaaaaaagtgaagatgcaggtgtgggacacagctggccaggagcgcttccgcaccatcacccaaagctactaccgcagtgcccacgcagccatcatcgcctatgacctcacccggcggtccacgttcgagtccatccctcactggattcatgagatagagaaatatggagctgcaaatgtggtcattatgctgattggaaataaatgtgacctctgggaaaagcggcacgtcctgttcgaggatgcctgcacactggctgagaaaa

SEQ ID NO: 264505 - DNA, 620 bp, Homo Sapiens
cagatgaggatgtgccacatgcagtgcaggtaggggaagttgaaggatgacagcagctcgcagaaagctcggtcactgatccagcagaacagggccagggtccaccagaggcccgagaagaggcccagcttaaacacacgcatgttgtcacacctctttagctctgcaatgagcagtgcagcgcaaggaactcccagggtcatcagagagatgttgttgatggcaggcttgacaaatgccaggcacgtcgtaaccgcacacaggacactgaccaccaccttgaacctaccccggtaattccgaaagatctttggtagataccttctggggaaccaaatggccaaagcacacatcagaacccaaaggactgcaagttcatcaagcatctgacccaagaaactaagggttgcatggaagtagacggatccaattcccactacaaccaaaagagtccagattaagtagatgccactgttgaagcatgttgcatactgacgaaacaagcacatgcagatgggcggtaaaatgaaaagataagacattgctgatcgtgttgtagaactcggcgatagcaggcacgatggtgtagttgtcctcgcaccagtccacctccgagctac

SEQ ID NO: 264506 - DNA, 466 bp, Homo Sapiens
tgtggcctcacctttcacttccaaaactccaaacattgagtgcgtacctcaccttatcaaggaaggacgtgcagctctcgttacctccttttgcatgtttaagtacatggctctgtacagcatgattcagtatgttggtgttctgctgctctactgggagacaaacagcctttcaaattaccagtttctgttccaggatctggccattacaactcttattggtgtaacaatgaatctgaatggtgcctaccctaagctggtgcctttcagacctgcaggacggctgatctctccacctctgctactctctgtgattttcaacattcttctcagcctggccatgcatattgcaggcttcatccaagttcagaggcagccttggtattccgtggagatacacagtgcctgcacagtacaaaatgaaagcatctcagagttaaccatgtctccaactgctccagaaaaa

SEQ ID NO: 264507 - DNA, 650 bp, Homo Sapiens
agccaccaggagcgcctccaagaagtttctaagctgactaaacaactaatgctcctggaggcaaaaacccacggccaggaaaaggagctggcggagaacagggaacagctggagattttacgtgccaaatgccaagaactcaaaacacactcggatggcaaaatcgcagtggaagttcataaatcaattgtgaatgaattaaaaagccaattacagaaggaagaagagaaagaaagggctgagatggaggagttgatggagaagctgacagtcctgcaagcgcagaagaagagcctgctgttagagaagaacagtttgacagagcaaaacaaagcactggaagccgaacttgaacgagcacagaaaatcaataggaaatctcaaaagaaaattgaggtcctcaaaaagcaggtggaaaaagccatggggaacgaaatgtctgctcatcagtacctggcaaaccttgttggcctggcagaaaatataacccaggaacgtgacagtcttatgtgtttggcaaaatgtttagaaagtgagaaggatggagtgcttaataaagtcataaaaagcaacattcgcctgggaaagttagaggaaaaagtcaagggctacaagaagcaggcagcactgaagctgggagacatcagtca

SEQ ID NO: 264508 - DNA, 463 bp, Homo Sapiens
gaggactgtggaatgcccagcgccagctggccttagaagaacagcatgaaagggaaagttcaggtgatgaggaaactttggccctgctcaaacgccagggcttgttgcagcaacctgagcaagcgcccttcacatcgaggatggggctcctgctggtcttcccccttattcagtcccagagtagaacagacccctctctctgtaacataactgctgaggtgctattgaactgccttcgtgactgccagcctttgagcttgaccaaggagcctgctgactgtctcaatggaattgaaactttgctgtgctcttggctagaggagacttctgacacaggccgacacatcccacataagcaaaaagaaaatgctgctgctgccctggtggctttggcttgtgccaggggatcattgaaaactttcgtccacacagtccatctattacagaaacagacggatctagg

SEQ ID NO: 264509 - DNA, 536 bp, Homo Sapiens
ttgtgcagccttcatcacaatgaatcctggctatgcagggagaactgaattgccagataatttgaaagccctgtttagaccatttgcgatgatggttccaaattatgccttgattgcagaggtaattctatattctgaaggatttgaatccagtaaaatattagcaagaaaaatgactcagatgtataagctttgcagtgagcagctgtctcagcaggatcactacgactttggcatgagagctgtgaagtctgtcctggtcatggctggatctttaaaaagagaaaacccagacctaaatgaagatgtggtgttgataagagctttacaagactccaatttgccaaaatttctaacagatgatgctcttctgttcagtggaatcatatctgacctttttcctggagtccaaattccagaacatgattatggtattttacaatcaacaattgtggatgtcatgaatagacaaaatcttcagcctaagatgtgtatggttagaaaggtgatacagttttatgaaactatgctagtaa

SEQ ID NO: 264510 - DNA, 737 bp, Homo Sapiens
ctgggacgtggtggtggggcagctgggccatgcttccctctgccctctgcagcacttgctttgcaaggtccctgctggagggccacgaatgtgcacatgatctggcccagccactgcatgaccagctggttaaactgtgggagctcagccactagcagcgagttgagtgcctggtatgtgtgccgggcggcctcctcctggtaggtcacactgcccacctccagcagcttctcttccacccgctcaaagtccagtagcttgtccagacgcttcttgatcaggttctgagggccaagcagggctttggccaggctgcacagtggctgccacaccaggccttctagccgttgcttaaatttcaggaaggcctcaaggtgaaggtctcttgccaaattgcaatactgcactgcaggcccctcggggatgtccagattgtattcgtgcggcctgaagtagaggaaagcctgcagattgtccaggtaagcagccacgttgttcttcagctcagtcacacacagagacacccactggaacctctcttctaaatcatcaaattccttgtcttctgtcctggggatcagccccgcctcctgcttcagcagctggctcagccgggtggtcttcttggagagggtgtgtgtgttgatgcgggacagccgctcccggagggtcagctgctctaccttggtgtacttggaggccacttccttgcgcatcttgtactcattgatattggt

SEQ ID NO: 264511 - DNA, 558 bp, Homo Sapiens
ccatgctgaccttggtgggcctggtcacccatgcagcacagagagccgatgttggcggggaggcagctggcacctccatcaaccactcccaggcggtgctccagcgcttgcaggagctgctgcggcagggcaacgccagcgatgtggttctgcgggtgcaggctgcgggcaccgatgaggtccgggtattccacgcccaccgcctgctgctgggactgcacagtgagctgttcctggagctgctaagtaaccagagcgaggcggtgctgcaggagccacaggactgcgccgctgtcttcgacaagttcatcaggtacctgtactgcggggagctgaccgtgctgctgacccaggccatccccctgcacagactggccaccaagtacggcgtgtcctccctgcagcgcggcgtggccgactacatgcgcgcgcacctggcgggaggcgcgggcccggcggtgggctggtaccactacgcggtgggcaccggggacgaggccctgcgcgagagctgcctgcagttcctggcctggaacctgtcggccgtggcggccagca

SEQ ID NO: 264512 - DNA, 691 bp, Homo Sapiens
aggtggtccagagcatcaggagtcgtgtcacaggccctgggactgcatctcccagccatccggagaccacacgccccacgaggtcagaaatagcaacaactgagagtaggaaggcagcaggtagtgggtcccaatccaggtcctggagatgggccaccaggtggaggtagggaatgaagtagccagtgttgatcagggtgagggcaacagtgtaacggaggaaggggccatgatggaggagagaggtgagttgggccctgggaccacccacagcagggtcctcagccagggagggtgggcggaggagagcaccacaggccactaggtggagggagagggcagacaccagcagcagggaccccctccaggcgtagtggctgagcagccactggaaaaagggggcaaatgtgaaggaggagaggcccacgcctgtcagtgccagcccggtggccagggatcgtcggcgagagaaataacaggacaggcaggccagggtcggagcgaaggtcaaagcccagccagagcctgacagcaacccaatactcaggtataggtgggtcaaggaagtagcaaaagaggcgagcagcatccccagcgcagccaaaaggcctccagtcatcaccacgggcctgggcccgaacttcgtgctcagggcactgcctaccgggctcccaaactgctgcaccgcgat

SEQ ID NO: 264513 - DNA, 725 bp, Homo Sapiens
acggcggctggtacgaccgcaagatcattggtgccttcaagaacctagtggtaatcaactttgtctgtgccatgggccccccgggtggaggcaggaacaccgtcaccccgcggctgatgcgtcacttcaactacctgtctttcgctgagatggacgaggtcagcaagaaacgcatcttctccaccatcctgggcaactggttggatggactccttggagaaaaaagctaccgggagcgtgtgcctggggccccccacattgcccacttcacggagccccttgtggaagccaccatcatggtgtatgcaaccatcacatcccagctgctgcccactccagccaagtcccactacaccttcaacctgagggacctctccaaggtcttccaaggcatgctcatggctgacccggccaaggtcgaggaccaagtgcagctgctgcgactgtggtatcacgagaactgccgcgtgttccgggaccgactggtgaatgaggaggaccgcagctggttcgaccagctcctcaagcgctgcatggagcagtgggaggtgaccttcaacaaggtctgccccttccagcccattctttacggggacttcatgtcaccaggctccgatgtcaagtcctacgagctcatcaccagtgagagtaagatgatgcaggtgatagaggagtacatagaggactacaaccagatcaacacggccaagctgaagctggtcctc

SEQ ID NO: 264514 - DNA, 499 bp, Homo Sapiens
accgtctgtcgggcaatatccaccatacctagttgtaaggccccctttatctggtccaggcccgatttccgctctgcttcattgcggaagcgtcttcggatggtaggaaaaaccttggtctcccatgctttcaccagcagggcgtagtggtcctcctgagggatgtcatcatcgtcatcatcatcgctttcatcatctgcaatgggaggcgggtgagggtctgggccagaggtgatgaaattctcatagctgagctcgactttataatgacaggaggtgtcactatcatattgttgctgagcggtggccacggcagcaatccggcatggtggcccatgagtgcctgggtctgatgcaatactggacccagcatcattgtcactgtcagatgccatggcgaaaggcagggcctcaaagttagcgctgatctcttctgctaggtcagtgcacaggtcacaagcattgcaaaagagacccaggcactcatgggccaccatgg

SEQ ID NO: 264515 - DNA, 578 bp, Homo Sapiens
tgcgtctctgtgccgggcgaggcgggctaggtcgatctgctcccgctcctgcttccactgggcatagtcccagcccgcctccgggggctcccccaccggccggctccagggctcccaagaacccttccgtgcagaatctgagctgatggccacctgcgtgggggggcttcgggtcacacgccctccaggtgacccctctatgccttggttccttgctctggtaggcttttcacttacaatccgtttgccctctgctttgttctccatggtcacagccagctccaccagctcccctaagcagaaagtacccccgtggtcctcagcatcctcatcctcaagcatctcgttggtcactctgggtccacaggtaccccttgcccagttcctgctaaccacccgcttttcaccgggaacctggctgatggtaacggtgaggccatcaggctggaggagtgctggtgtggtcacagccatccccccctgcaaggcctgccgacggtcctcctggatctcctggtacctgcggagcaaggcctggttcttcttgcgcagggcaactatcctccgatccagctctg

SEQ ID NO: 264516 - DNA, 746 bp, Homo Sapiens
acagaccggatgctgggatctgattggcgcttgggggccacacgtttgacctctgaggttatctcacctttggcactagacatcccccgtgccacacttggccagggtgccttcactcatagttttcactgtggacagtttggcactgatgcggagctcatcagccaccgaacgctggggttggttggcccgctccggatggtagtatttgcacttgtggccgtaggtgcattttttgccataaggacatggttgcttcttatgctcaggaacaatgggtctctttcttaagaaattttcaaggcttgggccgtggcgtcctaatggatcatctggaggcataaatttgtcattcacaaaagaatacatcagcaaccgctcctctataaacttcttccattctggcttttcaacttgaaggtctcggtagttatcattggacacaatgatgccatcagaatcaaaagccagtttgactatgaaccggtcatcatagcagacaaccctcctgccttggactcttcgggatggtgtgaagacaagaatcttttccttctccagttttcgtagaatatcttgatctgtaattggtgcatcagggcgggattgctcctttctccatgcaggcacaaatacagtaatatctttatggcctttatatagaaaccaatccacagcaagttgtattcctctgcaggagaattcttctttattcccatggctcattgccacattacttccatcaa

SEQ ID NO: 264517 - DNA, 561 bp, Homo Sapiens
  misc_feature (527)..(527): n is a, c, g, or t
tcctaccttccaaacaggttacactcctggcacaccttacaaagtgtcctgttcccccaccagcggggctgtgccaccgtactcctcctccccgaacccctaccagactgccgtgtaccctgtgcgaagtgcctacccccagcagagcccgtatgcacagcaaggcacgtactacacacagccgctgtatgcagcacctcctcacgtcatccaccacaccacggtggtgcagcccaacggcatgcctgcaacggtgtaccctgctcccatcccccctcctagaggcaacggggtcaccatgggcatggtggctgggaccaccatggccatgtcagcaggtaccctgctgactgctcactccccaactcctgtcgccccccacccggtcactgtgcccacgtaccgggccccaggaacgcccacttacagctatgtgcccccttcagtggtgattcacctggcaaatgttttgagggacggagctgtgcagttcacattattgggggatttccacagctgggtgctgncagggcctttgcggcttcccaaccaggggatttt

SEQ ID NO: 264518 - DNA, 728 bp, Homo Sapiens
ccatcccgaccccatcaaggtgtacggacaggttagtctgaatgattcccacaatcagatggtggtgcactgggctggagagaaaagcaacgtgatcgtggccttggcccgagatagcctggcattggcgaggcccaagagcagtgatgtgtacgtgtcttacgactatggaaaatcattcaagaaaatttcagacaagttaaactttggcttgggaaataggagtgaagctgttatcgcccagttctaccacagccctgcggacaacaagcggtacatctttgcagacgcttatgcccagtacctctggatcacgtttgacttctgcaacactcttcaaggcttttccatcccatttcgggcagctgatctcctcctacacagtaaggcctccaaccttctcttgggctttgacaggtcccaccccaacaagcagctgtggaagtcagatgactttggccagacctggatcatgattcaggaacatgtcaagtccttttcttggggaattgatccctatgacaaaccaaataccatctacattgaacgacatgaaccctctggctactccactgtcttccgaagtacagatttcttccagtcccgggaaaaccaggaagtgatccttgaggaagtgagagattttcagcttcgggacaagtacatgtttgctacaaaggtggtgcatctcttgggcagtgaacagcagtcttctgtccagctctggg

SEQ ID NO: 264519 - DNA, 460 bp, Homo Sapiens
gaagcgcagaaaaaaagtggcataatgattgtctctgactctagacatcaagtaagggctcaacagaggtgcgctactttgtgtggaatgaggccttccgtttccttatccaaagtcaggtcaagaatgttctggagcttagcatctatgatgaggactcagtcacggaggattacatctgcttcaaggttctctatgacatctcagaagtcctccctggcaagctgctccggaaaaccttctcccagagtccccagggagaggaggagctggatgaggagttcctgatggaagaaacgtcagatcgcccagaaaacctcatcaccaacaaagtcattgtggcccgagagctgtcatacctggatgtgcatctggacagcacagggagcaccgctgtggttgcagatcaggacaagctggagctggagctggcgctgaagggatcctaaaaggagaacag

SEQ ID NO: 264520 - DNA, 438 bp, Homo Sapiens
gaacccatagcagcgggctcgggcaaggagggactcacttgcctggcttcctgcggcaaagatggccagagacaggtaagcgatggcctccttggtgtgaacccagccggcggccccgactggccgtgcccgcaggatggccagggccctggcgtggcagtggccttgaagcagctgccggtcctcgtggcagaagacgtccagggtgggctggaggcaggcggtgtcaccagactggaccagcttcttcaccaactggttggcgtcatagaagaagcccctcctcagctgcagcagggccagtcgtgccagcacaggggctgcctggggcctccgggatagggccaccagcagggccttgtgggtctcctccaggcggcccaggcggtacagggcatcagccgccaggaggcgagaggtctcgtcctctgaatccag

SEQ ID NO: 264521 - DNA, 550 bp, Homo Sapiens
tcccagggtaacaggtgggagagatagggccatatagagcaaaggagatgggaaaaaatgggctgaaacctcaagtcctttaacgaccttcgtatagcctacattttcgtacaaaaaaagaggcaataatggaatagtaacgcagcacaacccagcatcacagtcgtttcctttagcgaccttcgtattgccttcattttcctctgatgaaagatgcaaaaatggaatagtaacacagcacttcccagtattacagctgttgccagcaatatgagaaatagagcaatctctcgattctcagcctttcttggatcctcgtctccacaatattctcagaagaagcacctgttagtcatgagaagacacgtccaacaatcaagaatgggaccatcaaccacaacaatataagagaagttctttagtaattatttcagcagggattccagaaaagggcagacatcgagaagcttgccttgatagataaagacacctgagttctgagtgtcgaacaccaagagatagagaagccttgagctcacacaagcagaaa

SEQ ID NO: 264522 - DNA, 324 bp, Homo Sapiens
ggacctcctccacgcactccgccggaaaccatccgatgtggccgcgggcgctgccttcccagaagcccccttcaccgatgctcagaactttgaccctgtcaccgcggtgaagggggatctcgccgtccacttggggttggtatggcttgacagcgacgaagagcctcccgggcacggcactgtagagcttccgcttgggccccgggtactcgaaggccgagagtgagtccttgttggcaccaagagcaaaaggcgacccgacatgccagagaggctgcggcctcttgccgtcctcgcctgcgccgcccagcctgttgagcgatg

SEQ ID NO: 264523 - DNA, 604 bp, Homo Sapiens
accggaccttgctctccaggtggcaggttgggaatctggcagaaaaggttgctctcgaagtctccaatgtccaacggggagaattttactttgaacttctgaatcttccccaccggcacgattcccgaagagggctccacagagaagggctgtggggaaccctcggcccagtggtccatggtgctgtccagggtgctgcctgtatacatcgtgccctgactaagctgatctttttgagctgaaccttggtgatctggttttgcaaagctgactgcctttgaggtatcttctgagacccagctgaattccagctggacacgtcctgaattaatcacatcgaactcaaacactcgggtctggtaaaccaaggtttccttaaagcgcacatctcttgcttggcaatggaatgaagcgaaatccacattggcactgatttgaagctgcagttcttggtagttttcttctagtactaagtgagcaggttccggatccgtctctatcacttttcgtttaggagtgaaagtccccaggcatgtttctgggtacgtccaccccacttgactgtgtgcatgcggtcatcccagtcggggacctggtctgcagg

SEQ ID NO: 264524 - DNA, 367 bp, Homo Sapiens
tttccctggatgaagaagcctggaggttcctgagatatatcagcaccacccagattgcatgcaatcacatgaatacagacagcctggctactgactctagtcctacacacaagccctggtcagtgtgtcttgacgacaggttcaacttaactaatcaaatccgcaacaagcagtgccgcctctactccttagggctaggaagtgatgatacccattttgaggttagcatgcccaacaacggatgtgaagtgcatcgttttgataaaagtgtcaagtcagctcacattctggagagtcagcacctttggtatcaccgcttgtccattgactggcgggatccccatccagctgttgctgcccaaaaacc

SEQ ID NO: 264525 - DNA, 749 bp, Homo Sapiens
accttcgccctctgtgaggcagccaggcgggcctccaaggccctgctcccagtgggcgcctatgaagtcttcgcccgggaggcggtgggcgcggtgcagctcggggcctgcttcctggagatgaggacgctggtcgagctcgggccctgggctggggactttgggcctgacctgctgctcaccctgctcttcctgctcttccaggcgcacggggtcaccttggacggggcctcggccaaccccaccgtgtccctgcaggagttcctcatggccgaggagtctcagcctggcacgctgctgaagctggcggcacaggggctgggcatgcagacagcctgcaccctgacgcgcctctgctgggcctgggagctcagtgacctgcacatgctgcagagcctcatggcccagagctgcagctcggccctgcgcacatccgtgccccacggggcgcttgtggaggccgcctgcgccttttgtttccatctgaccctccggcacctgcggcacagtcctacagcctacagcggacccgctgtggctctgttggtcaccgccacggacaacacggccggacccatcacataaacattcttcaaccctgccctggccgcctctgtgacctttgccacaaagggacacaccttactggagtacgtgcaggtgtactggctaagccctctgacagggatggtcctggctgtgctgctgcaccagggccgccttccccaccttttccagaggaacctgtt

SEQ ID NO: 264526 - DNA, 1231 bp, Homo Sapiens
gtagccgccagcggagcagcacagcacagcggtagaaggtgaacttggcctgcgtggcgacagctgggcattggtccttcaggtgtaggagcaggggcaccatgctctggtgcacctgggtccgcaggccgctcagctccctgtctgccatggccgccaccaggtccccgaacagtgccatggctgccgcccgaatcccgtcccgctcgtcattaaagaaggagcgtgtgctgatggcaacgccgaggctctgactccctgtgccctgcgcgcccaggcggtgcagcgtgtctgacacggtgcccatgatgcacacgatcacctggtcgctgctctggaagaagccgtcgagcaagggccgcagctgtccctggagcaggcttcccttatctgggtggaagaggatgttgcttaggccctgcagactcaacacgcggacctcagggctggggtcgtggaggccttgtgccagcacggtcaaggcagcttgtttgggaagcacctccagcaggacagggctgtagaggaacttggtgaggatgaggatggccaccttcctctcaccctcctgtgggctctgcaggctgggcagcagctgacgcagcaccgctgggatctgcctgcagtggttctgcaccatggccctggcaaggaggcccacgcccttcgggtaggtgtggatggtggtgaacagctcccaggatccctgcagctccaggtgggcaaagtcatgccagtgccccgtggtggacagcaggctcttcagcgcctccagtgacgtgctgcagcttatgggagggggcttagggcttgcctcatggcacaagcagccccctggggcaccccctgccctgggaagggtgcccacctgacccagatagaaaggcacgttctggttcctatgcctggcttctctgacggcccctggggctactccctcctggcctggtttacgccgaactgctgggacgcacgagttggggaacaacccctttggctttaccctgagtcccacaggcaggacagggctgaagttggagcctagacttgcctgagtctgcacctagtgcccctgcaactctgcagggattgtgccagggagggccgagtggggagacaggtccccaaagtgtgcagcccccctccaagggctgggagtgggaaggcaggagtacgagggggtccgtctgggcagcctccccagtcagggtgagctctggcatgggttctg

SEQ ID NO: 264527 - DNA, 267 bp, Homo Sapiens
cccaccaatgtgatgtcaaggggacttccaacataacagttgaagtgatggcaacatgaagaatagtgactgaaatagcataatcccaaacccattcttccacaactggaacaaaaagcaatccacaaacaaagtaggtgacctctgttgaaactaaaagaacttaagagtttatgttgagccatgagggatttgttttgaaatcaaatggagccaggacattcaactcatgcacctcaaacatcacgcagcccatgctcagggaca

SEQ ID NO: 264528 - DNA, 437 bp, Homo Sapiens
gccagggtgatgcccatgtatggcatgaactcaaacacattgccgttggccagcttggccagtgtgatgatgacaaattcatcagtgaggttgaggggattgaggtggtgctgcagctcgtacatgaccaagctcaagtggtttcgggacagagccaccagtgtgtcgctggccacctctgccttcatatagccctccatctctgggatctccctcatctccttggaggcaatggccaccagcctctgcacgcactgctcctccagctccccctcctgctggatgatgtcctggaaaaggttgtaaatgttgaccttgcgctgggtggaaacctctaacacctgcaggcagcggatgagagtgtttatcactacagaaggctcagtggtggccttctccatgattatcaccgaggccagggtcttccgcatgtcaag

SEQ ID NO: 264529 - DNA, 760 bp, Homo Sapiens
gagaagcggaacacctccttggctgggccgcggcgctcgggctccagggccagtaagcgctggaacatgcgcagcgcgggctcggcgaagcggcgccactgcgaaggcagccccggcaggcggccccgctgccagcgcacgaactcctcgaagaaggcgtcggcgcccgacgccgcctcccacgggaagttgccggtgagcacgcagaagatgagcacgccgaaggcccacacgtccacgcccgtgtccaccgccagcccgtcggcgcggcccgcctggcacacctcaggcgccgtgtaagggatggtgccgctcacgcgcttgacgcggcagcccacgcggcgcgtcatgccgaagtcggccagctttacgcggcggcactcgcggtcgaacagcagcacgttctcgggcttgatgtcgcggtgcaccagctgccgcccgtgcatgaagtccagcgccaggcccagctgctgcacacagcgcttcaccgtgtcctcagggagccccacctggggagggatgatgtcaaacaggtccccagcaggtgcgtactcctgggcaaagacgtagcagtcctctgtctcaaagaccacgtcaaagaccttgatgatgaaggggctggaggagaggctgttgatgatgctcacctcccgtaggaagttcttcagcttggtttaactcttgttcacaaacttcagtgccatttttgtgcctgtgcccttgtagaccaccaggtcaaccttcccataggtgcctttgc

SEQ ID NO: 264530 - DNA, 407 bp, Homo Sapiens
  misc_feature (321)..(321): n is a, c, g, or t
aagacctgagctgagcggggtcaggtcgatgtcctcgggcgcacccagcggctgcagcgaaaagctctgcaggatggcggtgaggtacagaaagagctccatgcgcgccagcgactctcccaggcacagacggtgcccagctgagaagggcatgaaggctggactcttcttgaaggactgattggcatccaaaaaatgctcggggttgaactcaaggggcgtcaggaactggctggggtcgtagtggacggtgttaaggagggtgatgacatcggtgcccttgggtatcaggaagccgtgaaaggccgtgtccctaaactncttcgaatcccggtgctgtcactactagttttgtgatcctggacaaaccacactttctgggtatgtaagatggggatatgaagact

SEQ ID NO: 264531 - DNA, 608 bp, Homo Sapiens
tggtgaggcagcctccctccaccttatagatgttggaggggtgggcccgctggccgcagcgcgccaccactgtcttgcagcagctgtcgtgcacctggcggccctcggcctcccgcaacaggatgtacgtgctgtgctgccagtcggctgagctgttgcttccgcagcacttgaaatcctgctggagtcggtccactgaggcggtgatctgcgtggctccgggctgcccgtagttctcagccagagtccggttcaagtgctgcttcagttcatcactcagcctctggtaatacacatgggccaggactcccgccaccagctcaaccaggaagatgacgagcaacaggcagaaatacgtggagaggcagcccttccgctcccagaggatggcaccgaagcccaggaagccggtcaccatgacaagtacgcccgcaaagatgaggatgtaggcggaggcggcaaaggtgctggaggccaggacgctgaggtagccactcttctccaccagggtccagatgcccacagccaggacggctgctcccccgacccagaagaagaagttgaagacaaagagtaaatacttcaagtagatgatcagccagtcgtcc

SEQ ID NO: 264532 - DNA, 746 bp, Homo Sapiens
ccacgatctccgtaaccatttgcatgtgacttagcaagggctctgcagcaagcatctgattgttgatagagcaagtttccaaagctttcacgtaccaactttccacctctcttgaattgggaaacccattcgcaatgataatcttcttgtaatattgaactgaagcctttggatagcgaggcttatttctgtcgataaacccaacatagtagaatccatatctatctgagaatcctttctcccattcaaactcatccaacagagaccaggaagtatacccctttatattaccaccatcctttatagcttttagcatttcatttatgcatcctttaaggtattgaattctccactcatcacataattgagtacagtggaacttttgagatgctccattttccatcacatatatgggaggatcaccgtattgagtctgagcaaacttaaggagcctcctaaatccccatggcacagaacatagccatttagaccccagatccggccaggatagaacaaccagctctatcaagtcacgatcgctctggtagctgggcccctggcggcaggcgaaactcatatccgtgatgtaccgagtagtaaaatgacctaatcccaagaaatcggatgtgcctttaatgtagctcttctcctggagtgagaacaccggtaacctcgacatctccaggccttgctctgcactctttcttccaatgtagtccttcatgacttgggggtagtcaccggca

SEQ ID NO: 264533 - DNA, 619 bp, Homo Sapiens
tgaatgtggagtgcgtgacggccgtgcgggccggcctgggctccatcatccccctgcagctgctgaccatgctcagcccactggagatggagctgcgcacctgcggcctcccctacatcaacctcgagttcctcaaggcccacaccatgtaccaagtggggctgatggagacggaccagcacatcgagttcttctggggggccctggagatgttcacccaggaggagctgtgcaagttcatcaagtttgcctgcaaccaggagcgcatcccgttcacctgcccctgcaaagatgggggtcccgacactgcccatgtgcccccgtaccccatgaagatcgcccccccagatggcacagcaggtaccgccctcccctggccatgtcccaagtagggacacactagcctttctctgtttggaactggggctgccaggccccatgtgaagggagaacaatgaacaggagccccacgtgccaaaactcagacatcattgaggattagggcccggcaggaaccagccatacaggcctgctgttagatactttctcatatcttaaaagaagctgaaaatccagaatgcttcaaatcttctaacttttaaatgcagaaaaatggtta

SEQ ID NO: 264534 - DNA, 510 bp, Homo Sapiens
gtcttgcccaaagtttataccagacaccctgtgccctccatggtggtcaccttggccagccagcctggtgtggttgcatccttttgcccttgtgcctcactgatccaaggatctctcctctccacccagccctgcagtgtgaaggggaacaggtatatgaagcctgtggacccacgtgtccccccacctgccatgagcagcatcatgagcccgggtggcactgccagatggtggcctgtgtggagggctgcttctgccccgaggggcatgtgctgcgtggaggagcctgcttggagccagcttcctgcccctgtgagtggggccacaactccttcccgcccgggtctgtgctgcaaaaggactgcgggagctgcccgtgccaggaaggtcaatggcattgtgggggtgacggtggccactctgaggagcttgtgcctccctgagcagagggagaggccctgtgccaagagaatgggcactgtgtaaagggtgggtggctttgtgacaacc

SEQ ID NO: 264535 - DNA, 737 bp, Homo Sapiens
caaatgtaccttgggtgttctggacacatatgaatggggccatcgttggttctctccaggtgctcatcaagaaagataacgttacttctaaattgtgggctcaaactggacagcaaggtgcacagtggaagagagcagaagtgtttttaggcattcgttcacatacacagattgtcttcagagccaaacgtggtatcagttacataggagatgtagcagtggatgatatttccttccaagattgctcccctttgcttagcccagagagaaagtgtactgctcatgaattcatgtgtgctaataagcactgcgttgccaaagacaagctgtgtgattttgtgaatgattgtgctgataattcagatgagactactttcatttgccgtacctccagtgggcgctgtgatttcgaatttgatctttgttcctggaagcaggagaaagatgaggactttgactggaacctgaaagctagcagcatccctgcagcaggcacagagccagcagcagatcacactttgggaaattcatctggtcattacatctttataaatagtttgtttcctcagcagcccatgagagctgccagaatttcaagtccagttataagtaagagaagcaaaaactgcaagattatttttcattatcacatgtatggaaatggcattggggcactcaccttaatgcaggtgtcagtcacaaaccaaacgaaggttctacttaacctcactgcagaa

SEQ ID NO: 264536 - DNA, 656 bp, Homo Sapiens
gctctggagatctttctccggggagtcaacgagcccctgcgccaacaaccccaaccccatagtggtgactgcccgggtcgttcccaactacaaggaatttaaggtcagccaggctaacagggacctggcctctgtggggctgcccatcaccccactgtccttccctatcccgtccatgatgaactttgacgtgcctcgcgtcagccagaacggatgccctcagctgtccaagcctgggggacccccagagcagcccctgtggaatcagtccttcctcttccaaggccgagatggagctaccagcttctcagaagacacagccctggtgctggagtactactcctcaacttcaatgaaaggcagccagccgtggaccctcaaccagcccctgggcatctctgtgttgccgctaaagagccgtttgtaccagaagatgctgacagggaaaggcttggacgggcttcacgtggagcggctccccatcatggacaccagcctgaaaactatcaatgatgaggcccccacagtggctctctccttccagctgctttcctctgagagaccagaaaacttcttgacaccaaacaacagcaaggctcttcctaccttggaccacaaggatcctggataagaagctgagaaccatccaagagtcc

SEQ ID NO: 264537 - DNA, 551 bp, Homo Sapiens
gtgatgctgggaaatttcaagagcagagtcagagaccgtactgaacagacaattaaccccattcagatcgtccgctactggaactacagtcatagcgccccacaggatgacctcatgctcatcaagctggctaagcctgccatgctcaatcccaaagtccagccccttcccctcgccaccaccaatgtcaggccaggcactgtctgtctactctcaggtttggactggagccaagaaaacagtggccgacaccctgacttgcggcagaacctggaggcccccgtgatgtctgatcgagaatgccaaaaaacagaacaaggaaaaagccacaggaattccttatgtgtgaaatttgtgaaagtattcagccaaagttttggggaggtggccgttgctactgtcatctgcaaagacaagctccagggaatcgaggtggggcacttcatgggaggggacgtcggcgtctacaccaacaaagcaattgctactgtcatctgcaaagacaagctccagggaatcgaggtggggcacttcatgggaggggacgtcgg

SEQ ID NO: 264538 - DNA, 765 bp, Homo Sapiens
aggggcagccggccagccttgtacttgagaccgctgctgttctcctcctttcctgcccgcgtgacgctggaggccctgccagggggcgttccaaaacgctcagcctcccggatgcctgtggagttggctgggtggaagacggcgctcatctcctctgccaggtgtctccggaggatgtgcttcccactggggatgcccagggcagtggccatggcctcggcattgaatgtgggctccagcaccagcacagcaccatggacgccgctgttggtcaggttgtctgcgtactccttcaggtcgatgtctcgaacccacttgagcacccgctggttggtccacaccacggggtcaatgttctgcgtctcgcagcgggcccggcgctcctggagggcctccctgctgaagttcacttggtacagcagctcgatccccagcaggatgctgacctggtggaacttcttggacacgttcaggtgcttctccaggtctcgcttcatcagggaattcagcatccgcccatcaaccaggtggttctgaaaggcctgggagtactgggacaggccaatgtcattcagccaggccttggccacccagtgatggtccagctcggcagctttggacaggctgcggcctgcctcggcatcacggtagtcctcgatggccaggcgcagcttgcaccggtgcagggagctgcacaccccaaggcccagctgcaggtcctcgtcactcaggctcagcagcaccttcccgctcttcacgttctcg

SEQ ID NO: 264539 - DNA, 376 bp, Homo Sapiens
ttgacttcaaaacgctgacacgcctcttacttttcaataccattcgcatagtcttagttttgacttcaaaacgctgacacgcctcttacttttcaataccattcgcatagtctttgagtttggagatctgcaagagggctggaacaccttccaaagcattaaggagccacagcttaaatttcttactaaataactgcacagatttcaggtactgaatagaaacatcttccaagaagtcatgaaggagaacatcctcaattcccttgtacagctggacgtcgtagcatttaaagagctggcacacgtcaggcaatgacaaaacttgtacagctggacgtcgtagcatttaaagagctggcacacgtcaggcaatgac

SEQ ID NO: 264540 - DNA, 530 bp, Homo Sapiens
aggaagaggcagatgcggcgggagaggtcaggccccaccctaaggggaggcccgccttcactgggcggcacaggaaggttgaccaggaggcacatgcgaaaaaagatctctgctgcacgcctccagcgcctaggagcaggcaaaggcatgagagggcgcgtggggccggggcttcagcacctggaggtcttttcaggaagaggcagatgcggcgggagaggtcaggccccaccctgcggggacgcccgccttcactgggcggcacaggaaggtcggccaggaggcccatgcgctcccgctccgtgctgcaggcctccagcgcctgctgcagaaggcggggggaggggaaggctgtgacaactgcatcagccacggctgggctgacccgactgaaaagcctgatctgcctccgccaggccgcctgcagccctgcgcagtctcttgccactggctcgccggctgcccagcgccctgctgtgcagaaggagaaggcctgggattcccggtactgcttgaggggatactgggcg

SEQ ID NO: 264541 - DNA, 727 bp, Homo Sapiens
  misc_feature (52)..(113): n is a, c, g, or t
gcagctgcagcagctcaagcgcctggagtccttaaagggtctcacctgtttnnnnnnnnnnnnnnnnnnnnnnnnnnnnnnnnnnnnnnnnnnnnnnnnnnnnnnnnnnnnnngagttatgaaaaacctcctcctgggcttatcaaggatagtgagaagtttgtactctaggttatcccactagacatactgacagactcagtaatgcattatgaaaaatggctgcatgaaatttaaatgcccttttatgaaaaaactgtttctttcctgcagatgactgaggggtcataatttttagtgttgtcacaagcctctgcctttgtggaaatttcatcagccatgtttcccttccctgaggaaccagtgcaggcccacatgggttccttggccgtggcccccttctctctgactggggaacggcatctttaagctcagctgcctccttttgcttgtcaggccttacttgggctcagtccctcagttccatcctgtgttgggtttcttgagtatcagcagctcagagagcagtcaactccgaggagacccgacagctcatccagtccagctccccggtggaggcatccttcctgcagctcctggctacggcaccagggtgtgtgcgcacgagggagacttagagtggcaggccacggccaagaaaatttgctgttacgtaactgtcaatggagaaagattcttcgccaagcgcagtggcacatgcctaaaa

SEQ ID NO: 264542 - DNA, 897 bp, Homo Sapiens
  misc_feature (147)..(147): n is a, c, g, or t
gtgagggttgatatataatgtcccatgatttaatatatgtggtttgggggaaaggacaagaaaaaactataattccacatataagaaggtagttgcccatttacaagttccagttatgtcgtgtaaaacagaaaaattaagtaccanacctattaggaaatttttttaaaaagtggatttaacttaaattactgtgtacttgacggttggctttggatatggattttctaaaaagtgatgttttattgtttatcatctaatggctgtaaactgtagtactagaataaaaaaaatggaaaatcagcttttcctctgcctggttcaccttcatcttacttttctttagaatttgtttcttctccatcttttcccccccataatttcttcacctgtgtcctgcaaagtttttttcctctctctgtctctctgtgcattcttccttgggttattttattttgtgttgtgaacttggtcttcttccccaccatggcttttgttttttatcacaagttcatgtggctcacatccagattgcgccaggctgagcgaagccgccaatctgctgagttggacaaccggctcttcaaacaggactttggagacaagatcaacagtctgcagctggaagtcgaggagctcaccaggcagcggaaccagcttgagttagaactaaaacaggaaaaagaaagaagattacaaaacgacaggagcatcccaggaaggggttcccagaagtcagaatccaagatggatgggaagcacaaaatgcaagaggaaaatgttaaactaaaaaagcccctggaagaaagccacaggctgcaaccccaccctatggatgaacaggatcagctgctgctctctgaaaagccacagttgtgtcagctatgccaggaagac

SEQ ID NO: 264543 - DNA, 448 bp, Homo Sapiens
  misc_feature (282)..(282): n is a, c, g, or t
  misc_feature (326)..(326): n is a, c, g, or t
  misc_feature (395)..(395): n is a, c, g, or t
attcggcactaggaagctttctgaattccaattccagagaaaggacattgcaaagacagagccaacctggctggaagtcatgagaccccttttcttgctgtctaccctaagaattacccatgaccaccctgtcagctcaagctaccccctcttcaccgctgcctggtgagctcctcgacttccagctgcagactgttgatcttgtctccaaagtcctgtttgaagagccggttgtccaactcagcagattgggcgggcttcgttcagcctgggcgcaatctnggatgtgagccacatggaacttgtgataaaaaacaaaagccatnggtgggggaaggaaggaccaagtttcacaacacaaaataaaataaacccaagggaagaatgcacagagnagacagaggagagggaaaaaaactttggcagggacacaggttgaaggaattat

SEQ ID NO: 264544 - DNA, 433 bp, Homo Sapiens
ccttgacgggctccgagatgccaatggccttggcgtatcgtgtgttgaagagcagctccacctgcttccacaggggccggatcaagtcaccttgactgtgtgtcagcatctccatcccacaatcagaatcctcagatggcaggtgcccaggcatcgagtctgtcatttcctcagaggttggcgaggggtccaggagggcctcagaatccatggagagaaacagtggcctggaggcgtcttctcctccagggcagagcctcaggaggcggaaggtgcggtcgccatgtctgcaggggttccagagcttggcgatcccgaagcagttgggcctgcggagggagatgccttcaggcagtcccaccacaaacagctcctccgggtgcatcagaaacttggagtacggcaccttgacgggctccgagatgccaatggc

SEQ ID NO: 264545 - DNA, 373 bp, Homo Sapiens
tggtgggcaaaggacaatctgtcattcacggatcccatggacacctcgtccaggttctcaaacttaggactcattccaggtgacagaatctcacagccatgaccacagacccgatgagcaaaagagacaccagcaaacacacgaccaccaccacactcgggttcctgtgtaactcacggggcccagtgtcacctggagctgggccagggggctccaaggtctggtcagtggaggtcaagggctccgttccggggctgtgggaagtggggctccagtgcggggtcagggattcggaactgtaaagggagtattgtaattcacaccagctttcagcagcaccaccagcaccaaaagcagaagtggcggcagctgg

SEQ ID NO: 264546 - DNA, 339 bp, Homo Sapiens
ttcaggtggactccattcaacatgctggggcaggatggacatggtagaggatgtggatactttgcaggagtgagaggacatcattttgaagtatgagaacgtacagggacaccgagctgggctgccagcagacacggggcctaaagcctgttggaatctacagcagcactgatcgctttgggattctgcagctgagccctgagctggatgggacagagccagtcctttctgggggtcggctcccagaccgagatggctccaaaccttgtgcaagtcctcagctctgcctgggctgcattacagtgagaaggaactgcccggtcagagcccgggaggtga

SEQ ID NO: 264547 - DNA, 545 bp, Homo Sapiens
ctctcgctccgcccagacccctggatgcccagctgccgcacctcccgtggccccacgctgtggctacgtgttgtctgaagacgcctggggaaaccttcagggcctctgtactggcctgtcatgtggtcaaccagagtgaacatcgaggtgtctgggttcatggaagctggggaagaaaccacctacaactataccatgtcctgtccctatttcacatgggcctcgaggaagattctctgaagggaactacatggagatctccttgattgcaccgtcaaccccgctcctgtctgtcaggctcaggaaccacttacaagctatggcaggtgatgttccagcatcccacagggaggattatgctggtgagccacatggccaagcaggactatggcttcaacagaactggggcctgcatgttcaagcagttagccctactccagcaatgaggctgaagttaccagagtgacatcatggtatctggtgcaagctatagcatccacctattcttggagcacacatggtcaaaatcttggagcacacgtggt

SEQ ID NO: 264548 - DNA, 336 bp, Homo Sapiens
tgttcaagaccttctctcggaaagtggtggtggttgtccctaatgaggaagattggaagaagaggctggagttgaggaaggaagtagagggagatgatgtgcctgaatctataatgctggagatgaaagccaacttctctttgcctgaaaaatgcgactatatggatgaggtgacatatggggagctggagaaggaggaagctcagcccattgtcactaagtacaaggaggaggcaaggaagcttctgcccccctccgagaagcggacaaatcgccgaaacaaccgaaacaagcgtaaccggcagaaccgaagccggggccaaggctatgtgggcg

SEQ ID NO: 264549 - DNA, 715 bp, Homo Sapiens
tctccccagtatgaattctctggtgcagagtaaggtgtatgctctggctaaaggctttaccacattcgtgacattcatagggtttgtctcctgtgtgaattctctgatgcaagacaaaagctgagtagtaactgaaggctgtctcgcattcattgcatttccaaggtttctctcctgcacaaattatctcatgcctaatcatatctgaattttgttttaagttatttttaaatgaatcacaatgatgtagtctctctccctgctgctgaacaagtaaggacctctgagtgcaatttcttctaaattcatcagattggtagcttctctccctagaagatttctcagtgacagcctcttgtattaaatgtttctcatggttttcctgccgactctctaaagaatcctcacattcactagaactttcctttgaaaatcttacaattaacaccccaggagccgattcttcttcagaaatatccttctctggagttagctccttgctttctggtattgtttcccagtgctttagactggctgcctttgagacttatatctccagctcttcctcaggctccaactgagagattacatcaggtgtggaaattggaagccccagcaagaccagattcctaggcatctcaggcacatctccctgaggagagttcagctgcctccactgggtgagagcctcggccatatccctgatcatcaattc

SEQ ID NO: 264550 - DNA, 400 bp, Homo Sapiens
gccagggggaagggcaggttccgagggcactgctacgccaggttccagcccatcccccgatggccctgtgggcgccccagcaccctccgaacctgcccttccccctggccgcgtgtctccagaggatcctggcatgggctcacaggtgcagccaggtcccgggcatgtgtcccgctccaccagcgaccccaccttgtgcacatctagcatggcaggcgatgcctcttcacacaggccgtcgtgtagccaggacctggaagcgggactgtctgaggctgtgcctgggagcgcttccatgtctcgctctgccacggctgcctgtcgggcccagctttcaccagcgggggacccagatacctggaaaactgaccaacggccaacaccagagcccttcccagcg

SEQ ID NO: 264551 - DNA, 630 bp, Homo Sapiens
ccacttccgctacaccatggcgatcaacacgctggcccagagtagtcttgtctccgaatggggaatttttgacctggtggtgagcactggtagtggaagccacgtggacattcttcagagagccatggcttgtttgacctatcattccctctgtcctcctgatgacctggctgaccgtgggctcctggatgtgaaatcttctttttatggctaagatgccatcaggctgtggggaatcatcagccgggaataggtacgtggaggggatggttgggcttttctacaatagtgaccaagccatgaaggatgatctagagctgcaggcctggtgcagagagatgactgagactggactgcagagggcccaagaccaggggttcctcatctccttagagtcccgggctcagctctgccactttgtcaccatgtgcatcttcacatgcacaggtcagcatgcttctaaccacctgggccagctggactggtactcctggatccctaatggcccatgcaccatgcagaagcccccgcccatatctaaggatgtgacagagaaggatatagtggacttactgcccaatctccaccaggcacgtatgcaaaagaccttaacaaagttccttggcagac

SEQ ID NO: 264552 - DNA, 593 bp, Homo Sapiens
gtgtggacaccacctgcacctaccaccctgaccctgtgggccccgggctggacatacagcagctttactgggagctgagtcagctgacccatggtgtcacccaactgggcttctatgtcctggacagggatagcctcttcatcaatggctatgcaccccagaatttatcaatccggggcgagtaccagataaatttccacattgtcaactggaacctcagtaatccagaccccacatcctcagagtacatcaccctgctgagggacatccaggacaaggtcaccacactctacaaaggcagtcaactacatgacacattccgcttctgcctggtcaccaacttgacgatggactccgtgttggtcactgtcaaggcattgttctcctccaatttggaccccagcctggtggagcaagtctttctagataagaccctgaatgcctcattccattggctgggctccacctaccagttggtggacatcctatgtgacagaaatggagtcatcagtttatcaaccaacaagcagctccagcacccagcacttctacctgaatttcaccatcaccaacctaccatattcccaggacaa

SEQ ID NO: 264553 - DNA, 734 bp, Homo Sapiens
cccttatccagtgcatacatagcaaacacagccccatcatgagctttcactgtcttcagtagtagaatgtctttccaaataaaaatatctccagtagctgctcctgagaacactagatcttccattcgtccgtaagaaacacacatcattgtttccaattttccaacgcttccaaaagttcctcttttagaagtgaagcccccacctgcttgttgccagaatttgatgtgttttatcccaactgtaaccagtttgtcaacatggtgtgggttacactttaccacaaatatcttatctttatgtcctcttgttgtggctatcttttctccctttttccagtcccaaaatacaatactgtgaaaatcgtctaaaccaaccgacaccagacattttccatcggctgaaaaatcaagtgcacacactcctctctgatgttgtcctttcaacagcgacaaacattttagagtttgtgtgtcccacacatgaatagcagcatctcttccaacctgcccagtagccacatagtccttcactggatggatggtcaggctgagaatgtcgtcatcgtgccccaggtacagcctctgggagtgctgctgccgattatacacgacagcaactgcagcaatgtggtagactacttctccagcttgagtgtagaacagattgtttctacagtcgtagcctctataaccgtgtatgaactggagtttcaagctgtcctcaggagcctt

SEQ ID NO: 264554 - DNA, 419 bp, Homo Sapiens
ggcacgaccacggttaacaggaagcccacgctcgtgcaaggcttagaaggtcagaagatcacatgcgtggcttgtgggtcgtcccacagtgtggcgtggacaactatggatgtggccacgccctctgtccacgagcccgtcctcttccagactgcaagggaccctttaggtgcttcctatttaggcgtgccttcagatgtcaattcttctgctgccagtaataaaataagtggtgcaagtaattctaagccatatcacccttctcttgccaagattctcttgtcattggatggaaacctggccaaacagcaggccttatcgcatattcttacagcattgcaaatcatgtatgccagagatgccgtagtgggggccctgatgccggccgccatgatcgccccggtggagtgcccctctgc

SEQ ID NO: 264555 - DNA, 677 bp, Homo Sapiens
tgccacggcccgcataggcataatcaactatagccataaggtggagaaggtggctaatttgaagcagttctccagcaaggatgacttcaagttggctgtggacaacatgcagtatctgggggaaggcacatacacagccactgctctgcaagcagccaacgacatgtttgaagatgcaaggccaggtgtaaaaaaagtggccttggtcatcactgatggacagacagattctcgtgataaagagaaactgacagaggtggtgaagaatgccagtgacaccaatgtggagatatttgtgataggggtggtgaagaaaaatgatcccaactttgaaatattccacaaagaaatgaatctaattgctactgacccagagcatgtttaccagtttgatgatttctttaccctgcaagacaccctgaagcaaaaattgtttcaaaaaatttgtgaggattttgattcctatctcgttcaaatttttggttcatcgtcacctcaacctggatttgggatgtcaggggaagaactcagtgaatctactccagagcctcaaaaagaaatttctgagtcattgagtgtcaccagagaccaggatgaagatgataaggctccagagccaacgtgggctgatgatctgcctgccactacctcatctgaggccaccaccacccccaggc

SEQ ID NO: 264556 - DNA, 377 bp, Homo Sapiens
  misc_feature (98)..(189): n is a, c, g, or t
ttaagtctacaaaataaatttagatcaggaatttttaccaatgtttaagacatgcacaagaagttgtgtttgaagccctaccaacatactcaaatatnnnnnnnnnnnnnnnnnnnnnnnnnnnnnnnnnnnnnnnnnnnnnnnnnnnnnnnnnnnnnnnnnnnnnnnnnnnnnnnnnnnnnnnnnnnngttttttaattggaaaagcactcgtatctactcacaaccagtgtctttgaggcggttgatgggcattgggaaagaaggcggaacacaaccgaggaaatccaggcaccttgtttcttatggggatcttcttgtggattccattacactggatcggtaactggaatcaggacttttcccaattattacct

SEQ ID NO: 264557 - DNA, 668 bp, Homo Sapiens
catcattggcaccttcttgcaggttcaggcgccggatctgatcggtggagaggcggagggacttcttgtaggtaggagtggagggtggagtggagggtggcaaggaggggatctccaggatcacagggctgtctggggcatcgtcatcactgctcaggacttctgtcttctccccctgctgctccttggctgcagtcttctccttctgggcactgcgctcctcggccaggaagtccctgcgtcgccaggaaaaccaccatcgcccacccttccggggcatcttctccctctccagcttgtccatggtgctcttgggcaagtttttctggaaggcttgcagggagaggatcatgggggcagccacagcccagttataatgctttccattgattttcaccactaggtttgggtcatccaaaagtccggggtttttggtgaggccctggtaagagacgctgtgctggttgaatttctctagggagatgtcccggctgtcagccagtccaccacagagggacagtgctattgtatccactgtgtccagagtgggttcaggttcatgttcagggttggggtccctcagggacttctgactgctgggttcactccatcttctggcccccagccacagagtcactttgggggaagtaaagcgctgcattctcaga

SEQ ID NO: 264558 - DNA, 692 bp, Homo Sapiens
tcatccttgtaccactggaatccgcggggggaaccgccatggcttcgcagcgcaggacggcggcccggcccagcgcggtgcgggcgctggtcacgtccgtgatggtcggaggatagttgactgtgaccagcacgcggcggctgtcgggcgccgagttaaccccgttgtgagtcacgcactcatactccccggcctggccccgctggatgtcagagatctccaggatctctccctccgaggtgaagccgtctcggagctgtctccaggtgaccgtgggctctggccgccccacggccaggcaaagcaggttcacattgcccccctcattcaccgtcacaggcgacgagatgttcacaatgcgggcagggacgtggacaatgaggtagacctgagtggtgtacggctggtggcgggtctggaaggagcaggtgtagaggccctcgtcgccgagccccacctcggtgatgaggatggagaactcctcgggggtgttgatgagcagccgcacccgcgggtcgctggtccagcggtcattgccggcatacaggatgttggagcggttcagccaggccacgcgggtcacgtgctcgtcgatgaagcagctgagggtggcgttgtcaccttcacacactgtgtagttgtcggcaggagagttgaactccaggctctgggagagcagccctcggctgatg

SEQ ID NO: 264559 - DNA, 261 bp, Homo Sapiens
tggtgacggtgacgtcatcgatgtaggtggggggtgtcgtgtatagaagcagagaacacagcagtcctgcgtagctgaagaagtcaaagtctgtgttctggacaaagtaacccttgggataccaccatggcatagaagtgggcactgccaatcctcagcaccactcttgagcacaggtcctggatccatcgctccagcagggtcacctcccgttcataccacaaccagctgacaaaatgccgcagccgccagccctggccg

SEQ ID NO: 264560 - DNA, 861 bp, Homo Sapiens
agtgggcatcagagcccattctggaaggatcggatccctttgagaccttccgcaaatgcttcaggcaattctgttatgaggatgtgactggaccccatgaagctttcagtaaactctgggaactttgctgccggtggctgaagccagaaatgcgttccaaggagcaaatacttgagctgctggtgattgagcagtttctcaccattttacccgagaagattcaggcttgggcacagaagcagtgtccgcaaagtggagaggaagcggtggccctggtagtgcatttggagaaagagactggaagactaagacagcaggtcagcagtcccgtgcaccgggagaagcactccccacttggagcagcgtgggaggtggcagacttccagccagagcaggtggagacccaacccagggcggtgtctcgggaggaacctggaagcctccactcaggacaccaggaacagctgaaccgaaagcgagaacgtcggcccttacccaagaatgctcggccttctccctgggttcctgcccttgctgatgaatggaataccctagatcaggaagtgacaaccacacggcttcctgctgggtcccaggaaccagtgaaagatgtccacgtggccagaggcttttcctacagaaagagtgtgcatcagattcctgcccaaagggacctctaccgggatttcaggaaggagaatgttgggaacgtggtctccctgggaagtgcagtgtctacatctaacaagataacccggttggaacagagaaaggagccatggactctaggtctgcattcctctaacaaaaaaggtatcctacgaagcaactacgtcaaggaaaagtcagttcatgctatca

SEQ ID NO: 264561 - DNA, 671 bp, Homo Sapiens
ccacacccacctggagggcgtcctgctgctggccagtgctatggtggcacatgccgaccaccacctgcgaggcctcttcgcagacttgctccctcggcttcgcagcgcggacgacccgcagcgtctcacggctatggccttcttcacagggctgttgcagagccggcccaccgcacggctcctgcgggaggaggtcatcctggagcgactcctcacctggcagggagaccccgaacccactgtgcgctggttgggcctgctgggcctgggccacctcgcgctgaatcgcaggaaggtgcggcacgtgagcacgctgctgccggcgctcctgggcgcactgggcgaaggcgacgcgcggctcgtgggtgcagcgctgggcgccctgaggaggctcctgctgcggccccgggcgcctgtgcggctcctgagcgcggagctgggaccgcgcctccctccgctactggacgacacacgggactcaatccgcgcctcggccgtcgggctccttgggactctggtgcgacggggccggagcgggctccggctggggctccgcggccccctgcggaagctggtgatgcagagaatcgtgccgctgctgctgcgcctgcatgaccccagcagggacgctgctgagagctcagagtggaccctggcccgctgtgaccacg

SEQ ID NO: 264562 - DNA, 618 bp, Homo Sapiens
taggaacggtgagtgggcatgggggaaggtgcctcactgggcaccttgctgaggatgaagcgggtctcatcgttctcctccaggttggagatgtccttcatcatgcggcccttcttgtaggacacggagagggtgttggagccatcagagagcaggtggaagtgccgcaggacgaacaccacagggatgggcagcgtcgccacgacgatgagggtgatcaggagtgccatggcccagttggggaaatacaggtagcgctcggcagcctcctccttgatccaggcgctgtagcccgggggcgtgacccccagctggatgatgctggctgtggtgagcacagccatgcatagtggagacacgaacttccacatgtagaaatagaagcggtaggggcggaagcccagcatctccgtcagctcctgcatgaacttcttggttccataaatccaggccacagcgatgttctcaaggatgacgatgagagtgagtggcagggtggctgagtagtcatcgaacatggtgacaaagtagtttccggagcgctggaagaacaacagccccacgaggaatgcaaagacacagcagcccactgtgaacatctccttgggcaccttgaag

SEQ ID NO: 264563 - DNA, 538 bp, Homo Sapiens
ttttgctcttgggctggcttctgggagaaggctctcttaccagcaaacaaagaaaactctctcccctttgtcagtcttcttctgtacaacattaattcttctctgcggaatcgctctgggtctagttccgagtagtcccagctgtcatagctctgtgggctaggataggtgcctgaaatccacaggctcattgtgttacagatgtcagacttgaattcgtgcgtgtcgaaccaggactgtggaaagcagcaacagaagctggtgtacacggctttgctgagaagtgatggcagcctttttaagagcgcctcttcagagtgggacttgggtacacgaaacaaaagtaaggcatagtgctgggctatccggtcaaacagattattctggagctccttgtttggctggtacctctcatgaaatatccaccaaaagctatccagccagatggctcttggagaagaagaagagagaaacttctctaattctctacctgaacagaaatgcttgccactaaggcagtctctctcagcccggaaaa

SEQ ID NO: 264564 - DNA, 570 bp, Homo Sapiens
tctcaacatcttcctctcgggcatcgccaactcagagagagcagaccacctgaagaagcgcatctccaacatcaaccgctacctgacctacagcctctacagcaacgtctgccgcagcctctttgagaagcacaagctgatgtttgccttcctgctgtgtgttcgcatcatgatgaacgagggcaaaatcaaccagagtgagtggcgatacctcctgtctgggggctccatctcgatcatgactgagaatccggcaccggactggctgtcagaccgggcttggcgagacatcctagcactctcgaacctgccaaccttttcctccttctcttccgacttcgtgaagcacctctcagaattccgggtcatcttcgacagccttgagccccaccgggagcctttgcctggcatctgggaccagtacctagaccagttccagaagctgctagtcctccgctgcctgcgtggggacaaggttaccaacgccatgcaggactttgtggccaccaacctggagccacgcttcattgaaccccagccccaggtggtctcagcatctccccctgccct

SEQ ID NO: 264565 - DNA, 483 bp, Homo Sapiens
ggcttggctgcctttggatgttggggttcctcagagctgtgctgatgtcgttgaggagccggggcagtggacccagcttcaggagcccttccttgctgagctggggcagcacctcccagagtagggcatgcagtgtggagagctctcggcccaagtcgatgtaaccctcaaagctactgctgttggttagcgtgtccagattggagatctcatacaaaaactgctgcatggaaccccattccagctccagaaactcattcatgaagcccagaaagtcctcctttgaggtaaacttggaaaagttggccaggttctggatgaccttggcaatgagggtgagggttcgtgaggtctgctcatctgggtactcctgcataagcccaaagagactgggcgacataatcgctgggcagaggaagcgcaggaagagtgaggcgctgataagcctgtctgcgatgtcctcccggcctcgctctgcgcagc

SEQ ID NO: 264566 - DNA, 665 bp, Homo Sapiens
caggagtaggagaacacaggggttgctggggtcatcgaatgaagcaccaatctcatagtcagtattgttaaataaacatgttcttggttcacagtatccgatttcacagcaggtgtcattagattggaacttcacaagcttctcgccggttttgcatgtgggtggagaagggcactcctcaggtttacagtctatagtctttgcatcagtacaggtacctctgtggcaattggcagtccatatgtctccaggagatttctcttctcccaatggaccgtgacaaaccggaactgggggaaaggaaggtaaaacttccggtttaatttccggttccacctccccgggtgccaccaccggggtttccgggtgggaaacctggggtcctggtgggacccccggtggaacccaaggggaacccggttgcacccccgtttccaaaatttccttgaaccccggggaaacagggaccggcgggggaagaagtccaagaacagtggttttggaagaatcctccctggaaagacccgaaaaggaaatttccgggaatcccgttactccacctgaaaccaccgtggctccctccttggttgtggagacccccgattaacccggggtagtggccgaaaaaacttccgcctccgtggctaccaccacccctttaaaaa

SEQ ID NO: 264567 - DNA, 548 bp, Homo Sapiens
ccacttctactgacgttggagttgccactggagttggaatggaagctgggatcaccaacataatttcagggagatgccaacctactggaagtaaaacaggctacactgtaacaggctctggaacaacagccttacctggaggtttcagaacagatgccacaacttttaaaggtgatgttggaaccactgaagcagaaatttcatcaggcaataccccaggatcaacgggagtcaccagcatccaagaaggaaccactgtggaatcaagtggaatcactggaatcccagaaacttccatctcaggtccttccaaggaagcatctgacaaaaccactgctcctggacctcctaccacagcagtcactgcttccacaggagtcaaagaaacttctgaaactggagtgcaaacaggctccaccttggttacagctggagtgccaacaagaccacaagtatcccagccagaaaccactgtcgtggcaaccagagaagtagaaaccgaaaataaaacagaatgtctagcctcacttccaccagctccaggttgg

SEQ ID NO: 264568 - DNA, 727 bp, Homo Sapiens
ccccttctttgccaggtggtagaacattgccattttcatctataatctggacatcatagggcagcattcctttccccattgaacctggtttaatttcttggcctttctgattggcacaaatcattcccacttccgtctgtccatagccctcatatagctccagcccagtttgcaccctccactgctccagcacttctgggttgagtggctcccctccggtcaagcagtgccgcagactcttgaatttatatctcttaagatagggcagcatgcctttccccatcgaacctggtgtaatgtctaggcccgtcagattggcacaaatcattccgtctaggaaggggtcagtgtcaaactgtgccattcgatgcacaaaaacacaggctccacacagccaggaagaaaacacactgccaatggcggccttgacccagacagtgacaaatgaatttatatctcttaaggtctttttgcacgagcatccggtacacagtgggaggactgcacagggtcgtgatgggataagtagtaagtgtgtctaggaaggtgtcagtgtcaaactgtgccattcgatgcacaaaaacacaggctccacacagccaggaagaaaacacactgccaatggcggccttgacccagcccgtgtcagacatattccatatgatatctgaggacttcaagtccagccaataccttccgcagagggtgaacccaatgccgaggctgc

SEQ ID NO: 264569 - DNA, 372 bp, Homo Sapiens
gcgcgctgcggagggcggcggaggagaggcaccaggcgggccgtcgggaggtggaggcgctgcgtctgtggacccagctccaggagctacggcgggaacacgcgcggctgcagcgccggcttaagcgcctggagccctgcgcgcgcctgctggagcaagcgctggagctgctgcccggggaatccaagtggattcagattcagaacacagcagcggagaagactctgctcctgggacgcagcaggatggctgtgctcaacctgttccagctagtgtgccagcatcaggggcagcctcccaccctggacatcgaggacacggagggacagctagagcacgtgaagctgttcatgcaggacctctctgccatgc

SEQ ID NO: 264570 - DNA, 564 bp, Homo Sapiens
  misc_feature (474)..(474): n is a, c, g, or t
cactgaagatacccacagcagcctgttcttggccctgtaccttgcaaacgacatggaggaggacctggagggccccaaatgtgagatttttccatgggccctgggaaaagattggtgtttacgagtggggaaattcctgcaccagagggataagctttgggcacggatgggtttccgggtctgttgtgagccgccagtgctgtgaggaggtcatggcaaaggagccattccactgggcttggactcgggaccggcgcccccaccatggtggggttcagaggatctgtccacaggtccctgttcgccttccccggggccctggcctctcgccgccccactgttccccctgtggattgccccagcactgcagcagccacttgcttaagcctgtgtcatccaagtgcccttctctgacctctgaatgtcatcgccctccctcccaaaattatctctcaagggtcaaaaacgcctggngtggggactttctcatcgtcttgcctccccagatgcaactggaaccaggcacctactccctccgcatcttcccaaagcctccggcacgcc

SEQ ID NO: 264571 - DNA, 624 bp, Homo Sapiens
tcctcaaagaaccctgtggcggcagggccaggaaggatgcggttccgactgcatcctttcccccagccagttcctcccttcccaaggatcctggtgagattgagtgggaaactctcggccccgtccctcgagattccagagccacctgctgaaggggactttctttgcctttcaaacctcaatctgcagccatctcagggcacgtctgctgagaacagagctttgtccctgcttagccgcttggccacctcctttagctcctccatgttgttggcatccagctgggaggtcatgaaggactgggacggcttcatgtcattccaggaggtgctggaccggcgtcggtggaagcggcagctcttgatgcggcgagtggctgccttatggatgtacacggagttcttcatgatcacaggcatcttggcctccagctcggcattccggatgcactcctcaaagaaccttttcagatggctcacatcagcccgcatcctctcctccttctccttattccgcaccttggaattcagcccctgttccaggcttcgcaaggccccttctgcctcccggagacgcctctccaggtccatgcggaccttcacctcagccttgagctcccgctca

SEQ ID NO: 264572 - DNA, 665 bp, Homo Sapiens
accatcgaaggcccaccaggagtcttccggtcacactcttcacagaccagaagtccagggacagcgaggagcagcaccatgacaaaacagcccacaaagctcttgctgaaccagtcgcagcaaacgtaggtgacgatggcactcactcggaaaaacaggtggaaaaaggtggccaaggggtgtctgatcttggctttcctaaaggccagctcctcctcgtttccaaggaaggtcactgatctccctttaccacttcagactttgctggaggtgttagcgtggctcaatggaatgttctccccggtgcatatgacgcagaaactcaggctgtagccctggggacgcatcattaggtcagcagtccccagacggtcatgatgacactgttttttttcctccccttcgaagaatccagtactttcccgccacttgactccaaatatcttttgccctcttcgaaacacggtcatctttgaagtgaaacgtgacagcagccactgccttcccgcctagcagagatgacggccagttccctaaaggtaaaggttgggtttttccaccaccagtcactgagctccaagctcacacgcagcccacggggcaggtgtctcatgtcatcggggaatgcgtgttcctgatcttggctttcctaaaggccagctcct

SEQ ID NO: 264573 - DNA, 244 bp, Homo Sapiens
cctccttgttcagcagccgctggggaggaagaggggcctgaggcagctaagacgtcctctactatcacgtcagaaaactcagactgaacccagaaatcgccaaggggctcggctgtcaaccactcgcaggagcattcaaccaaaaacgaagccgtctgcggatcagaaacgatctgtgaccttcattgaggctcagccagagccagcagctgccccaacagatgcgcttcctgcaacaggccaa

SEQ ID NO: 264574 - DNA, 436 bp, Homo Sapiens
tctcgtagctacataatcggtgtaggcatctcctggaatcttaatttgtgcaaacccgaagacacaaatcttgattattccttgcttagttattagaatattttcagggtttatatctctgtgaatacagatatgtatatgacagaaattaagagcttgaagtgtttgccataatacgcttttgatcactccatcagcaactccatttgggcttctttccagctcatttaaaagtgtataatcacagtattcaaaaactaaatgcattttcctttttctcctgaacacctcgatgaggttcacaagatttggatattttaattgcttcaacaaacgtatttctcttagtgctattttcttaacaacaggatcatcttcagattccacaaattttttaacagctactacttgtccagaggatttgtttctgcatttg

SEQ ID NO: 264575 - DNA, 629 bp, Homo Sapiens
gcactgtccgcctgtgggatgtggcaagagcgaagtgactgcgggtcctgaagtttcaccaacgtagggtggagacggtcagcttcagccctgactcgagacagctggcatcaggtggctgggacaagcgggtgatgctctgggatgtgcagtccggccagatgctgcgcctcttagttgggcaccgtgactccatccagagcagcgacttctcacccacggtgaactgcctggccaccggctcctgggactccaccgtacgcatctgggacctgcggatggtgaccccagcagtatcccaccaggcgctagaggaacacagtggcaacatcagctgcctgtgctattcagcatccggcctcctggcatccggctcctgggacaagaccatccacatctggaagaccacaaccagcagcctgcttatccaactgaagggccatgtcacctcggtgaagagcataaccttctctcccgacgagctgtggctggccagcaccggctattaccgcatggtcaaagtctgggacggcaacacaggaaagtaccttcagaacctgaagcagggagtcctagatgtggcccacacctgtgccttcaccccagatgggaaaatcttagtgtctgga

SEQ ID NO: 264576 - DNA, 834 bp, Homo Sapiens
gcagggccacctgcatgccagcaccactgtgctggcattgaagctgctgctgtactttctggcaagcccctccctccgcacacggtttagagatggcctgtgtgcaggatcctgggtggaacgcagcactgagggcgtggatattgtaatggacaacctgaagagccagtcaccactgcctgagcaaagcccatgcctgcttcctgggttccgtgtcttgaatgactttctggcgcaccacgtccacattccagaggtctacctcatcggaaccaccttcttcctgcagacaccactcacagagctgatggacgggcccaaagacagccttgatgccatgcttcagtggctcctgcagaggcaccaccaggaagaagtcctccaggctgggctgtgcacagaaggtgccttgctcctcctggaaatgctgaaggccaccatgagccagcccctggcaggttctgaggatggtgcctgggcacagaccttcccggccagcgtgctgcagttcctcagcctcgtccaccgcacctacccccaggacccagcgtggcgagccccggagttcctccagaccttggccatagccgccttccccctgggagcccaaaagggggttggggctgagtccacccggaacaccagcagtcctgaggccgcagctgaaggcgacagcacagtggagggtctccaggctcccaccaaggcacatcccgcccggaggaagctgagggagttcacgcagctcctcttgagggagctcctgcttggagcctccagccccaagcagtggctgcccctggagttgctcctggaggcttctccagaccacgc

SEQ ID NO: 264577 - DNA, 428 bp, Homo Sapiens
ttctgggctggggtgcattctggaacaaaagcaagtcacctctggacatcctcaacagagtggagcaggctagtgtgaggatcctagacagatggagtgtgatgattcgtgagactcccagacaaaccccgctgctaaaaggacaggttgaaatggatgtaacacgatttgaggctgctgccatccaacacttagaatctgcagccaccgagtagaacaaaatcctgaagactcaagtaccccagcagagagtgatcatcgcaaccagattcttgtgttcagctgtggaagattttgtggttgatattgtaaaggcctggggtcagataaaacagaacaacactgcaatagtgtctgtgattttgaaaagtgacttaatgtatgataggctcagtgtcctgatcgatgtcctggctgaggaggcagca

SEQ ID NO: 264578 - DNA, 601 bp, Homo Sapiens
ggatcctccctcaccggagttgagaaatgttccatgcccgattctgtcaggaagcagatccaggagtatttgtgtttcctttttttggttcggaatctatgaaagaagcaatgctaacttcagaccggctgtatgagcgttctaaagagaggtaccaagaagtcttttgcttgtcctacagtagggactccactgaggtcaaggccaagaactgtaccctcagacagaaaggaagaactcctcggcaagttgtacagactccttggctactaaagggccacctcttctgtcaactgctataaaatacctaacatcaatgtccaagtctttcttggctggactgttttataccttcaagcatagattccacataagtctttttagacattccaggagaattttctcttctgggcgtgctccttagttccaggaacttgacgccgacatctgcaaattcttttatgacatcttttgtgaccattagaatatcttcagggctactaataagcggatgaatatttgacacctgcgaaaacattcttccaaagttcttttctttcccttgtcaatcacagtcatctgatcgtggattttaagatct

SEQ ID NO: 264579 - DNA, 755 bp, Homo Sapiens
  misc_feature (283)..(305): n is a, c, g, or t
ctccacagcccttgtgtcagctgtcgaagtttagcaatactatttccaaacatgggccagtaggcagccagcaggcaccagaaagctgagtgctggcagaaaaagcctcagacacctatagcagtccaaacagtgactcatcctgctattgccaggataaatatgggaataaatggtatttttctctaagcaggaagaattgtcaaaatgcttatcactttataaaatataacagattgtgcctgatcatgttttgaaatgttctaaccattcactcgccggnnnnnnnnnnnnnnnnnnnnnnngagtttagtaatagctttcacttgttttccctctttctaggaggcctggagaacccaggagtttccaagctgtgctgccacccgagctctggatccacctggctgtggtggcctgtggcaatcggctggaggagacgctggtcatgctcaaatcagctgtgctttttagccacaggaagatccaattccacatcttcactgaagactctctgaagcccgagtttgataagcagttacgccagtggcctgactcatatacaaagaagtttgagcacagaatctaccccatcacattttctgttggaaaccctcaggagtggaagaaattgttcaaaccctgtgctgcccagagactctttcttccggtgattttaaaggaagtggactcacttctcgtacgtggacaccgatgtcctctttctgagacctgttgatgacatctggaagctt

SEQ ID NO: 264580 - DNA, 649 bp, Homo Sapiens
gatttctcctggggagtgctgcccgttgaagttgtccaggtctgtatctgacagctgggatatggttccagcaggttccccagaaaggaccttcctgtttaaggccatgtgacgcttgtctttctgaatctcgaagacttggtctatcttttctttcattttctgtttgccccccttagatgagctggtctgctcctcttgagcctttgtagtgtttgtggtggccaaaaagtctgattctatttccatttcttttttttcatccagagatatatcttcggatggtgggatcacaaatacaaaatgctccaggtcgtctgtcatggtcaaaggtggccgcttcaccgggtaggagacgattgagaataaggcgggaggcgggatgggtggtccggaggcacccagacccaagatgtctaggatctgctctcctttgggaagcttgacactctctagggcctgcttccagctcaagccttcaaagtctggtgtctggatgtctaggaagggtacgcccaggtccttctccttcttcccttcgtggtcctcctccccttcccccacccagtcgctccgctcctccagggctcgcagcttctccaggcgctcccgctccgccttctccctctccaggcgctccttctccgtg

SEQ ID NO: 264581 - DNA, 660 bp, Homo Sapiens
  misc_feature (404)..(404): n is a, c, g, or t
  misc_feature (604)..(604): n is a, c, g, or t
  misc_feature (640)..(640): n is a, c, g, or t
tttagctaatggcccaagctgcccgagaagagcaggggtgtgccatgggggccacactgaactcttgcatgtgcaccaaagccagccccaatcatggccggcacaagggttctgcaggtccagcctgtggctctcatgtctatcagcgtacagacagcaaagacacacgacgcgatatacaggagcagaggcgcccagaacacgctgtcccccaataccagccacaagcggagccagctcagggtgtagtgggtgaagccgtcctgcagctctgtgatcctacaaggcggaggtggcagtagcacaggactccaccgctttggaggctgcccagtcaatttgggtagccagtgagagtcctgacagcagcacattggacaccagaagacacccaaagggagagngagcggaagaccttctggtgtgggctgggcagcaattcacttgaaggagaaacagcccgggtgtggagaggcggccatccttggagggatcctttctaaggagccgagaaatcaacgtcagagcttaatctatctgattctctaacaactgcagaccttccatgagtcaagctttgtgtcaaaaggacaaattaaaaggncctataaattgcaccacccagcccaatggacagatnccccaggttgtcagattctt

SEQ ID NO: 264582 - DNA, 614 bp, Homo Sapiens
ctattcccatgtgctcagctttctgagcctctgcgcatctgaacttctacaggctgctctttgtaaatctggttatctgtaagttggtaccaagagtgaatgaggcccaggggttgaagaatatggcaagtggtgatggaggaagggaaaaattaaagaagacttgaagtggacaaagcggcctggtagtgggaacagaggtcaggggtccaggagtgacagtacaaggaagctgcttctcttcaactgggatgtggaaggctctggccaggtccagccctaacaccactgatctggaacaaggtagatggtcaggaccaagtaggagtggggcagctttggcccctccaaggatttgccaccccagtcttccagcatttacaggttgtgctccagcagattataccccaaggtctgttctggaaggatgacatcacccaggatgcaatgatccaaaagatggagcatgccagcagactgcatccccaagaaccatgcctgaaggatgggaaggcacttttccccactaaaaccactgagagccccctggccaaggtgaacagggatcagtgcattacctccgaagtggtttctaaggccctgaaacaagaggt

SEQ ID NO: 264583 - DNA, 609 bp, Homo Sapiens
aggcaggcggtatctggagttaatgtatgctggagctgctctaaaggacagttggagtcttgctgatgttggaatatctttctgttcaactctcaaatgctttgttaaggaagaacacaagcctactctatacgtgttcaatgctgtaactcaagacacaatgccagtaatggagagcatttcccttcttgataaaacagtgtctgatatgagaacactggctaactctgagatgtggcctccccgtgagtgtctactgtctccgaaccccaaggggcctggagatgtatgattgcaacaccctcaaggactaccagactgatattggcacaacacttcgcttggatgtctgggatggatggaaggaatttctgatgggttgtctccttggacaaaaactgaaaaaacaacgctacttatcaaaagaaggaccagtactcaagtatcagaaaagggtagccctgtacattgctgctttttgtgggtacattgaactcactgaatgggccctgaagcagggtgcgcggccccacgaggcaaacaaagttcacccctatcgagcatggtgccatgaagcccttcatgcagatgtctctaaatgccccattc

SEQ ID NO: 264584 - DNA, 1025 bp, Homo Sapiens
ttccgtgagggcgtttctagatgaagatgacatgagcttggaagaaataataaatcggcaaaatgcagctcgaaataacagcccgcccacagtcggtgcttttggacatacgaggtgcagcgccttccccttggagcaggaggcagacctcatagaagccgccgagccgggaggtccacacagcagcagaaatgggctctgccatcctctgaatcacagcaggaccctggcgggcaagagaccaaaggccccccgtggggaggaagcccatctgccacctgtctcggatttgactgttgagtttgataaactgaatttgcaaaatataggacgtagcgtttccaagacaccagatgaaagtacaaaaactaaagatcagatcctgacttcaagaatcaatgcagtagaaagagacttgttagagccttctcccgcagaccaactcgggaatggccacaggaggacagaaagtgaaatgtcagccaggatcgctaaaatgtccttgagtcccagcagccccaggcacgaggatcagctcgaggtcaccagggaaccggccaggcggctcttcctttttggagaggagccatcaaaacgcgatcaggatgttttggccgctcttgaatgtgcagacgtcgacccccatcagttcccggccgtgcacagatggaagagtgctgtcctgtgctactcaccctcggacagacagagttggcccagtcccgcggtgaaaggaaggttcaagtctcagctgccagatctcagtggccctcacagctacagtccggggagaaacagcgtggctggaagcaaccccgcaaagccaggcctgggcagtcctgggcgctacagccccgtgcacgggagccagctccgcaggatggcgcgcctggctgagcttgccgctctgtaggcttggcgctgggctctcggtttgttcttcatttttaaagaaggaagggtcatatgtttattgctaaactgtcaaaaaggaatatattctgattaaattattactcctcaaa

SEQ ID NO: 264585 - DNA, 503 bp, Homo Sapiens
ccccttcgcctttggatgggtgatgttcttagccttcatgtaccaattgccatatttgctgcagaaattctcagtctcatccatcactatgtgtttaatctttagaaactccccttgcatgaaagttttcctggtcacagcttggcaggtggtttgttgggtcacaaaatcctttagggagtcgctttcacaaacatagaggatctcttttggtttgcagtgaaacaagtccttaattttctccatgatctttatggctagggctgtcttcctgactcctggaaagcagtagatgaataattcacgtgtcttctgaagactctcagaaagcaactggctctgctccattatgagcaagttgaaaaattcacagcccatctggtcactcagaagagatctggaggacagggagaccaccaccagagcctgcagcaagtcttccatttcctcctcatcagcaagcctgtaggacctggggtaacgcagggggatctcaccaggag

SEQ ID NO: 264586 - DNA, 647 bp, Homo Sapiens
agatgtccccggcctggaggtggggtggtggccaggccgtgctttcgcaagcctatggggggtcactctgagagccgttctcccgacaccatcgcctaccgcggcgtgacccgggctagcgtctacatgcagccccccatagacgggcaggcccacatcaaagaggtggtgcggaagatgatcagccaggcacagaaggtgatagctgtggtcatggacatgttcaccgacgtggacatcttcaaggacctgctggacgccggcttcaagaggaaagtggccgtgtacatcatcgtggatgagagtaacgtcaagtacttcctgcacatgtgtgagcgggcctgcatgcacctggggcacctcaagaatctcagagtgcggagcagcgggggaactgagttcttcacgcggtcggcaaccaagttcaagggtgccctggcccagaagttcatgtttgtggatggagaccgggctgtgtgcggctcctacagcttcacgtggtcggccgcgcggacggaccggaatgtgatctctgtgctgtatggccaggtggtggagatgtttgaccggcagttccaggagctgtacctcatgtcacacagtgtgagcctcaagggcatccctatggagaaggaaccggagccgga

SEQ ID NO: 264587 - DNA, 524 bp, Homo Sapiens
ccggatgctcctggtcagcttcctgttagacatggcagtcagggcaatgaccagccacatcaacatatgctccaaattgggagccgagctgaatgactttgccgtcttcaccaccttcggcttggcctccgctctgctcctaggcgtggatggacttctgagtgggatcctggccatcatctatgtgtcagctgcttctttccacttgtgcttttattcacctggagtcccctccacatacaagggtctaccctgcccctatgcttcctgcatcttggcttccacctcccttctgaccaaaggcaacaggttcatcctctgctgcatggcctcactcatgattctcttcatgatggaccagagctactatccatatgacaaaatcctggagtctgagaactggaaaaaattggtttatataggaggtgtcatcatgctgtttttctcccccattgtctctgtctgctttatactgcctgatgtggtcgctctcgtacatcttctttccagatactctgtggggc

SEQ ID NO: 264588 - DNA, 824 bp, Homo Sapiens
gcagaggacccaggcccacctcctggtgcttccaaaaggaggaaacacacctgctcctgcagaatcgatggtcaatgctgtttggattaacaaggagagaagaagctcactgtccctggaagaggcagattctgaggtggaggggaggctggaggaggctgcccagggctgccttcaggcccccaagtctccatggcacacgcacctggagatgcattgtttggtccaaacctccccccaggacaccagtcatcaagtacatcataggggcaagcttgtgggatctgaccaaaggctccctcctgaaggagacacacacttgtttgaaaccaatcagatgactcagcaaggaaccggaatcccagaggctgcccagcttccatgccaggtgggcaatacccaaacaaaggcagtggaatctggcttaaaattcagcactcaatgtcctctttccataaagaacccacacaggtctggcaaaccagcttactatccatttccccagaggaaaacacccaggatctcccaagctgcccggaacctgggcttatatggctcagcgtgaagctttctattctgccagatgtcttgaccttgaggccacctatggccttatagaagaaccaaggaggcagagccacaacgaggtctctagctatgagcaagaactggactaacctaattataggaattgtgggagacgaacttcacaatggtaacatggttttacccttccaataagaagagacttcccagaccaaattgcccacagtttaggatgaagaggactgtctggtcagtgcagccccattctgacattacta

SEQ ID NO: 264589 - DNA, 708 bp, Homo Sapiens
cggacgcggggagtgctggagaacatcttcggcgtgggcctgagcagccttgtggccttcctgggctacctgctgctgctcaagggcttcttcactgacatctgggtcttccagttctgcctggtcatcgcctcctgccagtactccttgctgaagagcgtgcagcctgatgcggcgtcccccatgcacggccacaactgggtgatcgcgtacagccgtcctgtctacttctgcatctgctgtctgctcatctggctgctggacgccctgggctcagctcagcccttcccacctgtctccctctacggcctcacgctcttctctgcctccttcttcttctgtgcccgagacgtggccactgtgttcaccctgtgcttccccttcgtcttcctcctgggcctcctgccccaggtcaacacctgcctcatgtacctgctggagcaaatagatatgcacggcttcgggggcacagctgccaccagcccgctcacggcagtcttcagcctctcccgcagcctgctggctgctgccctgctctacggtttctgccttggggccatcaagactccgtggccagagcagcacgtccctgtcctcttctcagtcttctgtggcctccaggtggcactgtcctaccacctgagccggcagagcagcgaccccaccgtgctctggtctctgatccggagcaagctgttccctgagctg

SEQ ID NO: 264590 - DNA, 376 bp, Homo Sapiens
ctgctgaacttgaggcctgtgcacagccaatgtgggggcttttatcacattgtaaagttagggaaactcaagagtatacccgaaatgttgttagatattgccttgaagctcttcaagactggtttgatgctattaacttcgtagacgagccagcacctaaccaagtcacttttcatctgccactacatcgttactatgctatgtttttgagtaaggctgtgaaatgtcaagaactagatttggattctgttttaccagatcaggaaatgttaatgaaactaatgattcacccactccaaattcaagcaagtcttgcagaaatccacagcaatatgtgggtaagaaatggtctgcaaatcaaaggacaagccatgac

SEQ ID NO: 264591 - DNA, 698 bp, Homo Sapiens
ccgtacaccatggcaaaacccagcagccgctaccagcgaagagcgatgcagcggaatacactgtggcttgaagtataggatgaagacaggaaagtaaagcagcaggaatccaaaaaggacagtttccagcaggaccactccagatgcccagatcctcttgttccggcggcagcggtaggagaccagcatgctcaggaagatggccagcatgcagcaggcctggcaggccacgcacagcggcccgcagcaccgcggtcctcttccaccaggcacggtgtggcatccatgcagctggtgcagccctcaggacatggcagacactgcagcagtctcccagatctgccttctggcaacccgaattgcccagtagtctggaagtcactctcctctaaccccccagaggggcttgccccgtagaatccaggtcggcagcggcagaggtagcggccaagaacaaagccctgactctccaggggaacacactgggtgctgttgagatcacacaggtgtgtgttagagtaccagcctgggccactggcacactgattgatgtccacactctggagatctacgtccatctgcacctgccccctgacttctgggctgaggtctggcttgagtccatagaaggtggcagagagtgaaatgagccatccaggtcggagccgtccctcctggcatccaggaaaggaggagac

SEQ ID NO: 264592 - DNA, 819 bp, Homo Sapiens
agatgttccggagcccgtcaatgtccgtctgagggttctcagacgtgattctattcagcagagcctggcactgcgaaaagtaatttcttgaatcggagatgaaagcatcgccatgaacgagggagtagtactgctgggtcaggtcctcccactcggcctcagtgaggtcctacacggcatctgctgacgtgtcgatgtcctcatgctccagctgccccaggtaggcctggcacaccttgcacgcgatgtccacaagctgccccgggaggcccctgagctttgcctcagcattttcagcatcttgcctgctgctcaggtcgctgctcccggcctcctccctctggtccctgggcttgcttctgctgctcctgctgcagctctggtggctgaccacccacttgaggatgctggatgccatggtgcgccggaagtcttccaggaactcctgctgctcactctcggtgcagaggctgtagcagcgtgggaagaaggagtcggggttggccgggacgtaccagggcaggctccgcatgttcacgcacagcccgatcttggtggtgaaggaggctgtctttgcgtagtggttcagcatctggtcgtaggtcaggctgtgatagtcaatgatgtccctcttgatggtccagaggaggtacggcatctcattttttaccaacctagacatcacgtcgtggatgttgtctgtcttctccaaagccatttcttgattttctttgactttggcacatgtatcatcattgacccgggcgccttcatcctcgacatccggaatgaccttgggcaagaagtgtatcttcttct

SEQ ID NO: 264593 - DNA, 1153 bp, Homo Sapiens
tggtaccggtccggaatcctcgggatatcgtcgacccacgcgtcgctgcagcagaacaggcagcagcagaacgcctccaggaaacagcaaaacaaaggcagaggatgtgaagaaagtccgggagacggggctgcacctgatgcggcgagcgctggccgtgctccagatctttgctgttagccagtttggttgtgccacaggccagatccctccaaccctgtggcagagggtccaggctgacagagactactctcccttgctgaagaggctggaggtgtcagtggacagagtgaagcagctagccttgaggcagcagccacatgaccatgtcatcacctctgccaacctccaggacctctctctgggaggcaaggatgagctgactatggctgtgcggaaggagctaacggtggctgtgagggacctgctggcccatggactgtatgcctcctccccagggatgagccttgttatggctcctattgcttgtttgctgccagccttctcctcggccccagaggccatgcacccgtgggagctctttgtaaagtactaccatgctaagaacggccgtgcttatgtggaatccccagcccggaagctctcccagtccttcgcccttcctgttacgggaggcactgttgtcacccccaaacagagcctactgacagccatccacatggtgctgacagagcatgaaccgtttaagcgcaagtgcagactcagaattgaaggccttggtgtgcatggcactgaatgaccagcgtctgggtgtcccgggtgaacctcatctgcaagtccgggtcactcatcgagctcagtacagcccggagcttctgggccaccgcttgcgagtgctcactggtcgacgctcaaggccagtagctcccgtggactggcgtgcgcgcccaaagacatcagaatgcctttgatgacaagtgcttaccccgaaaagcctgttgagaggcgacagaggggtacatgagcagggcgcgcgcagggggccgggctcttgaacattcggctgacgtgcgtgtataacgtgtcccaataccaaagatgggccactagaaaggacagggccactcatagagggagggacgaacgagacacatcgggcgggcgcgcacgctgttgcgtggaacgtcatcga

SEQ ID NO: 264594 - DNA, 612 bp, Homo Sapiens
  misc_feature (351)..(360): n is a, c, g, or t
cgtttggttcagacccttaaggcgaatcttcatgggaagattatcaagctaagtggttttaaaaaccacttaaaagtagaggctacaacaaccaagggagaatgggagcacttccccaaggaaaaagagccctcgatgagtgatggggctgaagagcaggagaagagcccagattccatatgttttgaagagttgacctgtaaatggtttgcacctaaatgttctagcaaagagaagccatatgaagagatcctttgggtagtctttgaaagtggggggaagatcaagaatgtggatatccttatgcttggcccctacagagaagtgatgactgacaggagctttgggggnnnnnnnnnnggcttacagacatttgaggcattcttacagtaacaagaggcaactgactttgtaaaagccatggagtccctttgaagaatgaaactgatgcttaaaggaaatgatgggaaagctctggcatgtaacattaaggttacgtctgaaacgaccaagcacttcagcgaaggagctataaggaggagatttcaggaaaggccaaaattacaagaactagaaggagaaaggaaatcagaaaagacaacagaagaggaa

SEQ ID NO: 264595 - DNA, 223 bp, Homo Sapiens
gatgcagaagggcactgggctcctgcctatccagggcatgtacaagtcggcctcagctgtgtgcaacttcttcactaaagggctctgtgagaaagggaaactctgccccttccgacatgaccgaggggagaagatggtggtatgcaagcactggctccggaggatcatgctaaaggatgatcactgcaagttcctgcaccagtatgacctcaccaggatgcaa

SEQ ID NO: 264596 - DNA, 170 bp, Homo Sapiens
ccatgcacagaacatggaccagcactagccatggctgacttcatcagggagtccgttcaggtagcgtgggtagcgtaatagctcaatagttgatcccggccacacaggtgcacagtgaaaagaggcagaaggttcctcccatgaggaagagcagccctgccacgtactgc

SEQ ID NO: 264597 - DNA, 304 bp, Homo Sapiens
aaccatgaggaagaccatcgaccttaatatacaagacgcccagaagaggactgctctacactgggcctgtgtcaatggccatgaggaagtagtaacatttctggtagacagaaagtgccagcttgacgtccttgatggcgaacacaggacacctctgatgaaggctctacaatgccatcaggaggcttgtgcaaatattctgatagattctagtgccgatataaatctcgtagatgtgtatggcaacacggctctccattatgctgtttatagtgagattttgtcagtggtggcaaaactgctg

SEQ ID NO: 264598 - DNA, 517 bp, Homo Sapiens
tacctgatgctgcctcccaccttaaatccaattgtctatggagtgaagaccaagcagatccgtgaaggagtgatcaaattgttttttagaaagaaagtctatatttatgtgaaacttgtataacttcagagaaaaacatcttggccagctcatttatctctgacatcctgctgcctggaatctccagaaccacttggtcaatcatttcagatgggccacatgtgcagagataaagaaaatggaacaaaataacaatacaggcagaaagcaatggctgctaaagagtataaaatgctctcctcctgtcagccatcatgtctggggacaacagctccagcctgaccccaggattctttatcttgaatggcgttcctgggctggaagccacacacatctggatctccctgccattctgctttatgtacatcattgctgtcgtggggaactgtgggctcatctgcctcatcagccatgaggaggccctgcaccggcccatgtactacttcctggccctgct

SEQ ID NO: 264599 - DNA, 762 bp, Homo Sapiens
ggcccaacttccaggaagatcctctcttccctcttcttagtcctcgaccagcctcatcccccccctgactactgcattgacccttacaagagggcgcagtttaaggccattttttcccagatgaaccccagcctgagcccgcggctgtgcaagcccaacaccaatggaggtgggcgtgcaggtgagcccgcgggtggacaaggctgtgcagtgctctctggggcctcgcaccctcagcagctgctccccctgggacggcagagacccccaggagcccctgccagcctgtggggtcacttcgcccgcctccggccgcaggggcttgatccgcctgcggagagatggggacgaagcggagagcaaggcgctcccgggccctgcggaggccagccagccgcagccaccatcacggaggtcaggagctgacaggcaggaggagcccgggcagctggaggaatcgggggagaaagacgccccgtgccctcaggagacgaagagcaagcaggtgcctggagacgccgcctccgagccgctccggaggcccaacttccagtttttggaaccaaaatatggctatttccactgtaaagattgtaagaccaggtgggagagtgcttacgtgtggtgcatttctggaacgaacaaggtttatttcaaacaactctgttgtaaatgccaaaagagttttaacccttatcgagtagaagaaagccaatgtcagacctgctcaaagtctcattgttcctgtcctcaaaagaagag

SEQ ID NO: 264600 - DNA, 792 bp, Homo Sapiens
  misc_feature (15)..(15): n is a, c, g, or t
ttgaatgtcaccctnttaaggagcctcacatgaagacacgttgagattccaactctctggacaaagcatcgaagcagaaaatgagcctgaaaacgcatgcctttccacggattccctcattaaaatagatcatttagttaagccccgaagacaagctgtgtcagaggcttctgctcgcatacctgaggcagcttgatgtgactgctcgtggagtttatgccccagaggatgtgtacaggttcctgccgactagtgtgggggaatcacggacacttaaagtcaatctgcgaaataattcttttattacacactcactgaagtttttgagtcccagagagccattctatgtcaaacattccaagtactctttgagagcccagcattacatcaacatgcccgtgcagttcaaaccgaagtccgcaggcaaatttggaagctttgcttggtcattcaaacagatgaaggcaagagtattgctattcgactaattggtgaagctcttggaaaaaattaactagaatacatttttgtgtaaagtaaattacataagttgtattttgttaactttatctttctacactacaattatgcttttgtatatatattttgtatgatggatatctataattgtagattttgtttttacaagctaatactgaagactcgactgaaatattatgtatctagcccatagtattgtacttaacttttacaggtgagaagagagttctgtgtttgcattgattatgatattctgaataaatatggaatatattttaatgtggtatatcc

SEQ ID NO: 264601 - DNA, 939 bp, Homo Sapiens
gggctcctgggcagacacaggcctgggacaggtgctgtgtataaatgccctcagcgatcgatagcgactgggtctcgctgtggatgcgcaaccagcgatgatggcggctgaagccgccatagtgggggtgcttgcctggcttccgctttcccaggaagcctagcgggggccgcccaccggacacagtcttggcgtggttcttgggtgtgaaccccgtgagggtcaggctatggagaaactcggcacatgagtgatcgggatttgggccctcgccctggggatcctggcccggccccagaggggttttcacgtcgtgcacttgcaggacgtcgggggcgctgccgcttaggccgctaagggtctgctgcgcaatgtcgtgagatgataggtagaccaggtccaggtctctggggctcagggcatcgctggagtcgtagtcactgttggtggggaggaagacttctgagcaggcttcttcatcagagcagggctgtgaatcactcactgtctttcttctgtgcatctctggggatgggggtggggatggaagacagtctatatgtgatgatgatgtagaattgatcttctttaggctctgctcatctgaggggtctatcagcttagtgatgggcaagccagaaactggttgtttgtatcttgcatactgtagagcatccatgatccatctcatttcacgccagacttcatctatttgctgaatgaaatctaaaacttgctggtgtctttgtttggcagctgcaacctcgctgtctgagattgcttccctgagggactgttgggtgttcagagaatccagctccacaacagcagaaaggcggcaatacagactaataaatttctctctgtagctgcaaaaatgaacaagttcaaacatctgaagagggaggttaagaaaccctgagtgtggggtgtaaggat

SEQ ID NO: 264602 - DNA, 389 bp, Homo Sapiens
gaggaagacgaacccgaggagcggagcggggacgagacgccgggatccgaggtgccgggtgacaaggccgccgaggaacagggagatgaccaggatagtgaaaagtcaaaaccagcaggctcagatggtgagcggcggggggtaaagagacagcgggatgagaaggatgaacatggccgagcttactatgaattccgagaggaggcttaccacagccgctcaaagtctccactgcctcctgaagaagaggcaaaagatgaggaggaggatcaaactcttgtgaacctggacacgtatacctcggatctgcattttcaagtgagcaaagaccgctatggagggcagccacttttctcagagaagttccccaccctttggtctggggcaag

SEQ ID NO: 264603 - DNA, 715 bp, Homo Sapiens
acgtcctcgagaggaaagtgtctgtgatggagccactggccgaactccatgaggtactccaccttctgccactccatctcaggcttctgcaaggcctggatggcgttgttgtagcaggccagctctccagacacgctcggcgagttcagggccaggcggtgccacatgcgcgccaagtagtcctcactctcggccttgaatttctgtatttccatcgaaaaattctgcccgagcttggccttcacgatgaccatgtgcttgaagatcaagaggcggtgggccgtccttggcagcacctgcacagcctcgtccagcaccttgaggccgccctcccagtcgtcctggtcggcatggctgtggaagagcaggccgtagagcgcagcacggagcgccaggtcgtcctcagcccctggaagaaaatatccttcggtcgtcccgccaccctggaagtcggccgtgggccactggtgcagaagcagcgtctttcctttctcctgctttctggcctctgtcttgttgatgatgccgatgagcctcttcagggcacccttggccttcttcctgtagacggctgaggacagcagtgggagccaggcgttccagtaatgccgcgcggccagcatcaacagggcgctgctgcccgcgatgcctccgaacctggcgctctccgtgaaggccttggctgccaccagtcgcagctgcttccggcccttca

SEQ ID NO: 264604 - DNA, 962 bp, Homo Sapiens
cgtgattgtgactgtgtggaacgcaggtgaggattcctacggaaccgtggtcagcctctactatccagcagggctgtcgcaccgacgggtgtcaggagcccagaagcagccccatcagagtgccctgcgcctggcatgtgagacagtgcccactgaggatgagggcctaagaagcagccgctgcagtgtcaaccaccccatcttccatgagggctctaacggcaccttcatagtcacattcgatgtctcctacaaggccaccctgggagacaggatgcttatgagggccagtgcaagcagtgagaacaataaggcttcaagcagcaaggccaccttccagctggagctcccggtgaagtatgcagtctacaccatgatcagcaggcaggaagaatccaccaagtacttcaactttgcaacctccgatgagaagaaaatgaaagaggctgagcatcgataccgtgtgaataacctcagccagcgagatctggccatcagcattaacttctgggttcctgtcctgctgaacggggtggctgtgtgggatgtggtcatggaggccccatctcagagtctcccctgtgtttcagagagaaaacctccccagcattctgacttcctgacccagatttcaagaagtcccatgctggactgctccattgctgactgcctgcagttccgctgtgacgtcccctccttcagcgtccaggaggagctggatttcaccctgaagggcaatctcagtttcggctgggtccgcgagacattgcagaagaaggtgttggtcgtgagtgtggctgaaattacgttcgacacatccgtgtactcccagcttccaggacaggaggcatttatgagagctcagatggagatggtgctagaagaagacgaggtctacaatgccattcccatcatcatgggcagctctgtgggggctctgctactgctggcgctcatcacag

SEQ ID NO: 264605 - DNA, 814 bp, Homo Sapiens
caaccagcgcctgcaggacctgagcgagcgggagcggtgcctgctgcggaggcgaagccaggcagcgcagcctctgcaaggggaggcccgcgaggcggcgcgggagcgcgcggagcgggtgcgcagaagactggaggaggcggagcgccacaaggaggacttggagcagcacagcaggcagctgcaggagcagtgggaggagctgtcgagtcagctcttctactacggaggggaactgcagagccagaagagcacggagcagcaactcgcagcccaattggtgacgctgcagaatgaactggagctggcggagaccaaatgcgccttgcaggaggagaagctgcagcaggacgcgctgcagacagcggaggcctgggccatattccaggagcagaccgtagtcctgcaggtgtgacgggcagcttcgcagagtgcagtacagcaccgagtcgctcatggaggagatggccaggcggaccgagagacgcggctgttcggcggtcctcgcgcgctggccatcaggcgctgctgacgctgccgtcctcttcctggggctgtcgctgctctggacggtgctgttggaccccggcgccgtctccgcgtggctctggagcctcacctcggagacgacgctgcgccgcctgcgctacacgctgtccccgctgctggagctgcgcgctaacgggctgctgccaacctaagtgcagcgccccgcgcctggctccaggtggactccaggcaccggctttatttctggtgcactcctctcctgagagtgtagaccaaggtcgcctaataaactcctcaagggatg

SEQ ID NO: 264606 - DNA, 344 bp, Homo Sapiens
agaacagtttgccaccgcctaccaaggaacaagggctagatctgacaacacacaatactggctgatcatctcctgttctattgcctatgttgcgttagtgactctactgatctgggttcctgtaaaagttatcctgcacaagaaacgttatatttacagaaaaattaaaggatggagacctgttctgatgatgtgtgtggtcctcaccacactgccctgcctcaccttttccatagcagtgactgaggttcaaaagagcattaatgggtccgctgatgtcttacctgagaaaaattagcaaaatgttcaaaagagcattaatgggtccgctgatgtcttacctg

SEQ ID NO: 264607 - DNA, 743 bp, Homo Sapiens
tctcagtaaatgcagcacctcctggaagatgaggcgttcagtggaccttccattcacggccaggataatgtcaccagatgcaatggccccattctcctcagctggctgccccggaaagagcctcttaatcctcacaagatcacttttgagatggctgcagctctctttctccatctgcacgaaactgaatcccaaaccattggcattcttttttagtttgacttcaaacttaggaccatctgtcaccgagacacagctcgaaggcctgccaggcaaggctgttaccaaggaaacagccgtgcgttcatctcccatgctgtcattagcagaaggacactgctgtgtactcctggggactcttctctctaagaccagtcttgcaacctgcccaggacccttcaggcactgcacagcctgcttgtgggtgaggccgcacagaatcactccatccacctgcaggagtcggtcaccctgtaggatctgcccttccttggcagctggtcctccaggaacaatggatttcacatagataccaccatatggcacactggtgttaatgccaccagttacgctgaatccaaggtccccatcagaaatatctctctctctgcccaccagatggacctctgatgcaggagacaccagccaactctgcccacactgcctcctcatgagtttggagtcccctagtgcatgccctgctcatcctgaggttccccagtacctctgtttgtctctgaact

SEQ ID NO: 264608 - DNA, 309 bp, Homo Sapiens
gctgtcaccacctcgctatccagctggatcatgttcatggtctgatctccttctgccactgagaacagggctcggaaatgcgtgctgcatgctgccagcacggagcggtgggctttaaagtgtctattccccactacaatgacacaatcacagagctggccatgaagtctatggtagttcagctgctggaagatttgttcaaagtgaccaggaaaatccatgatcctgagtcgggctccgcccccctcctcctcgctgaaggaggcggtgacccctctccgatcggactcggcagtgtcagaggaggtg

SEQ ID NO: 264609 - DNA, 766 bp, Homo Sapiens
ttgaagaattcagcttctggactcaaaaacatcttgggctccagccagagcccccacaggctccgcagaaggaagccactgccctctaagcgggtatctgctaccaccagcttcccagctctggaggaggcggatgctgaggagaaggaggcgttccttgccttcatggagcagctggggactggacacttacttcccaagcagatggaaatctggcaactgtgggggcagctgcggcaggaggagccccagctggcaggcaacctggcaggctttctggccaagatgaccagccgcctgcaggaggcccaggcggacaaggaggccctggagctgaccctgaggaagcgtgactctgaccaccaccgcgaggtccagcagctctatgaggagatggagcagcagatccgccaggagaagcagcagctgcaggctgagagtgactctcggggcctggccctcacctcccagatgcaggacgtcctagaggccaaggagcgcgaggtgcagcgactagctgagggccagagggagctggaggcccagctctcccacctcaggagcacacatcaggaggctgcctcagagaaccagcagctgcaggaggccaagcgtgacctggctgggcggctggaggaggtgcgggggcagctgcaggtgaccagggggcgcctgaaagccgccaggggccgggtgtcctggcaggtggaggagataaagggttttcctggagcgggtgagaagaccccagaccctcaggctgcct

SEQ ID NO: 264610 - DNA, 746 bp, Homo Sapiens
tgggtagaggggtccggaaggcaggatgggcagggacgagggcctgggcgcagggctgaccttgtgctccgaggcgggcagcagcgaggggctgggggcccggcggagcagagggggccgcatctcgaactccacgccctggaggtggcgggtggacgtggaggaggaggaggctgagggtgaggtggcccctggggccgcagcggctgtaggggagacccctgttccggtggggagtggcggcagaggtggtttgggccagttctgaaacaggctgctgacaggcttggagaggagtgaggactgggagtcgtcggagagtatctgccgctgcagggaggaggtcctctcggggacatagctggctcccccgtggtggctgtctccgcctcccccactgcctcctcgggcccagggcagagcgccgccagctgccgaggagcccccaaactgctgaagcttggagctgagttcactgatgatgctggcttttactgtggccaaggctgaggcctgaggctgggccaagggcccgggcagaggtggtggcggtgggcccgggccctcctcccagggcagcagcttccggggcagagaggaggccgtcggcaagggcaccggtgggacttctggctctacagccaccggaccccccgcaacgcctgccgtggggggtcctgaacaagcacgcagggccagcagcccatcggttccagcctctgtcaccgagacggtggggctggtgg

SEQ ID NO: 264611 - DNA, 693 bp, Homo Sapiens
ccacgtgttcaaggctggtactggggcctggcaccctttaaggtcctctgtgcccaccccacctcccatccagctcggcagcctggtgacgcaggaggccccggctcaggacagcctgggcagctggatcaactcttcccctgacagcagtgagaacctgtcggagatccccttgtcccacaaagagaggaaggagatcctgactggcaccaagtgcatctgggtgaaggccgcccggcggcgctcgcgggccctgggaaccgaggggcgacacctgctggcacccgcgacagagcacagcagcctgtccctgcactcactgagcgagggcgacgatgcgcggccaccaggcccactggcctgcaagcggccgcccagccccacactacagcatgctgccagtgaggacaacctgtccagcagcacgggcgaggccccgtcccgggcagtcggacatcatggggacggccccaggccctggctgcgtggccagaagaaaagcctgggcaagaaaagggaggagtcgctggaggcaaagagaaggaagcggaggtcccgatccttcgaggtcaccgggcaagggctctcccaccccaagacacacctcctggggccccatcaggcggagcgcatctcggaccacaggatgccagtgtgcaggcacccagcccctggtatccggcatctggaaaa

SEQ ID NO: 264612 - DNA, 463 bp, Homo Sapiens
ctacgcttccactatgcgccgcaagtaggagaaagcacccctgccgatctcctggtggatgtcataaaagtcgctgagtctccttcctcgatggtcctcatcctccccgaccccctcgacctccatagctgtctgagctgaatgcacagccaactctgctttgcaggagacctcacccgccaggttctgggcggtgcaggtgtagacgcctccatcctgggcccccgtgctgagcaccaccagggagcactcattctcctcgtacacgaagctcacatggctgctctcggtcagcagcacctcgtccttgtaccacatgatgtccggcagtggttttccctcgaccaccaccgcaaagcgagcagtttccccagcccccacctccacgtcctccatgatggactcaaaccgaggggcctctgccagctccaatgtgaccgagcaggactgtgtgccgtgacaa

SEQ ID NO: 264613 - DNA, 715 bp, Homo Sapiens
ctcaggtgagagttgatgacgtacactgtagccacggaggtgttgtatagggccgtggcggcaaacttgatctggtagtgggacagctccaggggtgggtggacgcctacagcccggcaagacagcttgaagcaccggttgatctcagacttgcaggtcagttggaatctgtgttcctcggccttggtgggctggaagatcacacagaactgcagcgtttccaggggcaggatcgtcccaaacccatcgttgggttggacgtccacaaacttgggaagcctgacgaacccgaactcctggggcaggagcgagtggttgtggaggctgatttccgtcctgatggcctcatagatggtgcagtagccaaaatccacctccgagggactgagctccaggtccgaggtggtgacaatggcatgcacggtgaatcccactggcttgttctggtcggcaacccatatggtcatcggggcctccaggactcgggtctccttgtcaaaatacctccctgcgtcctccgggagggagtgtcgcggcaggaacttgagctgcacggagtaggacgactgtgcctggatatagcctgtcttgggcaggagctccaggtgggccctcagctccttgcacacctcgaacttcaggcgcagggcagctaacagaccgcgtgtgcacgagcacagagtcctggtagagccgggcatacatgcagatcttc

SEQ ID NO: 264614 - DNA, 364 bp, Homo Sapiens
tgtccatgccccaggggtcacacacgaggcttgaggggatgcacctgccattctggcagcggaagtaggcaccacaaggtcccagacggaaagacgtgacttcgcccacgaagtccacgcggggctggcggcctctcgtgaccaggcgcaggcctagaaagggtccggaggatgccacaggcaccgggatggtcaggccgcacagtggggaccccaggggccgaggcgcccccggcgggccctcgtagaactgcaggtaggagcaaggggcgcacgggtcggccggggccggggaggaggtgttgagcgccgggggcgcgggggtcaggctgtagaccaggaagaagcggaactggaagcggat

SEQ ID NO: 264615 - DNA, 1334 bp, Homo Sapiens
gatgtgcgtacctgtattgtagcaggttgtggtgttagaactttaaccgaatacctgaataaaattttcttatcattgggtatgtagtaatctcggatttcctttatggcaaaggaattgcatggagagtctcgagagaggcatggcagtggagcagaagaaccgatgagacgcagtttccatcgtgaggctgctacatatgtgtcgcctgtaaatgcttccgccacaaaagtgtatcccttcttattcttggtataaagataaggcaccactttttggaacacctttggcacttgctccattgtgtcattattaacaatgtgtaggatacagattggaagtgtagtatatactttgggaaccaaaatcatgtcttgatgaaccaaaaatgtttctctgaatactataaaccaagaatttggtggctgttcttgataagtcacagtataatctgcaaaagcaatcttagtttcttcatcttgatagcatggataagattccaaagacttgcacttgcttttaaacattagtcttaagagagaaactgcatactgttctaaattcatttccaatacagcccaaactttttgaagagtatctgcaacactgatattttcttttgtgtctggtattctggctttcataagcaatctaacgtaagttcctctccacatggcttgaattttaattgctgctgctacttcctcagcagaatactctttatcacttgtgggcatacaatatttaacgtccagccattccactaaagaaacctcttccaaggaggaattgagtaactccaagtccaaaaccatagcccggaatgcaaatttgaagtttggaggaggttttgttatttgaacttttttcattaaacgccataaggaaagatgaaaaaccctgaagtgctgtgcagtaagttctttatcatggaaggggacagggtagtgagctgtttgcagatccttcaaagctgcagagagtttacccttatctttgaaattagcaatcacatttccaatagctttcataatcaacagagactgttccgtaaatcggcagctctctggttcaaagttgggcagtacaacgtgttcatccccaatgacaaatgacaccatgctgcagatgtgtatggagtgtcctactggggagtatgcgttgaagagtagcatgtgtctcccaacaggcagacgaaccactgtagccttggtagcatatgtgtgaatcttcagaacaagactgcctggtctcagagatttccaagaaaaacgtttcagctgtgagaagtccaggctctatgggaggactgtcttttgttaaggctccatact

SEQ ID NO: 264616 - DNA, 728 bp, Homo Sapiens
gttgttgtcctgagcaaattgtgcttgcataacctgaagctgatctgctgtaaagctggtccgagctctttttgctggttttggatggttaacatcttgctctgtgaggagggcaccttccacactaatcccattcccattttctacttctctttttaaattatccagcatgcagtcataatgtactctgcagaggactttctcttccaccaaagcaaactcctctcctgtggaaagttgccttttgcaggaaaagcaggcaaagcatgccaagtgatagacattccccttggctctccggacccagtcagtagaatggatgtgtctcccacatcgagagcagcgagttccataccttctgaaataatcaagtttgcagaaaatgtctttgtctttaatataacagctggtgtgccttcctagggaggttctgcaaacactgcaggagagacaccggacatgccagcataggtcattcaccttgagaaggtatttgtccacgatctccaggccgcaaatgttgcacacacacttgccaggagggcagccggagcccgaggccatggaccggggcgaggacgacggggacagcggggccgaggaggagcacgagtcctcgtcccccgctccctcggggctcaccagtccctcttccccggcgcctttgcgagtcctcccggccgccagcgctgtagtccgcccgcactcctctgacatgagcccctgac

SEQ ID NO: 264617 - DNA, 847 bp, Homo Sapiens
  misc_feature (778)..(792): n is a, c, g, or t
tggcaagagaaaatcaagaaatctcattggaattggaagcagcagtgcaagaaaaagaagaaatgaagagcagagttcataaatacataacagaggtgtcacgatgggagagcttaatggctgccaaggaaaaagaaaatcaagatttgttagatagatttcagatgcttcataaccgtgctgaagactgggaggtcaaagcccatcaagctgagggagaaagcagctcagttcgactggaacttctttctattgacactgagaggagacatcttcgagaaagagtggagctattagaaaaagaaattcaagagcacataaatgcccatcatgcttatgaatctcagatctcatcaatggcaaaagccatgtctcgattagaagaagagctgagacatcaagaagatgagaaagcaacagtattaaatgacttgtcatctcttagagaactttgcattaaacttgattcaggcaaagatattatgacccagcaattgaattcgaaaaaccttgagtttgagagggttgtggtggaattagaaaatgtaaagtcagagtcagacctactgaaaaaacaactttcaaatgagagacatacagttaaaaacctcgaatcattgttggctacaaacagagataaagaatttcattctcacttaacctcccacgagaaggatacagaaatccagctacttaaggagaagttaaccctttctgaaagcaaattgtaagtgtcttaagtcaacttatgcaaagacaattgcttgtgaaggatagnnnnnnnnnnnnnnngaagtggaggaaaggttaagagtatgaaagataggccaggtgcagtggctcacac

SEQ ID NO: 264618 - DNA, 314 bp, Homo Sapiens
ccaacccagccggcacttcccaccataatacatggaggaggcttcgcacacttccttgatgaatggggaggcaaggccgattgggaaaatcagcagacccacaatcatggcagtagctgccactgcctgcacccctggcattggaacactgcttctccttgggcacagccctttgggggccacagcccaagacaggaggaaaattgcattgaaggccaacaggagccagcctccgaggagcatcacagctgagaccttccaggcaaagtcaggaatatcctccagggaactgaaggtcacgcagctctggttcc

SEQ ID NO: 264619 - DNA, 485 bp, Homo Sapiens
  misc_feature (101)..(102): n is a, c, g, or t
tgatcttgttgtggtcattataaatctgatagatcctctcctctaatttctctgtcagatccgaaaccttggtcttcaggctgttcctgaagttggtcagnnatattattctccaatatggctgatctttgccattttctgggtgaactcttggagcttttcctggatgatcttgttgtggtcattataaatctgatagatcctctcctctaatttctctgtcagatccgaaaccttggtcttcaggctgttcctgaagttggtcatgagtgcatggtccttttgccggctcttgttgatgttttcgatcagctcctgggctctcttctgcaggatgtcaatgcttgagtccagagaggagaagtagagtcccgacttcccttccaggaccgtcagctggcaactggcactggaggtggcgacacaagggcaagaaacctgacttctcagagtacaggaagcggccaggtgtagtcgctcatgcc

SEQ ID NO: 264620 - DNA, 603 bp, Homo Sapiens
ggatgtggagctggaaattatgaagagagacgagattaaacacgtgtacatgcaacagtatttggtcaacaggatcaaagaactggttgtcactttcgatgcagaactccgtctccttagacatcagaaactaaaactagatactcagatgaaattatctgacctgcaccatgtcaccttatttcaagaaatacttctcctgaagaattttgaaaaacaggagaacatacttcaagaacgtgttaattccttagacaaagaggaacagtacatgcaatggaaaataaatgaaactcttaaagagatggaagagaaaaagaatgaaatcaccaaactccaggagcaagaaaaggcactctatgctggttttcaagcagccattggagaaaacaataaatttgcaaacttcctcatgaaggtcctaaagaagaagattaaacgggtaaagaaaaaagaagttgaaggagatgctgatgaagatgaggagagtgaggaatcaagtgaagaagaatctagcttggagagtgatgaagatgagtctgaatcagaagatgaggtttttgatgattctatttgcccaacaaattgtgatgtggctctttt

SEQ ID NO: 264621 - DNA, 755 bp, Homo Sapiens
gtgtgccactttataccctcatccaagacaatggcacaaaggaggccttcaagagtgcactgatgagttcctactggtgctcacggaaaggggatgtgatcgatgactggtgcaggtgtgacctcagcgcctttgatgccaatgggctccccaactgcagcccccttctgcagccggtgctgcggctgtccccaacagtggagccctccagtactgtggtctccttggagtgggtggatgttcagccagctattgggaccaaggtctccgactatattctgcagcataagaaagtggatgaatacacagacactgacctgtacacaggagaattcctgagttttgctgatgacttactctctggcctgggcacatcttgtgtagcagctggtcgaagccatggagaggtccctgaagtcagtatctactcagtcatcttcaagtgtctggagcccgacggtctctacaagttcactctgtatgctgtggatacacgagggaggcactcagagctaagcacggtgaccctgaggacggcctgtccactggtagatgacaacaaggcagaagaaatagctgacaagatctacaatctgtacaatgggtacacaagtggaaaggagcagcagatggcctacaacacactgatggaggtctcagcctcgatgctgttccgagaccagcaccactacaactctcactatgaaaagtttggcgacttcgtctggagaagtgaggatgagctggggcccagg

SEQ ID NO: 264622 - DNA, 405 bp, Homo Sapiens
caccattccaaggtccagcacagtaaacttctgtagggctgggaagtattgttcactcatccgggttttttcaacgactacaattcctttaagattattggaatttctaacccgaacaagcctctttctgtagccatttcctgccaccaaatcagcttcggtgacataaagaatgcagcatctgttcgacagataaaagtctggtgtcaagccatcctcgaaaatgagcttaattttcccttgcatctcctgcgccagctgtgacccgcgccatttctcattggccacaatatgccccaaaggcacgtgcacggggcccgtatcatcaggggggttcttttccatggatggtctccaccgtagcttctcagtccagtccaaggcccgaatacagccggcaggaac

SEQ ID NO: 264623 - DNA, 732 bp, Homo Sapiens
gccgccctgctgaaggaggccaaagggctgatcttctatgacacgaaggtgaccgtgatgaatcgagtgctgaatgccactgcgcagaggacagcggaccacgcggcccctgagatcaccttggacccactggaaattgtgggaggggaaatcagagcttctgaaaactcctacttctgtcaggctgccaggcagctggcctcagtgccgtcgtctcagctctgcgtcaagctggccagtggcggtgaccccacatatgccttcaacatccgcttcactggcgaggaggtccatggcaccagcggctctttccgccacttcctgtggcaggtgtgtaaggagctgcagagttcctcgctgtcgctgctgctgctgtgccccagctcagctgtcaataagaacaagggcaagtatatcctgaccccgagccccatcacctacggggaggagcagctgctgcacttcctggggcagctgctggggattgcaattcgggcagacgtcccgctgcccctggacctcctgccctccttctggaagacgctggtgggcgagcccttggaccctgagcaagacctgcaggaagcggatatcctcacctacaattacgtcaagaagtttgagagcatcaatgatgagaccgagctggagaccctgtgcgctgagatcgcctcccagcacctggccacggagagccctgacagccccaacaagccctgctgcaggttcacc

SEQ ID NO: 264624 - DNA, 366 bp, Homo Sapiens
gattgcaaagggaagtggtggagatataatgtccatctggataaaggcagcggatcagaagtggcaccacagctagtacatacactacagctcaaacaatgtcattgcaaatttctgatgggaaatgcagtgttgggcagtacatatatcctccttggtatcatcagcaatgtggaagtgaattctcatcaggaggttttcaaagcactctgcagcatcatccataattcccagctggaaacgttgttcatcctggaaagtctttgccagagcactgcggagagtgtcagatggaagcactttttcactactacactgaaactggttaaagattccctcttaactacagtcttccttcctcataca

SEQ ID NO: 264625 - DNA, 372 bp, Homo Sapiens
tgtgtcaaatccagggctgtgggcctcagggactggggggctccctgttgtgactgtcttcggttcataggtggggtggtggtgagcagctggacatgcctctgagcggttgtagatggagcaaccttccttgaccacctcagattgggccacacagtgtcctggctcctctggccggcactgctcccacatgcagctggagagattgcgcgctctgtctccctccacgcagagctcacagacctccagctgtttgcaggccccttggaccgccggccagatattcaggcggatcagggctcccctcccaaagcctcgagctcctttaccagccacagccagctgggcacataggaggaggcagcaacagcc

SEQ ID NO: 264626 - DNA, 442 bp, Homo Sapiens
cagccgcctgatggtggggccacacgctgctgcgcgcaacctctcggggcacctccccccgctgctgctgccccagaggctgggtccaggggccgcagcccgggcgggcgagggcccgggcctgatccaggaggccgcatcggtcccagagcctgcagtgccagctgacctggccgagatggccagggagcccgcggaggaggccgcagaggagaagctctcagaggaggccacagaggaaccagacgcagaggaaccggccacagaagaaccgaccgcacaggaggccacggccccagaggaagtcactaaatctcagcccgaaaagtgggatgaagaggcccaagatgctgcaggcgaggaagagaaagaacaagaaaaagagaaggatgcggaaaacaaggtgaagaactccaaagggacctagacgcagcagaggtga

SEQ ID NO: 264627 - DNA, 282 bp, Homo Sapiens
gaacacgatgagcgccgcggagccgcggtctgagaacagcgcgcggcaccggggacccggagcggggtggaccctcgagtggcacaggaatcccaggtagacgacggcggccgcgggcaggagcaccagcaggaaggctgcggcgggcagcaggaggtgcagcaggagcccggccagcagccggccaggcagcagcgggggccccgaccaccctgggcacgtcagggctgaggcctggtggtcgggaggtccccggggcagcatgggcgctgtgtcggaagc

SEQ ID NO: 264628 - DNA, 733 bp, Homo Sapiens
gcaccctcttctcattgaactggcagaggaggcccgagtaggacacacataaggtactgcccgccatccggccccgaccgcaggccacaccacagaagatgttgttgtgcagctcgcccaggatgcccgagcgccctacaaggggcactgtgctcgtcacctttgtctcagtggagacttccaagaaccagaacctcacatggcggttcccaacagtgacaaaatagctgctgtcctctgagaaggagagggcaatgactctacaagataccttgttggaggccactacgatgtctttcttccagtcccagacgttgaccaccatgtcatgttggtagcccatggacacgatgtgcttcatattgggtgagaaggccacacacgccacaccatacttgtggcctagcatctccgccacctgattcttctcctccacatcccagatgcgcacagcaggcctatgcccattctcccctgtcactatgtacttcccatcaggggagaaggccagagcactgagagacttcctggcggtgttaaagatgtgctgctgcttgttctccttggggtccaaaatcaccaccacacagcctgccaggtaggccacatggcctgtgccggggtcacaggttaggccactgctgttctgggctgtgatgccaagcaccttctcgagtgacacccggttctgcaccgtctcctcggaggccgtcgagagtcgcgtccgccgccg

SEQ ID NO: 264629 - DNA, 815 bp, Homo Sapiens
ctgacggacgatccgctcagcgcccgcagtcggtggttagcccacggcgatgcctctcccggcctcagcccctgctgaggctacacccatgccttcttcagaagcacaggagactgaagcagccccggagaaggagaaccgagtggatgtgggggccgaggagagagcggccgccacccggccccagcagaagtcctggctggtgaggcatttctctctgctgctgcggcgggaccggcaggcccagaaggctggacaactcttctcggggctcctggccctgaatgtggtgttcctgggtggcgccttcatctgcagcatgatcttcaacaaggtggccgtcactctgggtgacgtgtggatcctgctggccacgctgaaggtcctctccctgctttggcttctctactatgtggcaagcaccacccgccaaccacacgccgtgctctaccaagatccccacgcggggcccctctgggtgcggggttccctagtgctcttcggcagctgcaccttctgcctcaacatcttccgagtgggctacgatgtgagccacatccgctgcaagtcacagctggaccttgtcttccctgtcatcgagatggtcttcatcggcgtccagacctgggtgctctggaaacactgcaaagactgtgttcgggtccagaccaacttcactaggtgtggcatgatgctgaccctggccacaaacctgctgctgtgggttctgaccgttaccaatgactccatgcaccgagagatcgaagctgagcttggcatcctcatggaaaaatccacaggcaatgagaccacac

SEQ ID NO: 264630 - DNA, 763 bp, Homo Sapiens
cacgatggcacccagccctggttcatcagtaagcctcgctcagtgacagcctccccgggccagagtgtcctcatctcctgcgccatagctggtgacccctttcctaccgtgcactggctcagagatggcaaagccctctgcaaagacactggccacttcgaggtgcttcagaatgaggacgtgttcaccctggttctaaagaaggtgcagccctggcatgccggccagtatgagatcctgctcaagaaccgggttggcgaatgcagttgccaggtgtcactgatgctacagaacagctctgccagagcccttccacgggggagggagcctgccagctgcgaggacctctgtggtggaggagttggtgctgatggtggtggtagtgaccgctatgggtccctgaggcctggctggccagcaagagggcagggttggctagaggaggaagacggcgaggacgtgcgaggggtgctgaagaggcgcgtggagacgaggcagcacactgaggaggcgatccgccagcaggaggtggagcagctggacttccgagacctcctggggaagaaggtgagtacaaagaccctatcggaagacgacctgaaggagatcccagccgagcagatggatttccgtgccaacctgcagcggcaagtgaagccaaagactgtgtctgaggaagagaggaaggtgcacagcccccagcaggtcgattttcgctctgtcctggccaagaaggggacttccaagacccccgtgcctgaga

SEQ ID NO: 264631 - DNA, 410 bp, Homo Sapiens
agcagcactacccaacgttcctaccacggaagggggatggaatctctttcggatgtcattggcctccttggcgaaatgcagtaatcggccttgcacttcaataccaacattgaaagccagcagcaggtcaaggccagaaaactttggactccttggcagggcttctgctaaagctgtgaggacaggaaggacagccccagaagggtgggtggcagggtgccacgtgtcatcaaaatccatggagtgaatagccacactcgttcacaaaagcacgcatatgtgggcgggagccctgatgtctggctgaccccaaacagtgctggatatgttggaactgtagatcttgctatattggctggctatgtgaaacacttccgtagtggctcccaggaacccagcacccagagtga

SEQ ID NO: 264632 - DNA, 501 bp, Homo Sapiens
tgattgccactccaggtcagctggttctcttgtagctcagagcaacggagaaagtaggtcaggacataaagtattcgctggactaagtccttctgcttccctaccactacggtgcgagtcagtctcactggagagcctatggctccgtaaagatcacccagctgtgcccaaagaggattatacggatgtgttttggccagcatgttcactgactgggaggtacgtttctctgagaaggctttgatgggagggtgatccacaggcatgacagttgggacccaggccaggtggtaggttaacaccgcagtcagtaaggcagcaaaaaactggtttttatttatctgttctatcagaagtgtaaactccttgagaaagcgctggcagagctggtttttttccaaagtgccggacatcatagtaagccatacaggttcagctatccttggaacagaatataagttccagatagttcctctgaattctcccagagcttccatcaac

SEQ ID NO: 264633 - DNA, 735 bp, Homo Sapiens
agttggatcaattcagtgacctcctctcttgccacaacatatgcttcccgagggttatggaagtcgttcgaaatcccttccgcctggagttggatcaattcagtgacctcctctcttgccacaacatctgcttcccgagggccctggaaggcattgccctgctgatcctgtagtgtattcaaccgagaatcaagtttcttcttttcaatacacaaatcattcatctgataaagctttctggtgtgttcttttgtcttcatcatcagttcccatcgcatttgagcaatcttttcctcccacatcttcatctctttcgcatttgctagctcctttcgaagttttctgatcttcagttcttcaagtgttgtattaacagaaagcgtttgaagggcttctagatttaccacacggccaaacttgctgatcatgagctgccggactgtttcctccattttgtgtatggtttttgtcatttctctcttttctcggatgagctgtttacgtctctctctccattctttgttaagtttttgctgcttggaattttcctcctggagctcacggattcgttcttgcagccgtctcaaggcatggttagagaagaccaaagtaccagaaagatcgctaggtatttctccaaataccaaatactctatctggtggagcttgagcggaatcacaactagcagttcattcagccgctgctgcttctctcgctgataagcctccagggcc

SEQ ID NO: 264634 - DNA, 1002 bp, Homo Sapiens
  misc_feature (831)..(831): n is a, c, g, or t
  misc_feature (900)..(900): n is a, c, g, or t
  misc_feature (929)..(929): n is a, c, g, or t
  misc_feature (939)..(939): n is a, c, g, or t
  misc_feature (950)..(950): n is a, c, g, or t
  misc_feature (977)..(977): n is a, c, g, or t
tcctgaactacggcctgttccagccggccagcaatgggcgtgacggcaagttcctggatgaggagcggctcctgcgcgagtacccacagcccgtgggtgagggcgttccttccctggagtttcgatacaagaagcgggtgtataaacaagccagtctcgatgagaaacagttggccaagctccacacgaagaccaatctgaagaaatgcatggatcacattcagcatcgcttggtggagaagatcaccaagatgctggaccgaggcctggatcccaatttccacgacccggagaccggagagacccccctgaccttagccgctcagctggacgactctgtggaggtcatcaaagctctcaaaaatggtggagctcacctggacttccgtgccaaagatgggatgaccgccctacacaaagctgcccgagcgaggaaccaagttgccctgaagacccttttagagcttggtgcatccccagattataaagacagttacggcctcaccccgctgtatcacacagccatcgtcggaggtgatccctactgctgcgagcttctcctgcacgaacacgccactgtgtgctgcaaagatgagaacggctggcacgagatccaccaggcctgcaggtacgggcacgtgcagcacctggagcacctgctgttctacggggcagacatgagtgcccagaatgcctcggggaacacggccttgcacatctgcgccctctacaaccaggacagctgtgcaagagtgcttctgtttcgaggcggaaataaggagttaaaaaactacaacagccagactccatttcaggtggccataatagcangcaactttgagctggcagaatacatcaagaaccacaaggaaacagacattggtgagtaggcacgtgganaaactgtgttgggatttggtttggagatnctctgaggantcagttcactnaccagcttttttaaaattctccttagnttgggtttaggagcctgcttttagc

SEQ ID NO: 264635 - DNA, 570 bp, Homo Sapiens
cacacgatggtcaacttgctggttctgcaaccaggatacgctggtgccctatcctttccgcaactgctgggactgtccccactgcgagcagtacaacggcttccaggagaacggcgactacaacaagccgatccccgcccagtacttggagcacctgaaccacgtggtgagcagcgcgcccagcctgcgcgacccttcgcagccgcagcagtgggtgagcagccaagtcctgctgtgcaagaggtgcaaccaccaccagaccaccaagatcaagcagctggccgccttcgctccccgcgaggagggcaggtatgacgaggaggtcgaggtgtaccggcatcacctggagcagatgtacaagctgtgccggccgtgccaagcggctgtggagtactacatcaagcaccagaaccgccagctgcgcgccctgttgctcagccaccagttcaagcgccgggaggccgaccagacccacgcacagaacttctcctccgccgtgaagtccccggtccaggtcatcctgctccgtgccctcgccttcctggcctgcgccttcctactgaccaccgc

SEQ ID NO: 264636 - DNA, 763 bp, Homo Sapiens
accggcgctagcgggcgcgtcctgccaggagtgagtcttggcgccatctagcgcctgctggaggctctgcagctgcagtggactgagccgccggcgctgggcgtgggtcaccgccgcggcgttctccggacccagggaggcgatctgctccgcggacagctctttgaatatctcatcaggaaggcattttattgctgatggctggaaatatggcatcaaatccttgtcaagcatccggagctctgccttagttaatccagctgcaatggtcccaagctcctgcaagacagaactggtccactcagtgggatccccaaacacaacttcagccttcctcttaaactcggctaagacatgtgtgctgcagagcagggtcccaattctggccactaccaccctgaattctgagatctttataagtgggatttcagtgatgtttatagcacacagggttgcaccaagtcctaccaaatgaaagctcttcaggtcctggatactgtatcctgaatcatccaggtacccttgcaaaatggattcagcctgtcccggggtccattctgtttgccagcttagggaagccacagtgtctatggagctgaggtccagctgctccagctcactctcattaagagccagagcaatgcgccccagggagacgatatggtgttctctccagtaagatggcatgtcccaaacctgtattgctttctccttcagggtcatcagctgaggccggctgaaaccctggacagctcccagcagt

SEQ ID NO: 264637 - DNA, 665 bp, Homo Sapiens
gcgctgagtcggctccgagagctctgccgacagtggctgcagcctgagatgcaccctttgagcagatcctggagctgctggtgctggagcagttccctttcatcctgccggggaatctgcagagctgggtgcgggagcagcatccagagaacagggaggaggtggtggtgctattgcagtatttggagaggcagctggatgagccgccgccgcaggtttcaggtgttgaccacgggcaagaactgctctgttgcaagatggcactattgacaccagccccagggtcacaaagtagccaatttcagctaaggaaggctctgctcaagcatgaatctgtgggatcccagcctttacaagatagagttctccaggtccccgagcttgcccatggacgatgctgcagagaaaataaagtggtagcttctaggcttactccagagtcccaggggatgttgaaagaggaagatgtggccctgaccctcacccctgaatggacacagcaggattcatctcaggggaatctctgtagagatgaaaagcaggagaaccatggcagcctggtcttcttaagtgatgaaaaacagactaagagcagggacttgcctccaaaaggggagcttccagaaaaggagcatgggaagatatcgtgccacctgagagaagac

SEQ ID NO: 264638 - DNA, 771 bp, Homo Sapiens
agtagctaacaccttttccttcccaagcatcaaaggcatccatcattttcttcaactctgctactgaataatagctccaaatgtactgaacattatttcccgcctctcttttaaaaatgcctttgctgtgaattcttcctcccagctgcttttcaatagcgtctgttccatcagtttttgtggcatatacaccaataattctactctcacagcttgcaccagatgtgttaagatagtggagaacccaaactgttggtttattgcagactaagccatatgaatcacagaagtctgttaaagcctttttaagttctatatttgaccttaaagaatatgtctccatttcattggccaaatggtcagacaggctgtatggataagggatgccaaagtaatcagcctcttcctgtagggcgatgcgggtttgctcatctgtgggaatctgaacttctccatgaaggtaatccaaaaggtatttaaatagacgtccatcacggtcaataacacaagcccctgactcatctgtttttagaggaaagcgaccactgaacatagatgccaacatggagtccttgaagcggcacaaggactcccgccgggctgtgtaaatacagccacccacgttcagtcggagaacatctagcacctcttcttctgccttgtggccttccatttctcccccagacacctgaatttttgcctcccaacactttcagaaactacaaaacaatgatgtcttggtctccctctgcatcaaaaccatcagggacg

SEQ ID NO: 264639 - DNA, 782 bp, Homo Sapiens
gggattagattcatctatgtgagggcagagtgggctgcctggggattgcgttggacaaggctggggagataggagcgtggggaaggtcgcttggcctcgcccacccccgtgcccacccgcatccgtgagatcgtggccggcagcctgagtgaggagccaccccaagcaggggtacaggagacgacagccactatggcccgagtgcaagaggagaacgagctcctgcaggaggagctgacccggctgggggacctgctggcccaggccagcgccgagcgagatgagctggccagcaggtgccgtgtggtcagcgagcagctgcaggcccggctggagaccaccgaggctcagctgcggaggtcagagctggagcacagcgtggatctggaggaggcccttgaccgtctggacgctgccgagaagaggagcaccggcctctggcaggtgaacgcgctcctgcgggagcagctggaacatatgaagaaggccaatgacgcgctgggccgggagctggccgggatgacgggcagcgtgcagcgcctgcaggacgagctgaagctgaggcgctggccccagagacagacccggtcagggggcctgcggcagccccgggacctcctcctcctgtggagacaggccgtggtgctggagacagacctggccgagctgcgtgtagccactgagaggggcctaaatgacctgcaggcagacactccttcagtgagcctggcaataaagggaggcaaatgcagtttattgtaatatatgggattagattcatc

SEQ ID NO: 264640 - DNA, 656 bp, Homo Sapiens
acacaagtgccctgttccggaggctggtgggtgggggttctagcaggctcctctcctccgcagggggtctggggctgcggcctcactgactgcctcggctcctcctctgtgcgctggtcctctgctgctctttatggaaaatgtttcctgaagatcttccaatattttgaaggatttggtccagaatggatagattttcatactgagtgttctttgaattcttttctttactggaaacactattctcactcccaggagacacctgtggcccacgataattctcagaaggatcgccatggagatttgcattagcattggcttcatcattggaaattttgtcctcaatgccaggagagaattgtaaattctctaataattcatggtaattctcagaaccaccagcttgataattctcatcaataccagcatgtaacgcatgttgataatgttgatgctgtacttggcattgcgctaggagttgttttattcagatccaaaatctcctggaccagaatttcatctaataattcagacatatcctcctgttttgaactgaatggtatttcaataggtgaacctggaatcacggttctcggccggagctcagtttcttgacaacagcacagcatgaggacaaagcagagggtcccgtctcc

SEQ ID NO: 264641 - DNA, 453 bp, Homo Sapiens
gacaagcacacaagatagaaagcgtaaaagcatattctcataaggaccaaacaatccttattgttggaggaccaaatggaatcatcgttaatgtatgtagaatcaaagttcacgatctgtaagtcctttttaagatatgcatgattcagcttatttacagttcgagcaaaggcatatttagaagcacagctatatgcttccaaactgtacactttcttgaagtgcagatcaaaaaatggattgtcagtatctgcttcttttccatcaatcatctgcagatcgttcaaagaccacttttttgttacttcatatttttcatctaaacctattctgtagtgtttcaccatgactatttttacttcttcctttttggtcactgacacacagaggtaatacctgtcctggacggagaactctatttcaataaactcgtacagattctgcgagagtggc

SEQ ID NO: 264642 - DNA, 692 bp, Homo Sapiens
cgcgacgttggccggctgcacgaagacctgcaggaagcggatgaggtagcacagcaccatgcggttgatgcggggcagcgcgtgcaccacggccaccgacgcctcggggctatcgtagtgcgcgatgcactgctcgtagaactcgtgcgggatcaggggctcctccagctcccggtaccacagcgtcagcagggacgcagggacgtgggggtcttccaggcctgtgggcaccttccactggtccacctgcagcttcagggcattaacctcgtcaatgtccccagggaccctgaagatgccctctgtctggtcaccgttgagcgccagcacctcctcagagagccgtgtctgcacccagggcagctggcgctcggggtagcgctctctctgcatgcccatgacctcctgcagtgcgctgccgaacatggacgggctgaacacggcgttcttggcatgccggatctcctccacgttgggcttcttcagccccatcttggccccggtcagggctgccttctgtagcttgtggtaacagtacttggcatacgtgcttatcgccaccactttagtgtcattgacggggtccatgtgccggtagatgtaaccttccaggtaggagtggaacttgggggtgggcgggaaaaaggccaggcagatggtcatgagctcccagccgcgggccaggctctcca

SEQ ID NO: 264643 - DNA, 660 bp, Homo Sapiens
agttcatggctaggtttgcacatgtagtctcacaattaacaccaccagctggtaattcagggtcaggaaacctgcagtcgaaatacccttttccctctgggcagatgtgaacagcagagggcgttgctaattcatcacatttcacagtcccatttgaacactggcataagcccgagggtgtggggatgagctctccaggttgataaacactgcccctataatgacaacggcagtggaatatgggtacacaaaagttaagagtgtcttcatagaatttgccttccggacaattacagccttcagcacagtcatcactgcactgctccggggaagagagagaaatgcaggaatggaggcagaacgaggaacagtgatggtacagcatgcccttctggcacaccacagcacagaaagaaatctgagttctgaaatcaatgggaacaccgtgctggccgcagaggtaggcatagtgggcaagagcattgcacaggcaggagcttccacacttgcatgcatcgtggcggcatagctgatagtacagcccagggctaatataaaggtggcaaggagcaaagagctcctggtggatgacatcacgagtgtgctgcatacccaatgttttgttgattgatgttacaggggtccacccgggggaacatg

SEQ ID NO: 264644 - DNA, 740 bp, Homo Sapiens
acagcccgtggtgaatgttgtctgggggaatccaggtgagtccattggctgtagatgtgatgtcaggaggccacgtgtgagaagacagccctcaggaaagcaaaggaagacagaggcgccagcctccctcacctgtctccacctgcaggtttacaggagccgctgtctccatatgtgaaggggcctactttgtggctcagctgctggccatctgcttccagtgtcaaccagggtccctggcagacagagtaagggagaaagcccactggctgggctgcttccagaagttcctggcctacctgctgctgtcggtggcctgcttcctccacccggtcctggtctggcacgtgaccatcccaggctccatgctcatcatcaccggcctggcctacttccttctgagcaagcggaagaagaggaaagctgcccccgaggtgctggcctccccagagcagtacacagacccctctagcagcgctgtgagcaccaccggctctggggacacagagcaaacctacactttccatggggccctcaaggaggggcccagctcccttttcatccacatgaagagtatcctgaaggggactaagaagcccagtgccctccagccccccaacaccctgatggagctgagcctggagccagccgaaaccctggccaagaagaagcaggtgcactttgaagacaacttggtccgcatagtcccctccctcgctgaaggtctggatgatggggac

SEQ ID NO: 264645 - DNA, 612 bp, Homo Sapiens
acctccgcaaagctgtatgagcagagaatcttcagctggtcggggcggaggccggggccttgggtcaccttgagcagtcgcagcccacggtgggacacggctaacagctgcacgtcgctgccactctcgcccgagacaggaaagaagcgggagaagtaattggcccagttgtcccgagcggccaccacgatgcgcttcttgacgctgtcttcggtggtggtgagagaatccaggtccacctccaagcctcccagcaggtctttcattttccgccgctcattctgggaaatccggatacaggactcggagaaggtgtcccgtaggatctgctaacagaggagcctcaggtagtagggatggctgaagttctcccgtgggtagaacacctccttgcgtaggaacaacttccagggcgtgccggtgtaggagaagagaaggtccacctccaagcctggggggaggtctttcaccccccgccgctcattctgggaaatccggatacaggactcggagaaggtgtcccgtaggatctgctcacagaggagcctcacgtagtagggatggctgaagttctcccgtgggtagaacacctccttgcggaggaacaacttc

SEQ ID NO: 264646 - DNA, 699 bp, Homo Sapiens
actgggttaatacttcaaaaagagacatccgagcatgttgttgattcctcattttgtgggcagcacctgtgaaagcagctacatcatgtctgtgatccattacttcatcacagaattacagtacagaaactacggtactcagacttgaaacagatattctcaacgaagactcagatggcttggtcttctcatttcttgtggaagtattcattgcttccatcagtttaaagccatgcatacttgtactagatggaattgaagaactgattggcatttatgggatttcaggtcagaaggtgaaagatttttcctggctgccacactcactctcccctcattgcaaatttatcatgagcactgtctcttccagcctgtcctacaagtcgttgtgtgcccgcccggatgtgaggacagtggaactcattagcacaggagatgaagaaacaaaattaaacatctttagaaagcatctctccattcccatgatggaccccttcgaacagagcacacaggcgttgaggaaaaaaccagacctgagtcctttaaaactcacaatcctagccaatgaattgaaagaatatagaatcaaccacaatgagtttcagtgtatgaaggagtacttggaggctgtctctattcaggagctctgggaattggttctcaaacgctggattgaagggtacagttggacgtttcaac

SEQ ID NO: 264647 - DNA, 361 bp, Homo Sapiens
ctcatgaatgagttgcgaggcagttaccgtcagcctcctatggataaatattcgaggcccagagagggtaagagacctgcctgcgacccctcagcacttctgtttctctctggggtcttgagggtacaataaagacccctaaggcttcctcttctcgcaggaggtccaggcgcagctgtgggggagggtgcccttggtgtcttctgtccctgcagccagtctgctttctactcggcagctcctctctccctcctgggatgagagtgcacgcgatgatgggttctctcgcgatgttggggaagtgcttcccggcgtctaatcctcgctgtcctcctccaccggtcccagcacacccgcggcg

SEQ ID NO: 264648 - DNA, 547 bp, Homo Sapiens
gctgagaatgctgctgggtctatataagatccagaaatgcacaactctctgatgttgctgctgtgtccgcaggcactgagcgggggtctgtggactgcggaggcaggagtgctgccctggaaatgctggacgccttcgtcagtgggcaggatcagctgtcttcctaatactctcaaatggagggatcttcttgtccactccccgcattcggccagcagactctgggtctgagggttcactttcccttcaaataacatttcctccacctcccagagtaaccgctgcactgactgtgaactggcttcgtcaaattcgtcatctctccaggaataaacggagcccctctccgtggatgagccggtggtagagctctgtgtggccgacccagaccaagaggtgtgggctcccgtgggtgtacggcttccgctggaggaaaaggatgacaaggataagcaggtatatttatcaatggctttctgcacatttcttgtaaaatgcgtaggtaaagaatctttgctcctcacagaaaaaccgtgccttctacgtc

SEQ ID NO: 264649 - DNA, 283 bp, Homo Sapiens
tgccacaaggtcctccaactccttgtgcttatccaaggtgcccatttcatgcctggtgctggccacgcctgtgccatacacctctaaaacatcctttattgtcctcatagactcatcatacttggctgcaagaccaaggaagttataggagcccatgttgatgacatctttgatgactcttccagtaaacctaaacgtccagttatagtcgtccgataccctctccatcacatcaaacagaggccctggggcactgcagatgggccggttccagttgtctcaa

SEQ ID NO: 264650 - DNA, 488 bp, Homo Sapiens
ttcgtgaatccggaatgggtgggggggtcatcaaaacattttattgacagtccatggattcttacagtgcaccagagtcacctcctagtacatactcaagacctgaagattactttataggtgccactcctctgcagaaacgattagaatcggtcaggaagcagagagcatatatcctgactccacctcgaaggaaaattccccagtgttcgcagttgcaggaagatgttgaccctcaaaaggttgcattccttctgcataaacagtggactttatatagtttaactcccttatataaattctcctataggaaaatcaaagagtattctagacttctcaatgcttttattgttgctgaaaagcaaaaaggacttgctgtggaagtgggagaagacttcaacatcaaagtgattttttctactctcctaggaatgaaaggaacacaaagggacccggaagcatttcttgtccagggtctcattttgtca

SEQ ID NO: 264651 - DNA, 636 bp, Homo Sapiens
ccaggagcgtggtggttgttaagaaacttctatctcctttagacaccccgagtggttttgtaaggatgacattatctctttttactttctgttccggtccacagccaggagcgtggtggttgttaagaaacctctatcacctttagacaccacgagtggttttgtaaggatgacaatatcacctttctccatgtccttgatggtgatttgacagtcaagagcaggggacctgttgttgccatcccaaaggtagaaggtgaagctatcttgattctgggaatccattgccccggtgtgtgtgtatctcagcaagttcagatccacttcctcctgagtgcatttcatgccaggggagagaggaacccagtccctccctatcttaagctgaagttgcccattttggggaagcctttcaaatacatagtaaatcttctccctgggtgagtcttcatctatggctgaaagaatagcactggaaataatacgagtttcacccatattcattgcaatttcagccttcttgctcagcattggtttttcatcattaacagggatgacctctactgaaatggttttaagtatcttatgtttcccatctgacaattggattgtaaaatcatcagcaaggctctctga

SEQ ID NO: 264652 - DNA, 414 bp, Homo Sapiens
aagtcccagatgctcccggggacaccgttcaaacctagggggctgtaggatgaggctgcagagcccagtgtgcccggctctgaacgcaggggtggcggctgctggggaggcgtcatggctgaggagcccaccggccctctggaggggctgggacagcgaaccgagcggcgaggtggacgcagaggatggcgagtgtagcgatggtgctctgggcagggagccggggatggcgacaggtgcagagccggccagcgacctgggacctgctgctcccaggtcgtggccgtcttgctcttccaggtccttctctagggatgcaatattcacattgctaagatgcaggtctaacgcagaacctggcggggggcgcacctaagggagggcccgctcctgaccgccgagtaacgagacccg

SEQ ID NO: 264653 - DNA, 666 bp, Homo Sapiens
agcccgctccagacacactagtatccacttcatgattttctggttgctgatcagcacaatacttcgatccccagtaacacatttctccactgtacatcatagccagcagatgaatgtcactaaatattcctgcactcagtaatttagctgtgtctagatcttggaaagaaactccttcatttaactggataggacatcgataatttagcatctgtagcaagtaactgattccatcaagaaggtactttttaagcaaactggattttcttaagagccactctcttcttttggtaagagaatgacaatacatatacagcagggctcctcgtctccaagagagacattccagtagctcatccccaagcaaattgcagtgttttggatgcatattattttcctttactaaaatttctggttctgaaagaaaactaatcagctcttttactttctgtgaagaagagtcttcaggaaaatcttcatctactagcttgttctcctcaaaatatgtcatgtccaaaatagcctgtgtgtaaagttctagaagatttgatggatttgaacattctttctcttctacacacaggagtttcaatttttctaatgctgcagaggcccgaattaaaaagtgatcatcttcaccggcagcttcgctaagttgctgtatgt

SEQ ID NO: 264654 - DNA, 663 bp, Homo Sapiens
gaagagcgccagatattactgcagcaacaaaaaatatgtcgaaatcgagcacgtaaatattttgtggagtcaaatcggagaaaaaaagcttttgaggagaaacgaaaagaacaggaagaaaaagaacaccaaattagagaacaaatactctcaacaaagaaaacagaagtttgaagaagttactgaaaaattccagcgtgcccatgttcctctttcacagcggaggaaagcagtttcccgaaaaccagttcctccattagaagagaacctcaaacaaattcaggaatccaacataaaatcagaagtaaaccttcccttttcacgtagaccaacaataaactaaagagctatagattctgccttgccttccgcattatcaaaaaatgatcacaagcatcagaaacaactcttatccaaaatcaattgtgagaaagaaatgaatgaaaacatgagggcaaccttggctactagcaaaaatgtgttccagcttaaactggaggaaactcagaaactcctcgaagatcaacatctaagcaatttgcaaaaattttgtgatgaagttaatcagataaccaaactcggaaaccctctcaagtatagacagtcttgaggctacagagcatgaagaaatatatataacacttaataaggagcattccacat

SEQ ID NO: 264655 - DNA, 711 bp, Homo Sapiens
cacagaggggtacaagctgggtggggagagcactgtaggatccttggcagtgtcattcttgttctctctaggctcttgactatggcttgatggtgaagagtttttttcttgtggagttgggcaggctctggccttcctcttgagcagaagagtgccagacaaattgtctgcattctgtcggttgttttcctggggcccctcttccttccccaaggacttcaatcttattgccccaagaggacaaggagtttgattagtgggcagtggggtgtgagggtggtggctgggtgtcaccactctggcagagattggtgcagcacttgttggttgtaagcactctcggttcagccttcggccctgtggggccttcaccaactttccaccctcaagctgaagggattccagctcagacacacggagctgacgggcagcagatagcacatcctgggcttcttcttgagatacttccatttctgaggtatacaagaagtccaccagcttcctaagtgtgctgatcttcaggccacccagctctagcaccaccttcccaccctgagctggcctctcccgctccaggcgctactgtgaagaagtgggctacaagctgagcaggatgcagcagtgagctggaactgcctcaccttctgcctgcagaaggacatcacagaacacatcactctgctgctggtgatgaagctgcagaaaagctaa

SEQ ID NO: 264656 - DNA, 758 bp, Homo Sapiens
cacagatgctatggtccacatgctgctgccactgctccagaccccgagggccagccctggcgccttcctgggcatctcagccctggtgcacaacctctgtgcttctctggacgggccctgcggccagctgcctggagtcggctccctagtgaggatcctgggagacgccttgggtgagaactgtaccatccaggagccctcggatgatgacaagctccagcttgtgctgaaggcagtcggcaacgcgggcttggcagccatggctctcacccctacgttgagtgcctgtgcatctctgagaagcagcacacccgagatccggctgggggccatccaggccttccgaagggtcccctgctctgcagacagataggtgctctcccgtctataccaatccctggaggaggatgctgagatccgtatcaatgcctacctggccctgatgagatgccccagtgaggaggtgtttgcccaggtgcggcgcacccaggcaggcgagctctccacccaggtgggttcttttgtgtggagtcacatcctgcagctgctggagacgcacgaccccctgaaacgggccctccgggacaccctccccgaggacatcctcagccaggagttccacccagaaatgtggaaacactcgtcctattctgatgtcaccttccaatcagtgtctggcagcctgggagccaacctggaggggacccttctcttctctcctgcctcctttcttcccgttctgccacagtcaacctgac

SEQ ID NO: 264657 - DNA, 795 bp, Homo Sapiens
ccccagatctccccttccatgtgaccatcaatcaggatgttagaagcagcatttttttcaccaacttcaattatttctccttctttggttcccactaagatttttccttttccacggcacacggagcgcacacactccaccagctgcaaggtctccagaagaaaggcccggcagcgcttcatctcctggtcccacaattttacagcacctccttctttggtcggccgctcttttccgccggtcactatgagtccatcccgaagggttgtgtacattgtgaacacggggcctgtgtgagccttggccaccagccggatgaggaagtggtccttccagacgtagacatctccattgatggcacccgtgaaagtgagattgttagcaccgaaggccacggagagcatcgtctgcattttggcagctcccagggacccgatgacccctttcttgtaaagcaaggcgctgcctgccagggtccagaacttcatatgtttgaccccgacagatacaaactgcgtgtctgagtcggggcgaaattccaccacaaatatgcgctccaggtgaccccctcggctggcaaccttggcaccttcctgccatcgccagacagtgatggtgtgctcagggtccactcccaccgacaccaggagctttccagttgcactgaagttgatgtaattcacccccttggagtggaagcaccgcagcatggagagggtgtgtttggtcatggcgtcccatatgtggatggaaggtgttgtccctatctggctggtggccaccacgtttctgtac

SEQ ID NO: 264658 - DNA, 544 bp, Homo Sapiens
atttttttgcaatcatatactgtttctgcaacggcgaggtacaagctgagatcaagaaatcttggagccgctggacactggcactggacttcaagcgaaaggcacgcagcgggacagcaagctatagctacggccccatggtgtccccacacaagtgtgaccaatgtcggccccccgtgtgggactcggcctgcccctcagcccccgcctactgcccactgccaccaccaacggccaccctcagcttgcctggcccatgcaaagccaggggaccccagccctgggagacccttcgagaccacaccaccttgccatggcttgcatcccaaggacgatgggttcctcaacggctcctgctcaggcctggacgaggaggcctttgggcctgagcggccacctgccctgctacaggaagagtgggagacagtcatgtgaccaggcgctgggggctggacctgctgacatagtggatggacagatggaccaaaagatgggtggttgaatgatttcccactcagggctggggccaagaggaaaaacaggg

SEQ ID NO: 264659 - DNA, 337 bp, Homo Sapiens
gcagagaggatgcccacaggagaaaagtctccaaactctcccaggactttgctgtctctgagagggaaggcccggacggggggccccatggaagtcaagctggagctgcaccccttgcagaacaggtgggctctgtggttcttcaagaatgaccgcagccgggcctggcaggacaacctgcacctggtcaccaaggtggacactgtggaggacttctgggcgctatacagtcacatccagctggccagcaagctctcctctggctgtgactacgccctcttcaaggatggcatccagcccatgtgggaggacagcaggaataaacggggtggccgca

SEQ ID NO: 264660 - DNA, 902 bp, Homo Sapiens
tgaccccgccacaggtgaggcaagggctgccgcttccagggtgggcaccaggccaggccaggcctcggccactgcttccactacaggcagcagggaggcccagggcactggccgaggccctgccaagtcaatagctgcaaggtccagtgctgcccggagctcagggaccaagtggaaactagggccaccatggaggcggaatagggcatccaatatgctctcatattgacccaagtaggccgggggctcaggatctgtccggccagggagacaatgcagctctgccagcagtgggcaagtggcccggagctgtgggcccacactccccaggcgctcactggggaggcttgagctgagccaggccagcttgggtgcagatacgccgaaagcctgcaggatgtccaagagctggccagcagtggcctcgccctcctgtagctccacactgcccaggaaggtggtggcgggctggccatcacagggggacactgaagtggcaaacagggccaggctgtgtgactccggccagtctctggtctcgtccaacaccagccccacatatggggatgccttcaggcgctggcaggcctctgtgtgcaagacactggcaatggccacctgcatgtccctcaccctcctgggactgtagtaatcgccatgctctgtgcccagcagtgcctggcacaggttgaacctctgcagctcgagcagggcagagcagcggtcattgggcacatcctcctttgccatgcagtacacagtagtcagcacagccactttggccgggtctaactccaccttgacgcccctggaggcaggggtcgtagccaggcctgggcaggcccctccaccatgagcctggccctcaaaagggggctggccctggttgacagccagagcct

SEQ ID NO: 264661 - DNA, 580 bp, Homo Sapiens
cctgtgtggcactctgtccatcaagcccagtgtgaaggagttcacggaaacctcagctgtgtttgaggatgggaccatgtttgaggctatcgactctgtcatctttgcaacaggctatgattattcctacccctttccttgatgagaccatcatgaaaagcagaaacaatgaggttaccttgtttaaaggcatcttcccccctactaatggagaagccaaccttggctgtgattggcttggttcagtcccttggagctgccatccccacagcagacctgcaagcctggtgggctgctaaagtattcgcgaaactcatgtaccctgccaaccacgaatgaaatgatggatgacactgatgagaaaatggggaaaaaactcaagtgatccccgcctggccctggaggtgtacttctggcccttgcagcccataccagtttcgactgatgggaccagggaagtgggagggggccagaaatgccaacccgacaggccctggaggtgtactttggcccttgcagcccataccagtttcgactgatgggaccagggaagtgggatggggccagaaatgccatcctg

SEQ ID NO: 264662 - DNA, 275 bp, Homo Sapiens
tctgggctgcaatcaaagggcaaatggaggtgatacggctcctgatagaatatggagccaggccctgcctggttactagtgtgggctggaccccagctcattttgcagcagaagcaggccatctgaatatactcaaaactctccatgcattgcacgctgccatcgacgcccatgacttctttggagacacaccgaagaggattgcacagatctatggacagaaagcctgtgtggcatttctggaaaaggcagagcccgagtgccaaaaccaccgt

SEQ ID NO: 264663 - DNA, 528 bp, Homo Sapiens
gtgaggtcgctcggcttggcgcgtcgggccgatctgtcaaggagtggacaccgcagttgagcccattgggtcgtgcgcgggcgcggctcccgtcccccctgggcgtgttgggcgtgtggcccctcacctacccggatggcgaccctgtgctggtcgcatggcgctgggcggagggcggcgtgcggggcctaggcggcccgcaggagaagtagggcgagcatccggaggagatgatcagagtctctggtcctgtcgaccgccaggtctccctggattcgaacgcagccgtcaatgcaggtttagatatcaagtcatcagggtctggctgtgtagaagttcaaagtattgagggtgataattgcaaaattgaaacagagcatgggactagcatcttgcagtctgttaagggtcaaaaattgcatgtaaaaacaaaaggaggcaaagtgatctgtctgggaacagttaaaggaaatatagatattcatgcatcagataaaagtgctgtgaccatagataaactgcagggaa

SEQ ID NO: 264664 - DNA, 423 bp, Homo Sapiens
ccgtacagctcaggtgggagcgagcgctggcccggatcggagactgaggtccctccgcctggcccggcgcgccgaactctgaaggagtggacactgcaggtgagcccgttcggtcggctgcgggcgcggctcccgtgccacctggccgtgaggcccctggacccccatcacctacccagcatggcgaccgcgtgctggtcgcggtgtgcggcgtggagggcggcgggcggcgcctggacggcctgcaggtcaagtacgacaaggatctggaggagatggccattgtgtctgatactatccacccccaggcgtccgtggaggtgaacgcgcccctgaagtttggcaagtgaagtgaagtgaaaacgggtttgggtcccagggaacgcacagtgaacttaataaatgtggtcgacgtgcactttt

SEQ ID NO: 264665 - DNA, 759 bp, Homo Sapiens
ctcagtctttaaccaagaggacagagaatttgattctcttgtgaaattaagagtgggcttctaattcaaatcaacctttcccttactctttgcgcagagctgaagaagcccctgtccattgaagaggtggcccccgccccgtcgggcctcacgaggtcagagttgatgtccatttctgtggagttaactttggtgatattttgatctgccgtgatctatatcaggaaaggccccatcttcccttcacacctggaatggacttttctgggacagtattggagacaggcacagatgtcaggacagttaaagaggtagatagagttattgggccgagcagcagaagtcccagggcagaggagagcgtccctgcccacaagggcctgtcgcaggttccagaaaagggctcccaataagaagctgcagtcctccctataacttacggcacggcgattttatgctctagagcaccgggcccctacccaccccgggtaatatagctgctgctggaagtgacgagaagtgcaagcaggcgatgcacaggggtgcgcagtccagacgtgaactacactcagggcagcctgaaggatgctgttaggtagctggtgcgcgatggcggggtgaatgctgccatcaaaatgtgctcactcaaattggcttcacagcctggtggtggtattgagagagttattattttatttactaaacagtaactctgaataattaagaccaacctgtgtcttatggagtcagagatgtgca

SEQ ID NO: 264666 - DNA, 1030 bp, Homo Sapiens
tctatagtactgaatttgttttttcatggtgggcagattctcaggatactctgttccagatttctgaccacccattattcttgtggcaatattcaaaagagaaacttatctttttaaatataaccttccaggccgattgtttctgagaagacatacaaatgtagaatctcaggcctgctgaatcagaatgtgcagcttcaaagagtcccccgctgatttattcggggaagagaagttcttgtctatcttggctgaacatgacattaaatgtgctttgcaaaattatgtctcccagattgttgtccatcctttatttctgtggctatatttgaaacagaatctttctcgtcacttgcagccttctcagctggttgtttctgagaagacactgtcccagatattggtccctcctttatttctgtggctatattcgaaacagaatctttctcgtcacttgcagccttctcagctggttgtttctgagaagacacttttcctggaggtggtgaatccttccttctcatggctgcttttgaactgggatctgcctctttcagagtaagcgtggataaaggaggtcgctcagaagattcgtgaataaaggcggttgctcaggagacactacaaagcaaaaggaacacataattgactacaggtaaatatgacacagcctaccatcaatcatgcagtgtttgtatccagctgaaatcttcgtgcttgcccttgaaattgttaccccattaggcctttgggttgctttgctcttgttttggttagccaaacaaacatgacaggaatatacacatgaaaaatcacaatatagattctataaaacatgcagtccagattgccaagggtgagattaggtttcacatgactacaagtaacatagaaaagtatttctaccaatgtgaatcagctggatgaagccaaaaaagatgacgtcaaatgagagaaccaaagcggaccccagaagaataaatgttagaaactatgaagttgcaatgagagtgcatgaaaatgtatcatt

SEQ ID NO: 264667 - DNA, 348 bp, Homo Sapiens
agactacagcgatgggaccatctgtcagttccagaccaaattccccccagagctggacagccggatcgagcggcagctctttgaagagactgtgaagaccctcaacggattttacgcagaggctgagaagattgggggcagctcctacctcgagggctgcctggcctgcgccacggcctacttcatcttcctctgcatggagacccactatgagaaggttctcaagaagatttcccgctacatccaggagcagaatgagaagatctttgcacctcgaggcctcctacttacagaccctgtggagcgtgggatgagggttattgagatctccatctacgaggaccgggg

SEQ ID NO: 264668 - DNA, 813 bp, Homo Sapiens
gcttcatcaaatataaaatcctctaaatctatttctctgtattcttcatcggattcttcattcttaatagcctctagagctgttgtcagtttctttcgcaaaataaagcccttccaaactgcctgaataagaatagcagccttctccctctgttttcggatattcacaatattttctctttttcctttctttaaaatagtctgattcttgatggaagaatttggcaggccttctgttgcagcagtatgtagccttgtggagaaatgagtctgtctgcgcatgaggtaaccacgccagtatgactggattaccacagctgccataattttttcactaggctcaatattttggtgattcctcagcaaagaatttgtcattactacttccttaaatgggattcttatggtgggaatactgcttgccttgctgtcttctctcttctgacatactaatatttcctgatgtcttccttccatattttcacatgtggcggatttgcttaatggggagtggctggagacagagtccatccatttctcaggaatatctggtgagtctggctcaccttcacgtgcacaagagtagaagactccattttgcagagtgctgtcactgtatgtaggggccaaatgatttttctgggcttctgattcatctttcttggtgatagttacatcccctcgttcgtgtgcatgtcggtattcagtactaagtatcatcaatttcttaaaataatgacagagattttctgcagtatccaaggtaaatacatctccttttccgagttatataattttcaattagcaagtgaat

SEQ ID NO: 264669 - DNA, 618 bp, Homo Sapiens
caacgtccgaatcccatggccacccatcttcatctacactgccagaagaggaggaggaggagtcctcccagcaacgtccgaatcccatgcccacccatcttcatctacactgccagaagaggaggaggaggaggacgaggaaggctattgtcctcgatgccaagagctggagcaggaggttatttcactgcaacaagaaaatgaagagctcagaaggaaattagagagcatcccagtcccctgccagaccgttttagattacttgaagatggttctgcagcaccacaaccaactcctgataccacagccagctgaccagccgacagagggaagcaagcagctgttgaacaactatcctgtctacataacgagcaaacagtgggatgaggctgtaaattcttcaaagaaagatgggagacggctccttcgatacctcatcagatttgttttcacaaccgatgagcttaagtactcatgcggccttgggaaaaggaaaagaattcattaggatgcattgtacctccaaccccgattggtggatgccctcggaagagcaaataaacaaagagttcagcgacgctttcggtcacgcccgacaggggcgggcggtggggactt

SEQ ID NO: 264670 - DNA, 763 bp, Homo Sapiens
tgttagaacaccaaggaaatgaaagttcagccgatttcactgtccccaaattcttgcaggcagaagaaacaataaatgaaaatgcagcagattttcaggattttgaagcagaagaaactaacgaaggcagacactttccagacaacttatgtcctttttggaacaaaagagatgatgtgctgtgtagtagtatgaaggaaggaagattggaatttgcatctatgtttgatacgatacatgcaaaggatgatagtgaggagacagatagaaccattacagaactgcattctatccagaaaagtctacttgcagcgtggactataggaatttcaaaaactgtgacagaaaaaaatttaatgttaaattacatagtagtttgtatcactcattttttttacattcttcaatttataaaatgtccttttcctaaacttgatcttgttttaagcaaaagctcaagacataatgcatggatactttgtatctttcaactttttcatcagtgtttatcaatccattattgggatataagatacaaacaagatgtggggcatttgataaagctgacctcaaatactgtaaaacttttgctgactcagcaacaaaagggtcagttattctcagagaaacttttagcttgtttttatttactcaaaatggtagctgacaatttaaatggtgtatacattcttcaacctgaagttatttcagcatcagctgatggaagtaaaataacagctcaagactcattggtggtacctat

SEQ ID NO: 264671 - DNA, 820 bp, Homo Sapiens
caatcgtctcattgtgaacagaaagactcccctttatcgcccagtcgggccgcccctgtccttttctggggataagcggattgcattctccaggatccaggggattaatgtcacagttctcatagtcaaaggttccattccataagtgctttgccagctgaaattctatttttcgttgtgctaacgtgacttctttcccatgccatacgtaaacttcactaccaaaatcaaacaccagtacctctttgggttgcagaagagagcactttggaattttcccccagtagtcgtcatcaggaacaagtttgtcatccatgagacagtaaatgcagttagtttctattatggctgcttcatagagttcatcttcttttgggtctccagcagcttcgccttttctatgggcgtttgcaaactctcctacccacaggaagcagcagtggggagagagcaggaggaagcagttcccactattgagcgccgaaagctcgaggttccaccagcctggtctgcacgtgtcttcttcctttaatctgcaacagcatcagcctcttgaagggcacggcgctgttgttagagttctgttccttcaggttgacgctccgcaggctgacgttgctgaagttttctttactggctaaacccgccagggtgacttctgagaagctggagttggaagatatcctttttacttcatgagggccttctgagcaccattattggccttcacaaggcagaaaaccaagcaatgagtaaagcatcggaagaagccattcccaaacacagaagcagggtaagggttcaaatactctctcttttc

SEQ ID NO: 264672 - DNA, 302 bp, Homo Sapiens
cccacgagcatctccaccgtccagcaggggaacaaagcggcatcattccattattccaggggaggtgctaaatacaagggtgaggctgtcaagcggtccctggtggagtcctacattcacccaaacagcaacgagacagagcggaggggaacatcgatactgtcatgaactggttcacctaggaagactttgactttgtgactctgtgctacagagagccagataacgtgggacatcgatttgggccagaggcagagaacaggaagttgatgattcagcaaatcgacaggaccatcgggtat

SEQ ID NO: 264673 - DNA, 612 bp, Homo Sapiens
cacacaagtccgcctatgtactctctggatcgaatatttgctggatttcgaacacaaagtcagatgctgttggatcacgtagaagaaccagatgaggtcctccactgccaattttctgataacagtgatgatgaagaatcagaaggccaagagaaatctggaactagatgtagaagtcgttcatggattcagaagccagactctgttcccttgttgaattgagtgatactcaggatgaaacacaaaagtcagattcggagaatgaagatttaaagattgattgtctccaggagagtcaagaattgaatttgcaaaaattaaagaattcagaacgcatacttactgaagccaaacaaaaaatgagagaacttacagttaacatcaagatgaaggaagatctgattaaagaattaataaaaacaggtaacgatgccaagtctgtaagcaagcagtatactttgaaagtaacaaagctagagcatgatgcagaacaggcaaaagtcgaactaactgaaacacaaagagcagctacaggagctggaaaacaaagatctttctgatgttgcaatgaaggtaaaattacagaaagagtttcgtaaaaaggtggatgct

SEQ ID NO: 264674 - DNA, 603 bp, Homo Sapiens
gccaagcaactctttgctctcacttagcacgtgtcatgcccacctcaaaagaaaccacagcattcctttccactccttactgtagcagtgtggcccgcattggagtctatgtttctcttcaaaaagaagtcggattctttcccattgtgacccgcatacctaccggccccgaccccgaaccgcgtggcgtccgcccgagccctggcgctgctgggtctcctgctgctgccgctgctcgcagagcccaggaaactctgcccgcagcttatgacggtcattaaccagtttctgaccaaggacaaggacacctacatggacactgtcaacagataccacctcacggagccggaaagaaacacatcctctaaactcaaggactgcgtgaccgacacaatgacccccgaggagacagaggccgtcgtgcaagattagagaagaacagcagaattgttcaaaagatggagacggagtccgtcgtgcaagacaaagcagtatagaaaccacagagaggagggtggactccacgcacctccacccccaggccatggggctgggggcatggaaagcatggcctgtgaggttctttttgaggccggccaccct

SEQ ID NO: 264675 - DNA, 729 bp, Homo Sapiens
tctgcagcaagacctgactattaatggaaaaacctgactgcgtatcaaagtcactgctctgacgcgtaagtgaccggtactgctggtatacatcatcacccatgtcttgcaggagctggccaacctcttgggtcataaccccaggtttaggatcagattaatctgcttcctctggagcatgggatgcagccagagcattcagcatatcatagatcacttccttgatagtatcagggatgacaggaagaggtgagggcttcaaaggggtggtcttcaccagctgtacagcattagggcctttaattctaagattctcaaattcatcatctgaagcagttcctgagcctcgaggggcaggaaggacgatgcggatacagcagttggccacttctgtgaatatgtctggattgcggcatgcggctggcccaaggacacgaaggatgtagatgatctcccgagagccgaggctgcaagacacaacaccagaggtagtgctaccagctccacttgtagctgctgagcgaacaaccttttccatgggatgacgaagggtacaggggtcctcaatgatgtgtcttaagagaagggtgaccaggggagtaaacccattgaagcctgagctctgggtcaaattcaagatcatgcggctactcttcagttctacaaacatcatggcatatttgtggtcccgggtgagcctcagacagagacgaagggtggcatgcaaag

SEQ ID NO: 264676 - DNA, 725 bp, Homo Sapiens
  misc_feature (44)..(44): n is a, c, g, or t
  misc_feature (47)..(47): n is a, c, g, or t
  misc_feature (49)..(49): n is a, c, g, or t
  misc_feature (93)..(93): n is a, c, g, or t
  misc_feature (96)..(96): n is a, c, g, or t
  misc_feature (117)..(117): n is a, c, g, or t
  misc_feature (131)..(131): n is a, c, g, or t
cgaaggatgtagttgatctcccgagagccgagggctgccagacncancncccagaggtagtgctaccagctccacttgtagctgctgagcgancancctagtaaagagagaaagaancactgtcgattaancactactttctaaaaatacaactgcagtcaagagttaccaagactaaaagctttggattttgggggagaatgacattttatttttaagtcccgtcccatcccttctggattcaaaaaacctggcttataaaaaagttgcagcatgtctcaaaactatcaattattagaccagactgcatgtgatctttatagaaactgggagatgtgtcaagactataaaccccacataacttccacattaaaatgtcagctcctgagcctctccaaatgctgtcacaattttaaaccagaatggttcaaaaacatgtaacactgtaatccacttagtgtacaggaacacaattaaatattttctttatgcctcaaagtcaaccatcagtctgagataatgatagccactggagatactgaactatttatatattgtttgccttgataacacagggcttacatatagctatgcttctgctcttctcataaaattgcttgttaataatggaaaaatccatgaaagcacgaagaaaataactcaattgtattattttccattatctgttatttcacaaactacatgctcacaatgaaaaacatcct

SEQ ID NO: 264677 - DNA, 522 bp, Homo Sapiens
tgatcctctcaggcctgggccggctgacctccgcgggcccacgccacttattccatcaaaattgaggggaaaccatacacttcctgcttgaaaaacagtcatttttacacccacatttcctggtgtatttatacaacaaatcaggaacattgtatgcagattcttcattttcaaagggtcattgcttttaccaaggatatgctgcagacattccaaaatcagttgtggcactacgcacctgttctggactcagaggattactgcagttagataatatcagttatggtattgaaccattggaatcttcacctacatataagcatgtagtttatcgaattaaaaatgatgctattggtcattcctcctttcaagaaaattatcctgtggctcaatatatagatcagtcctacaggattcttgtcaaatcagacataaattcaggtgccatgctatcgaaaagaactctgaaaatacaaatcattatggataaagccatgtatgcttatatgggctccacggtgg

SEQ ID NO: 264678 - DNA, 426 bp, Homo Sapiens
cagccaagccccagcctccagcagtgttcctgcagcgatgtcaggagccggcgcagcgacacttcttctccaagcacgacaaccgtacttcctttgacaaaggtccctattgcctgctgcagggaatctggaaggaggaaggacctcggagcgcctgtggcagcggcacaccttcctgcgctgggcaccctgtgagatagagttgcgccagcaggggcccctggaatcttcttaccaagctgatttcaggccaggcccaggactcagtggcctcccccagcacctcatccactttgtgcaggtccagccttcccataccaggaccacctaccagcagaacttctgctgcccatcccagggtggccactatggcagctacaaggtagggccccaggcgccggtcactgacgtactgcctgacctccc

SEQ ID NO: 264679 - DNA, 368 bp, Homo Sapiens
gcaggcttctccattctcacattcgtcaagatctatgcatgttttctcatcagaatcaagctggtgtccatggttacaggaacaacggggagcaccaatttcatgttcacggtgatgggaacaaacactattgttcttttcacagctattgacaatttccaattcaatccctgggctgtgactgttgccaattactgtaacattgttttctatcagctcccagctcaaagccagtttggcaggcacaagtgaaagatcccatagagtttacacagcagtggccacagaaaaagaccttcagcacactcatttaatcttcacaaatgttttatcttcaggcagctggaccctgctgacaggacacctgg

SEQ ID NO: 264680 - DNA, 845 bp, Homo Sapiens
tcccttgtacagtaaaactgcctcttgcaccggatgcagaagtcctggctgaagcccctttcacaagtggccccacattttttgcacctgttgacctcctttccgcggatgccgaaggacccagggggacagtcgtgcaggcacttgccgtactggcggatgccttcccggcggatgaacaggaagagcctctgctggcaggtggaacagccgttctcctctgagcagatgatacagcctgggcagttgccccccaggaccagtgcccactgcccacaagaccagggcagaaggagggggaaagggagacagagatggtcaaaccatatatgcgagcagctgagatggtctcattgggatagtaactgggcacatggccacccaaacaaaagactacatttcccaccttcccttacaactagatatggtcatgtgaccaacatctggccaatcagatgtaaggtaaagcagcatgtgacacttcaagaaagctgccttaaagggcaggggcgtgccccttgtcgtcccctcatcctttctgttgggtggaatgtcaacgatggctggagcacaagcagccatttcagatcatgaggtggaaactatgtcccgtgaggcggggggaaaatcagataaaaagcacctgggtgcctgaggaaggcagaactgctgtaccagctctagcctgcctgtgtagactgttacatgagagagaaatcaacatctatcttgcttaaatcactgttatttgaagttttgcatcactcacaaacaaacctaatctttaccaaagtaatgtgaatttttgagtgaaagggggtgcacctgatgagtggggtggggtg

SEQ ID NO: 264681 - DNA, 397 bp, Homo Sapiens
agcattcagccagtcgggagtgtcttgagatcctgagcagccaagaaatcctagggccttctcttgtatcttttccatggtgagtaacctattcattttgggagagaagatatctcgtggtatttctgatatagcgccttgaattctgccagtctatctcagatgccctgcggtcatagtggggtttgcgatcaacaagcctcttcagaatgccctggttttccatggtgattctcactagctcgcggttccttgtttctctgtttaagctcttggaaaaatattcattccagcaatccaccttggcagggccgcgatgggcaattgcaatagagactggcagaattcaaggcgctatatcagaaataccacgagatatcttctctcccaaaatgaa

SEQ ID NO: 264682 - DNA, 1178 bp, Homo Sapiens
  misc_feature (829)..(829): n is a, c, g, or t
gacaccagtggcaggggagctgggggctccccggcggaagtagcgcgagaggctggacagcagcgtgctcaactcagagctgagctcctgcttcatccgctgtttgtcccgggggtgcacagccgggtccctaaggtaccgcatcgcctgagagatgagcaggtagaagcagttttccatggtaaacatcaggagggactttaacgtcctggtcccttctgcctgtgtgctgagccccactgcctgggtgaggggctcctttttcttgtccagctctccaagcatgttgagggccacattcactgtggccagaagggtcccgaaggagggggccacttcggagtcaaaggtgggagtggtaaagctcagggcaaacaggaagttgtattcagcaaggtccagggactgatccagcagaatctggcagacatctggggtgaagtggcgcagggctgccagcgtcttgctgaggatcttgagaaggccatactggactgtgtgcaaggcctgctgctctgatgcctctgtgtcagcagcgggctgctttgaggaggagggggcagcagaagcagcagacggtggcctctggactcgctgggcaacagctgaggggaggccatccccatttttgttctgtaagtaatgctgcagcatctttcgactgtgcaggagagaggtacatgcctggcacaagtaacccaggttgacctggatatcacgcatgagctgaggcaggtggaagtgccactccttcatgaagttagagagctgcagaataaaacccacggtgtggtccgcctcctccaggcaggccagactctgcactgtncctcactgcgttgaggcactgtaaggtccgctcctggtggacacccacgaagtccagggcctcaggcaggaagttgtagcgcagagttttgagcagctgctccatcagggacatggacaggcggtagactcctggccaagagggggcatccagggacttccgagaggcactaggtgtctgtgctgtgccgttggtgctcagctggtacacactcagaaggggcaaacaatgctctgggtgatgccacgctccagccactgctgtggctccctgctgagtgcgagccagcgacgcgtggtcgacgatatcccgagattccggaccgtaccagccgctttataaacaggtt

SEQ ID NO: 264683 - DNA, 659 bp, Homo Sapiens
cagcgtggaggccagaggttgaccagctgcacattcatggtgagattgagcttggcactggcccacagctggccctgctcaaaggccttcacctgcagcctggagaccgcggtgcctgaggtgcgagctaactctaggggcgtggtggtccggaccacaccgtctgcactgaccaatggagaagagtgggctgggcaccggagacaggatttcatagcgcaggtcgacaccccgggcctggacctgaaccacctcactaccgggggccagattctcagggatggtgatattctgagcctgctcgaggaaggagacctggctggagggaacaggcaaaaccttcactatcaccatcccttggcagctttgcctttgtccaaaggacactgagatttgcagctggaagaccttttgagcctggcctaggaggccctgggatggtgcctgcagccaaccttgctcattgatggagaaaggtccagggaagtgtggcaggtcctgggcactgataatgctcatctgcgctccgtggagttctaggcctgggaggagcagagtgtacagccgagccccaggtgtgactgtctctggcacctgaatcatttccccagctgggctggcaaattgaccagcacactggatatggctaaggtcccgct

SEQ ID NO: 264684 - DNA, 1017 bp, Homo Sapiens
atatcttcctcttcattctcctgtgccagattctccagatatctctccctcatctgctcctcttttgacttctttatctctttgaagtactcgtacagttctgggggcagcttctccccagggttgcggggaggcagcagcagggtgttgtaggaatcatagcccttcagcttccgcaagatcttttcttctatgagatactgctgatcaaattctaaggaataaaactcaatggggaagttgcagggattcttcactatcacctcggcctcgtctccaggtgcacaaagtagcagtggccccagatccaggactgaaggactaaattccaggcgtggctctagaccttgcccacgtgccaggagggtaagcttttgagcactctgggcaatctgaaacaccagggtttggctgtagaatttctcttcttttggcatgaatttcacttgcacgttggacttctcaccaggatccaagactccagaaatgggctggatttcgaagatccgtgtctttggctttaattcagcgcgtagtttctgtcttaagtacttcggcatgtgtttctccagcttgtcaacaggcttttggctctggacgaaccattcacaagggacttggagatgattggaaagctgaatagtttccaccaggcactgtccacactgaattgtggcaaagtccacttttccacgagagagagtcatggttggaatggtcaccttggcttggagacagatgtgaactgttggccctccaaccaccttgatgggcagaatgacttctttgcttccaacaggaagattggccccctgtgggtcaaatctcacttcaaatatttccgtttcacaatgaggcagattctttacacgatctagctcagtactgaatcctgtctcatgaaggacacgcttgtctgcatggaatgacactggaaagtgactggtgttgatgatcttgatgaagtgggttcggacttcgccaaggatgatgtagccaaagtccccaggatgtact

SEQ ID NO: 264685 - DNA, 381 bp, Homo Sapiens
attgtacaagtaaggagcctacaccaccaatgttcacccccctgggtccaaagagagccccatagcatggcttgtggcagtatggcctcacattaagctctgcatgcccgccaggggacaggatgctgtggcagcgctcacatttcaggcagaagcggtgccagttcttgcccagggagctcaccttctcagcttacgaggacaaagtggaaccgagctgcgaggagcctttccaagcataggacgcctcctttccctcttcggccctctagggaattaggttggcctgccctgcttcctggagatgagtgtctccaggaggccagttccatcagcgctccggtttcacactccccacagagctctcagaggaagggagaa

SEQ ID NO: 264686 - DNA, 1050 bp, Homo Sapiens
  misc_feature (857)..(913): n is a, c, g, or t
gcaggggcggggaggcctatacttccagccttcctctatttctagtaactgaaggaacatcttcacaatccggtataatacccgaagcctctgactgcttgcagcttctatatcctgctcttgagttccatggggtaccgcatcaatagctcggcgagggctgaagcatgtcgacacagctacctggcccagggaaccctcgattcggaccacggactcataagcctctgccttcggaatgtaaggcgttaccagcttgagggactcaacccggtttcttcgtccaagtagctcttcgtctgcctgcttcttctctagcttctggtaatattcctggtaatagtagtcatccaggcggggttttgcactctgcagctgcaccatctgcacttttatcacccagtccttctcttttctggtcatgaggttagcataggggtctggctgctgagaccaaggcttcttggctgggggacttggtgtttgactatgctgctgctgctgcaagattcgttggtgccgagggtggagctgggtcagatgactgaacctagggggccacgaggtcagcaggctgcagaagagagttgggtctggtgagggcagccgaggtccaaagtgctgtgctggagagctggtgctgggaaatgtaggccagaaagggatgggcgacaggtagtccaaggtctgccacagaaaatgcaaggaggcaagtgacattcccagcacaccaggggccttgactccaggggagctaagcagagctctctgggtgttgtggacagcaccaagtacagctggatccccaagatcattctcttcctcctctaggtctgggtccagatatgggtccagannnnnnnnnnnnnnnnnnnnnnnnnnnnnnnnnnnnnnnnnnnnnnnnnnnnnnnnnaactggcaggcagacaccagctcctcctcagaagccaaggggccacaggtcttacctggcccttcaaggcaattcatcttggcaggctggtggacttccttcttagccgtgtcctccagtgaaacagcattgccagc

SEQ ID NO: 264687 - DNA, 304 bp, Homo Sapiens
cctcctgccacttcctccagaggtgcttccagaccaccaacggctacctgtccgactccaggttcctccccggcaactacaacgtggcagccctggccacctcgtcccttagtgggggtggtgcagagcatcaaggaccacatcacaaagcccacggccatggcccgaggccgcgtggcccacctcatcgagtggaagggctggagtgcccagcgggcaggctgggagctgtccccagctgaggacgagcattactgctgcctcccggatgagctgcgtgaggcccgctttgctgcaggggtcg

SEQ ID NO: 264688 - DNA, 528 bp, Homo Sapiens
ctgctggtctcctggacaacagagagctccaacaagcaccacaggcacaggaatcattcagtgactcaaattttcctcttccggacttgtgctcatgggaagaggctcagctttcctctcagctctacagaaataagcagctgcaagataccctggtgcagaaggaagaagaactcgccaggttacacgaagagaataatcacctcagacaatacctgaattctgctttggttaaatgtcttgaagaaaaggccaagaaattgctctcatctgatgagttctccaaagcatatggaaaattcaggaagggcaagagaaaatccaaagagcaaagatactctcctgctgagattccccatcccaaaaatgccaaaagaaacctctctagtgaatatgctaactgtgaagaacaagctgggccaccggtggatccctgggtccttcaaacacttgggttaaaagaccgtgacactatcgatgacacctcatcagctaactacagtgccctcgcatctgatcccagaaaaa

SEQ ID NO: 264689 - DNA, 627 bp, Homo Sapiens
catggcaagtcccagttagctgtacagaatctgcagaaggtggctgcaatgaacgggaggaagcaggaaggggaaaggctgaccaaggaggtgatgagctcctacatccaaagagagtttgcaagtgtctgcacctccaactcaatcttggacctcgtccgaaccccggccatccgcaaggtcacatgctgtctcatggtgattaggttctccaactctgtggcttactatggcctggccatggacctgcagaagggtgggctcagcctatacctggtgcaggccctgtttggaatcatcaacatcccggccatgctgatggccaccgccaccatgatttacgtgggccgccgcgccacggtgacctccttcctcatcctggcccggctcatggtgatcgccaacatgtttgtgccagaaagcacgcagatcctgtgcacagcccaggcagcgctgggcaaaggctgcctggccagctccttcatctgtgtgtacctgtttaccggcgagctgtaccccacggagatcaggcagatggggatgggctttgcctctgtccacgcccgcctcgggggcctgacggcgcccctggttaccacacttggggaatacagcaccatcctgcca

SEQ ID NO: 264690 - DNA, 440 bp, Homo Sapiens
  misc_feature (29)..(29): n is a, c, g, or t
ccttcccagtaatttcctgttccacgatncccatcttgccccccctcgatgaaataaacccaaaaatgtaaaactccagtgtgaagaggaaagctgagccccttaaacgctctccctgactatgttgaagtttctttggcataaatacggagaacttctcatccttgtcagtggtgttggaaatcacatggtgggtgaaggtgagggcatccacagcgattcctcgggacctcccatagtcttgaagcacagcagcaagaaaggcttgtggaaagaagaaagctgggagccagtatcttgaaggaaacccttcaaagaaattgttctctgaatcctcagggtgtttgcatttttggctagttgatggaatagactgcttccaaactgtgacaaatctcatataccgacgctgtattgcagtataagccactttggcccaa

SEQ ID NO: 264691 - DNA, 577 bp, Homo Sapiens
gatcccaccgcctctaccaaacggactagtcttctactatgtttcactgatcttacagcagactcctcgccatgtgagaccacctcttgttacatatgagagaagcatatattttgataatctggaaaaatacactgattatatattaaaaattactccatcaacagaaaagggattctctgatacctatactgcccagctatacatcaagactgaagaagatgtcccagaaacttcaccaataatcaacacttttaaaaacctttcctctacctcagttctcttatcatgggatcccccagtaaagccaaatggtgcaataataagttatgatttaactttacaaggaccaaatgaaaattattctttcattacttctgataattacataatattggaaagagctttcaccgatttacgattatatagcttttttgctgccgcaagaactagaaaaggacttggtccttccagtattcttttcttttacacagatgagtcagtgccgttagcacctccacaaaatttgactttaatcaactgtacttcagactttgtatggctgacatggagccca

SEQ ID NO: 264692 - DNA, 583 bp, Homo Sapiens
ggctcattgaacccgtggctgccagcctgccatacatgacatgccctgggaatcatgaagaacgctacaacttctctaactacaaggctcgcttcagcatgccgggggataatgagggcctgtggtacagctgggatctgggtcccgcccacatcatctccttctccaccgaggtctatttctttctccattatggccgccacttggtacagaggcagtttcgctggctggagagcgacctccagaaagccaataagaaccgggcagcccggccgtggatcatcactatggggcaccggcccatgtactgctccaacgcagatctggacgactgcacacgacatgaaagcaaggtccgcaaaggcctccaaggcaagctgtacgggttggaggatcttttctacaaatatggagtggatctgcagctgtgggctcaagagcactcgtatgaacgactgtggccaatttacaactaccaaatatttaacggcagccgagagatgccctacacaaacccgcgagggcctgtccacatcatcacaggatctgctggctgtgaggagcggctgacgcccttttgctg

SEQ ID NO: 264693 - DNA, 467 bp, Homo Sapiens
cagcaccgacctgatcctcattggggccccccattactatgagcagacccgagggggccaggtgtccgtgtgtcccttgcctagggggagggtgcagtggcagtgtgacgctgttctccgtggtgagcagggccacccctggggccgctttggggcagccctgacagtgttgggggatgtgaatgaggacaagctgatagacgtggccattggggccccgggagagcaggagaaccggggtgctgtctacctgtttcacggagcctcagaatccggcatcagcccctcccacagccagcggattgccagctcccagctctcccccaggctgcagtattttgggcaggcgctgagtgggggtcaggacctcacccaggatggactgatggacctggccgtgggggcccggggccaggtgctcctgctcaggagtctgccggtgctgaaagtgggggtggccaaaaaaa

SEQ ID NO: 264694 - DNA, 409 bp, Homo Sapiens
cccaaggatcccgatgggaaagaggaggccaaacatggtgcaaaagaggaggctgatgcaaaagaggaggcggaggatgcagaggaggcagagccaggcagtcccagcgaagagcaggagcaggacgtggaaaaagagccagagggaggggcaggggtgattcccagctccccagaggagtggcctgagagccccactggggaggggcacaacctcagcacagatgggctgggtccagactgtgtagcttccggacagaccagtccttcagccagtgagtcttcacccagcgacgtgccccagagtccccctgagtccactgcctcaggggagaagaaggagaaggcaccagagcgcagggtatcagcccctgctcggccccgggggcccggggcacagaaccgcaaag

SEQ ID NO: 264695 - DNA, 939 bp, Homo Sapiens
tcagcggcctcctcatcatttaccaagaggtgtccaggctgtggtcaaagtcagctgtgcagaacaaagtggtggtgatcaccgatgccatctcaggactgggcaaggagtgtgctcgggtgttccacacaggtggggcaaggctggtgctgtgtggaaagaactgggagaggctagagaacctatatgatgccttgatcagcgtggctgaccccagcaagacattcaccccaaagctggtcctgttggacctctcagacatcagctgtgtcccagatgtggcaaaagaagtcctggattgctatggctgtgtggacatcctcatcaacaatgccagtgtgaaggtgaaggggcctgcccataagatttctctggagctcgacaaaaagatcatggatgccaattactttggccccatcacattgacgaaagccctgcttcccaacatgatctcccggagaacaggccaaatcgtgttagtgaataatatccaagggaagtttggaatcccgttccgtacgacttacgctgcctccaagcacgcagccctgggcttctttgactgcctccgagccgaagtggaggaatacgatgttgtcatcagcaccgtgagcccgactttcatccggtcgtaccacgtgtatccagagcaaggaaactgggaagcttccatttggaaattctttttcaggaagctgacctacggcgtgcacccagtaaaggtggcggaggaggtgatgcgccccgtgcggaggaaaaagcaaaaggtgtttatggccaaccccatccccaaggccgccgtgtacgtccgcaccttcttcccggagttctttttcgccgtggtggcctgtggggtgaaggaaaagctcaatgtcccggaggaggggtaactgcaggaggccaaatgggcccccccttggaaataaaggtttttctggc

SEQ ID NO: 264696 - DNA, 485 bp, Homo Sapiens
atttggcccaggacgtggagagcctggcgctgtgcctgcaagacctgctgagtgaagacatgtaccgactggaccccactgtgctccagatgccctttagggaggaggagaagaccccctttcccaccccaggctgcagtgagtgagaagcccacaggctcagtccagtttgtttccttcccctactggacaccagctgctttgacttcttggctatctggagccatagagggacacccaaaaaaccgtgggaacagcacacagcagtagaggaatatgagcaagagttcatacccaagaggagatccctggacctggatgtgctgctggtgccagttctgggctctgccttctatataggctcttcctccgctagcatcagaaagtcagtcttatgtgaccctgtacaacctcctggactttcccgcggacaacagaaagtcagtcttatgtgaccctgtacaacctcctggactttcccgcgg

SEQ ID NO: 264697 - DNA, 443 bp, Homo Sapiens
  misc_feature (210)..(210): n is a, c, g, or t
  misc_feature (252)..(252): n is a, c, g, or t
ggctggtccccatggcccagggacgtggagagcctggcgctgtgcctgcaagccctgctgagtgaagacatgtaccgactggaccccactgtgctccagatgccctttagggaggaggtgaagaccccctttcccaccccaggctgcagtgagtgagaagcccacatgctcagtccagtttgtttccttcccctgctggacaccagctgnctttggcttcttggctatctggagccatagcttgtaaagtgncccccaaagagggccttccagtgccatattacccaacccatgcagttagaatactcagcaagtgtggttgagagggtgtggcatccagttaagctgggtttttaaccctctaggtaaccctggccaagtcacatctcttctttcagccttagcctccccatcaatacaataaagaggttaggctgggagat

SEQ ID NO: 264698 - DNA, 438 bp, Homo Sapiens
atggacctgaggatgccagccgcacagagcacggtgttggccacagagcaggacgggcctgcgctgctttcctgtcatcacgcagggataatctttacctctcatttaaaaaggccaatagtgcccatgtcacagggattatcagcagccgctctgacaggtggataacgtgtgctcgggcagaagagattgaaacccagcagggcggggaggcagggaggctggaagccagtgaagttcactccaacacggcgtccggcagctgaagaggccctgcgtccacacaggcactgcggaaactcaccttgtcctgagatgagggaaggccagggagagcttccatgcgaccccctagctgaaaacactccacacgctgagagtcagctgagcttgaacaaagagacctttctcctctgcagaaatcgctcgagccgccag

SEQ ID NO: 264699 - DNA, 658 bp, Homo Sapiens
aagtacgatttaaaatctcctcctcctacagcggtcgagtattgaagcaggtctttgaggatgggcaggaattacagtcaccaaaggaggaataccctcacagttttctgcaagagtctcttgaaacaatggatggtgtttatgggtctggggaagtccccaggccccagatgtgctcccctaagctgactgctcagaggatcagtgtgtttagagagggtaatgcctacaccttggcaggcggccagcctcggttcaacgattacaaggcgaatgaccataagcccctacctattatagattttggaaagataatcatctacactaataacctgaaaatcattcgaaccccaatggacaagagagattttgtgaggaaaattctccagaaggaagaggaggctgaggaagagtctctgatgaacaaagaagaaagctatggaggcagggaccagcacgatagacctttggtggaggcagaaagcacattaccccaaaaccggtatacacaggaaggggatattcccgaggacagctgttttcactgccgagggtcgggcagtgccaactgctctctgtgccacggcagcaagttctcgatgctggccaactagatttaaggagtcctatcgggccctgaggagccctgcctgcaatg

SEQ ID NO: 264700 - DNA, 542 bp, Homo Sapiens
taaaggtctgcagaactcccagttacctggccctgagatcatggagtgctccatgaatgaggttcatccgggctataaaaggaggggacatgtggagcacgggcgtcatcatgtacatgctgctggctggctccccgcccttctggcaccttcaatgtccactgcgagaactatggaagcagaaaactgtcagctgtgactgacaatggagttgagaacaacaagaataaagggcagctgactaagtctccccattactgttggtgcaaccccagagctgctgcacagcggaacaggacttggcacacccattcttcctgcagtacgtgacggaggaagtgcggcacttcagcccccgggggaagttcaaggtgatcgctctgactgtggtggcttcagtgcgcagatactaccagtaacaccgggtgaacccggtgacccgggagatcgtcatccgagacccacccctacaccctccagcctctgcgccggctcatcgacgcctacgctttctgaatcatgctgcacagtgagagaggcct

SEQ ID NO: 264701 - DNA, 312 bp, Homo Sapiens
taaaaagaatggctgtgtaattcatccaagcatgtccaagaagttcctggatcatctggactgggtcagttacttcctgcccacagaaaggcacatctgctctctgaaccaggagtgcaaggtggagacccccttgcccgaagtgatgtgccagagcctctttgacttcctgtttcacatacttcttgctcagcctgctgtgtggctaacctggagtgtccaacacctggacctgcagggctaacactagcccacctcgacgcatgaagctgtggaggtgacaactgcggcccaggctacaacatgtggtca

SEQ ID NO: 264702 - DNA, 305 bp, Homo Sapiens
ctctgcatgggaaggcagataaggaggcagacacttgggccaagctgcagaagatggccctgatgtccccgtgggccggagagcgccccctggaagacattcaggacagctggaacaagtgggagtccagggacaagcaggtgagcaaagtctgtgggagcggcgaataagcccaaggaacgcttgcagaataccaggttcctgtccaccagggtgccatatggctggatgaagcatcagatctcgcctcaggtctaccaaagcctgcacttcagtgatctgatgccgactcagcagcctgactt

SEQ ID NO: 264703 - DNA, 856 bp, Homo Sapiens
tctccttccttcttctctggaccctgccagggcaggtcctcctcagggtggccttggcaatagaggaagtcaaatctggatccaaggggtcccagcccatgtccccctctgatttcctagacaaacttatggggcgaacatctggatatgatgccaggattcggcccaattttaaaggcccacccgtgaacgtgacctgcaacatcttcatcaacagtttcagctccgtcaccaagaccacaatggactaccgggtgaatgtcttcttgcggcaacagtggaatgacccacgcctgtcctaccgagaatatcctgatgactctctggacctcgatccctccatgctggactctatctggaagccagacctcttctttgctaatgagaaaggggccaacttccatgaggtgaccacggacaacaagttactgcgcatcttcaagaatgggaatgtgctgtacagcatcaggctgaccctcattttgtcctgcctgatggacctcaagaacttccccatggacatccagacctgcacgatgcagcttgagagctttggctacaccatgaaagacctcgtgtttgagtggctggaagatgctcctgctgtccaagtggctgaggggctgactctgccccagtttatcttgcgggatgagaaggatctaggctgttgtaccaagcactacaacacagggaaattcacctgcatcgaggtaaagtatcacctggaacggcagatgggctactatctgattcagatgaacatccccagcctactcatcgtcatcctgtcctgggtctccttctggatcaacatggatgctgcccctgcccgtgtgggcctgggcatcaccac

SEQ ID NO: 264704 - DNA, 280 bp, Homo Sapiens
atccggacccgtctcccgggggcatccacggccagaggagaagtcctgacattcctggactcccactgcgaggtcaatgtgaactggctgcccccactcctcaaccaaattgcactaaaccacaaaaccatcgtgtgtcccatgatcgatgtcattgaccacaatcacttcgggtatgaggcacaagctggggatgccatgcgaggagccttcgactgggaaatgtactacaaaagaatccccatccctccagagctccagagggcagatcccagcgacc

SEQ ID NO: 264705 - DNA, 701 bp, Homo Sapiens
tcttctccatcctgaagaaccctgatatctggtcccaagcccacaaggaagaagctgaattgcaaaaataagtgtatcacaaattttacagaaagagctctctgcaggatcttctaaaacctcagacactgcagaaggaagagttgataactgtgcaacccactgacctttctgccagggagtttgtggtttaccagtatggcctctccatcctgcacctccttatcccccagcttcatgctccagaaatcaccctgaagatttcttctcatcttcctgccatggaagcccaaggcagtgccttccaaggtgccttcttctaccagtgctgaaaacacactgttcattgggagagaatgtttggcctctgtgggaagctttgttctgctgctgatccgctgcctggcccacatcactgctggggaaccccaccaggactccagccctgcctttctggggtcattttacaagggcctggaggcctatttcagggaagcattccctatcacactgagaatggcagcagtttccagggacagtaaacttgaccaaagcataagtgctatcctgctggaagagcagcccatctctgacagagaaagggatcatctgtctaaactcattgaaatgaagcatgcatctccctaagagccagaatcactaaaagagtatattcataaaaacaaagatcttctgctctt

SEQ ID NO: 264706 - DNA, 465 bp, Homo Sapiens
cagctggtcacgctgaagccagggatgggcctggcgagaaagcaacagcagcttccgcaggtgcaagcaggcgcagttcagttccaggagcagagacaccatggagaagcccacgtagtggccagacagaacagcggtgctgaggcagctcaccaccaccaaatgatgacagagaagatcccaggtcttgcccaaggtctggttccacagcaggtcagctccgtctgccaggaagtaacccacagacacagccaccagcaccagagcccagcgcgggtggccatggatggggtcggcggccatctgagggtacagtgacaggccgagcagcgccccggtccccgagagcaggctgtgcgccagggagacgcacaggttccaccactgcaagcggtcccgagcggccgattccggcgtgggcagccgccgcaacccccagtgcagcccccggaacgcgagggaagg

SEQ ID NO: 264707 - DNA, 496 bp, Homo Sapiens
ttacgacgaatgacagagaaaaggagttaagtccaagtccccagcagcagcagagcgaagctccgacgcagacatttcccagaactccccaagagaaaatgcaggaagcctggaaggagccagcagaagattgtttgttcctgaggcatcctaccatgccactgcctgtccacaccaccaagaagagatctgtcctgggccctgtgtccacaggtccaccgcctgtcaacaaacccgagatgagattactctgcccttcgggtcacaacgattcacctcaactgagcacctgtggacccaccaaaggacatggcagggacgttactgcctccctgctccctgttctgaagagctcccaccagacccccactctcagtgccaggctgccagccaacaggcctgacatgtcctcccatggtgctctccagcctgccatgcaggcgcttgccctgggtcctggccttaaatcccaggcagaaatcaaacatcccgacgc

SEQ ID NO: 264708 - DNA, 693 bp, Homo Sapiens
  misc_feature (538)..(538): n is a, c, g, or t
  misc_feature (637)..(637): n is a, c, g, or t
  misc_feature (640)..(640): n is a, c, g, or t
  misc_feature (647)..(647): n is a, c, g, or t
  misc_feature (673)..(673): n is a, c, g, or t
  misc_feature (679)..(679): n is a, c, g, or t
tgcagcagccgcagaggcatcagcaatggcaaaggcggcaaccatgaccccagctgctatttcccagcaaaatcctccaaagaaccgagaggccacagtgaacggggaagagaatggagcacatgaaatcaataatcactcaaagccaatggaaatagatggggatgttgagattccacccaacaaagccacagtccttcggggccacgagtctgaggtgttcatttgtgcctggaaccctgtcagtgatttgctagcctctggatctggagactcaactgcaaggatatggaacctgaatgagaatagcaacgggggctccacccagctcgtgttgagacattgtatacgagaaggggggcacgacgtcccaagtaataaagatgtcacctcactggactggaacagtgatggaacactattggctatgggttcatatgatggtttcgcaagaatatggacagaaaatggtaacctggccagcacctcaggccaacataaaggccccatctttgccttgaaatggaaccgaaagggnaattacattttgagtgctggtgtagacaaaacaacaataatttggggatggcccacacaggagaagccaaacagcagttttccttttcatttcagcccntgncccttgnatgtggactggcagaacaacacgacnttggcntcctgttaggcaca

SEQ ID NO: 264709 - DNA, 659 bp, Homo Sapiens
gatctccgagctcaagggcgccaaaaggcaggtggaggaggcgctgacgctggtgatccaagcggacaagatcaaggccgcagagatccgcagcgtgtaccacctgcaccaggaggagatcacccgcatcaagaaggagtgcgagcgggagatccgcaggctggtacgtgggcaggcaggggcgggcgtgggcgagggtgcaggcgtgggctcggggaacacgcgggcagcaccggcttcacccccaatgacattcttagcacaggcacctcatgccacccctgttggttttgaggaccctagagtcacgagaccactagaaaaggttcacacccacagtcaggcccgcacggagaacgacagactctcacctccccttttccacaaacaccagctctacttcttttcttaacttgggccacagcaagaaacctagaaatcggcactgcccatccacaccgcagggttcacggacatctcttcttagtgtcccgggtcacacctgacaccaggcagggctcagtgtttcgcagcaggagtcccacacatcctcacggggggactcagagagaattctccagtgattctccagttgaactcacaggatccaaagaggcgagatcaggaggccccggggggtgggatggcccccagctgcc

SEQ ID NO: 264710 - DNA, 537 bp, Homo Sapiens
  misc_feature (170)..(170): n is a, c, g, or t
gtcaggaggctgccctcttgcggcgcccgggggcggtggcggtggctcgcactgtaccggccgcaactggcaggcgcgggaaaacaggagagctggtgaccagggaaaacgggaggacttcaggatgccccgaaccctgattgtataattcttcggagtctttggttgcnttcaatcctgccaaagtcgccgtcaccaagacggtcgccagcgtcctggccgcggacacccagcagtgcagagacggcgtgcacaaaacccactttgcaggggttggaccggctcagctactggacctacctctcggggtcaagctgcctgtgatcccaggaagcaatgctgtattctatactacgaatttcggtgaaaagctttttcgaccttcttatggttttaacctgactgatccctattgtcgacttttggaaaaccaatataaaagcctccatgatccacatttaaaagcatactataagcgcaaagatattttgaagagattaaagaaaggtggctacatcaccagcaataataaaaaac

SEQ ID NO: 264711 - DNA, 618 bp, Homo Sapiens
cggctgcagaagctctccattgaagacagcaattataccaaaaaaattgaaaatgctatgaagacaggagggagtgtcctcctgcagaatctccttgagacattagctccaggcttaaaggcaattctgaaaaaggatatctatcagaaaaaaggacactatttcataagggttggtgatgctgagttcgaatacaattcaaattttaggttatacttatctacagaaatagacaacccccattttcttccatcagtttataactttgttactatgatcaacttcactgtaacattccaaggtttgcaagatcaactcttgtctactgtggtaactcatgaagttcctcatttagaagatcaacgttccaagttactggagagtatttcccttgatgccataactcttgaagaactagaggaaaaaacattaaatttactgcagaaagcactaggatccatattagatgatgacaaaattgtagataccttaagaaaatccaaaatgacatcaaacgaaatttcaaagcgcatcgaagcaacaaaaaaagctgaaagtgaaatccaagcaatacgtaaaaactatctccccattgcgacccgaggcgccctgctctac

SEQ ID NO: 264712 - DNA, 516 bp, Homo Sapiens
gcagagaggaaggctgcctgcaagcagcacaggtcaatgtggctgcagggaagctcatcctttctcagaatggccctacttcgcccgatctcatgggctggcccttcaggaccattcgatgggctgccagccgcctcctctaccgggtgttgtctgggaactcaaacactccctccatctgaaggttttctgggacctcaacaaactcctccactggagtgtcctctgggaactcaagcacctcttgcactggagagtcccctgaaaacttaaccacctcctccactcgattgttctccagggcctcatccagctcctgcagctgtcagtcctctcagacctcatccacctgcagctgtcagtcctctcagacctcatcaacctgcagctgtcagtcctctgggacctcatccacctcctgcaactggcagtcctcccggggacttttggctggtagcctgtgaatagcgcagcacacgcccctccactgactgtggacatcattccaccctgatg

SEQ ID NO: 264713 - DNA, 275 bp, Homo Sapiens
gagaggccaggctgcccagggcccaggccccactcagagctgcagcatagaaccttgccacctcctcattggggttgccctgggccgggtcgaaccacatcaggatgcagcggccgctccctcggttgtagttgctgaccctgtaggagtgagtccagatttcactgcacagagcagtgggtgggagaaagtagagatggaaaggtagccaggcagctcccacctggcacttgttaaaccctgaagtccagttccagcccttgtgcccattgctc

SEQ ID NO: 264714 - DNA, 665 bp, Homo Sapiens
ccctgggctctggaaggcatgtgcatcttcctgctgcatggactgaagtaaatatatctggctcaatgcaaaggggaaatccaagatgaatctttaaatatgctttatgcatctctggaccatgcttcctttgattatgatcatctgcctgccttattttttgttgcggaatcggttttatacagactgtgttgtgatgcatccctcaaaacatatttatattcagttgaaataaagctagcaaagattggctatttggtcttcttacgactttttatatttttcctgcatggtcatctagaaagttttaaacaacatttacttaggcttcaaccatatttatacgcactttctttctctggagcatcatatcacaagtatccaaacatcttttcaaatgtgcaattcatcctgaaagcctcggaaattataggtaaaagagaactccgttctgaatccatttttagacctgtggaagataagaaaagatatgagaacacagattctgatatgggaggatatgaaattaaccacctgctctggcactgtgttgctgcttggtcttgtgttcagaataacaatcctcagttgaataacgtgcttgaacatctcgtcttccataagacacagcttcaaaagaaatgctggttggattcagtactggc

SEQ ID NO: 264715 - DNA, 903 bp, Homo Sapiens
tgtcagcaaatttatggatcgggggttgtccttaatggtgtgtagccatgagaaagtgggctttcaaatacggcccaatgttaaggatctggtgggtctagaattgagtcctgctctgtatccaatgctatttaacaaattgaagaataccatcagcaagttttttgactcccaaggacaggtaaagtgttctcttatttttcacctttctctatgaatagagtgacttgtttgaaataagcctttttctttcagattatttaaattaggtattttggcaacctatagcccacccatgggtccagtcagtgaacgtaagggttctatgatttcagtgatgtcttcagagggaaacgcagatacacctgtcagcaaatttatggatcggctgttgtccttaatggtgtgtaaccatgagaaagtgggacttcaaatacggaccaatgttaaggatctggtgggtctagaattgagtcctgctctgtatccaatgctatttaacaaattgaagaataccatcagcaagttttttgactcccaaggacaggttttattgacggataccaacactcaatttgtagaacaaaccatagctataatgaagaacttgctagataatcatactgaaggcagctctgaacatctagggcaagctagcattgaaccaatgatgttatatctggtcaggtatgttcgtgtgcttgggaatatgggccatgcaactcaaataaaaccaaactgtgtcaattggttgaagtaacgatggcaaggagagatgacctcttattttgccaagagatgaaatttaggaataagattgtagaatacctgacagtctgggttatgggaacatcaaaccaaacagcagatgatgatgtaaaatgtattacaagagatttggac

SEQ ID NO: 264716 - DNA, 382 bp, Homo Sapiens
gcaagttgagctcctcagatttgagttgactggccagtgagaagccgtccctatggaccagccacaccttctccgtctcattccaggcctcttctgctgcaatctgttcttctgttttcgcctggctgtgggcatgagaggcggcctcagagtccagagaagctgtgaagatcctctccagccgctggtgggcctcttccacgggggtcagctggaccttggcagctcctgcctcctgcttcacaccagggactggtgacttggactgctgctctcctagtgagatctgacttcgggccggtggagcctggggtcaccagctcttccggtggggctggggagcgctgcttctatggggcttcaggcttggctggggatcctg

SEQ ID NO: 264717 - DNA, 449 bp, Homo Sapiens
aagttcatcccaacctgctgttaaggtctgtaaaaacatgccataacatgttaatcctaaacactgcataggagctgcacagccattgaatttaaagcaggaaacttctgtgtctttcttgtgaaagggaaatagcctttccttggtgggtagcagcaatgtgcatcttttaaacagtagacctagagatctgtagtgctccagtatagcagagtcttgtctccggtcaggcagctcaaggttatgaaagtcctgtagtaaaagtcttttgcttcctgatgaggttgagatataattaataatgtgttggctgacggttttggacaccatgcttagcatgctgatatccttcactgacaaatattttaaaattatctggaatatttccaatggtaaggctttaaaatttccaaatgttgatatgggttgaaagcctgagccaaggaagg

SEQ ID NO: 264718 - DNA, 522 bp, Homo Sapiens
ccgcgccgcgatgtggccgtggcggaggaagtgaggcaggcagtttgtgatgcccggcgtggccgcccctgggaggctcctgcccccatgaagacacccgaggctggcttggcggggaggcccagcccctggacaacccctggcagagctgcagccacagtgccggctgcacctatgcagctcttcaatggagacatctgtgccttctgccacaagaccgtgtccccccgagagctggctgtggaggccatgaagaggcagtaccatgcccagtgcttcacgtgccgcacctgccgccgccagctggctgggcagagcttctaccagaaggatgggcgacccctctgcgaaccctgctaccaggacacactggagaggtgcggcaagtgtggcgaggtggtccgggaccacatcatcagggccctgggccaggccttccacccctcctgcttcacgtgtgtgacctgcgcccggtgcattggggatgagagctttgccctgggcagccaaaacgagatgtac

SEQ ID NO: 264719 - DNA, 360 bp, Homo Sapiens
cgatgtgggaagggacccaggtatccggagcataaaagtagaggtcgtaggggtctttcggggcgtccaaatgcagaaccggttcatctccgtcgtccggaagccggtgatgtgcgaagggccgctgtctagctgcccggcggtaaagacaccacagcagcacaaagatgccgatcagcagcgcggtccccgcgaagaacaggcagaggaccccgcctgctgcgccacgtggtcgccccaccagagtcacgccggtctccttcactcgctccaccacgaagatggtgttgactccctcacatgggctgcgcctgtgggggacccgcagagtagcagcggccaggggaccggggagcccag

SEQ ID NO: 264720 - DNA, 509 bp, Homo Sapiens
ctccatacctgaaagggctgcctgctggaaatgttgaggtgtttcctaatccatctgttgccttgattcccaaatatctgacacagcagctgtccccttgagccactccagattcgttggtagattgccaacctataaatgcgctttccaaacatgtggtaatagaagcggaaggtgcagccttttgtatcagtggcattaaggattgggctgagtaaggcagcactgtcttgaaaagcctgtggctctgaagattctatgtagagatagtgtcctttagctgtgcccagagtgttatctttcattggccctgtgttaagtgttggagttggaccctggttcctggtccaatcaaagtcatcttttgcatcttgttcccagttacagattccagtttcaaagttacactgcagctcaggtgcacagttgacttcatcagtacgatcaccacagtcatccaccagatcacataaccgaagcttttctatgcaagccctggtgtggcgaca

SEQ ID NO: 264721 - DNA, 393 bp, Homo Sapiens
ctcccgcatggctgagaggcggttggggttgagcgcctgcaggcccccgaagccccccgggggcagctccacgtcctcctggctcacgctcttgtagagcacgcgctccccgccgttcagcacgtcctcttcctcctccggcggctcctgcaggaagaaggtggggggctcgcagtgggagcagctgcggcagagggcgcgggcctgcggggacttctggctgaaggaggtggaggcggtggggtagagcgccggcccgttggtcagcaccaggttgcggttggagtgcagcgggggcaggtgcgagtgaacggcgaagtctggttcctcctcgtcctcctccgactcgtccttcttgcagcagtagtactggagccggcagtagcacagaac

SEQ ID NO: 264722 - DNA, 354 bp, Homo Sapiens
gccacagttccaggtcccacgctagctgctccagctgctgcacctcttcctctaacttctccgagaagacatgcaacttctccttcagccagttcctgatggtctttatcggttcttctgagggctcgttggtctgatattcaagcccctggggaactgcaagattctggtagtagttacattctctgatcctttctgacacctcccaactgcttccccatatctctgtgctcaagtacagcaccaagatcagcaatgccaacagcgtctgcttctcgtcaacacagtggctgccccttctccgttcaagcagctgggctgaaccctgctctaagagcactctccccacacttc

SEQ ID NO: 264723 - DNA, 409 bp, Homo Sapiens
tttccaccagcccaaatagcagtaggcactttcatggcagtcaggtcatatatagggggatgactctgattgtttctctcatataatcagcgtcatgtccccagtcatcagctcggaattcatcagagtggtaaagctgatttatatgcagaatgttgtgtactgatgaaccagtgggagcatgtgagatatacacatccattcgactctgattcatatttttcttgttggatccagcccataaggacataaattcgctacatatcaaccagagtatcttattgttgcagattttggtagaagatatcttcgttttcttatcttcgaacaagagaactttggtaccaaaaacagccttgattatggaatttggaagtagaaaaaacctggtaaaaatgcccgtgggaaa

SEQ ID NO: 264724 - DNA, 484 bp, Homo Sapiens
cacagagagcctcccaggagagcagggaaaaagagcaagtagctgaaataggtcagtgccttacacacatgctcagacaaagagctcctgctcctgaagcctccagatgctgccttcactttcccctcacaaatgtccagagagagggacgtgacacctctgggtcaagagcatcagagaagaaagagtgacgcagaacctcacagaaggaggctcatgcagataatactcagtgtagtgcagacctaggtgacacaaggtctgccagctcatctgaaagcagaaggtccacctgtggacttgctgaggggccagggaacagaggagagccacagcgcagacagcaggggtgaagacgagcacggcgtaggaacccatggcagccacggccagggcacctcctccagccaggagaaagaggtacctggcacgagtggagaatgaatccatgatgcagagataattgaagagaagtgcaaaggga

SEQ ID NO: 264725 - DNA, 1114 bp, Homo Sapiens
tgcatttcagtctgctgtgtggatggctcgatcctttcacaggactcaggatttgaagacaaaaaagcatcatattccagtggttgatcgaactccactagagcccccaccaatagtggtagtggtgatggggcctccaaagttggaaagagcactttgatacaatgcctcattcggaacttcacccggcagaagttgaccgagatcagaggccctgtgacgatcgtgtcaggtaaaaagctccgactcaccattattgaatgtgggtgtgacattaacatgatgattgatctggctaaagtagcagatctggtactgatgcttatagatgccagctttgggtttgaaatggaaacgtttgagtttctaaacatctgtcaagcacatggctttcctaaaattatgggagttctcacccacctcgactccttcaagcataataagcaactgaagaagacaaagaagcgattaaaacacaggttctggacagaagtttaccaggttgccaaactgttctacctttctggaatggtgcatggagaatatcaaaaccaagaaatccacaatctgggccattttattacagttatgaagtttaggcctctcatggcaaacttttcacccttatatcctggcagacaggatggaagatttgacaaacccggaggatatccaaacaaacatcaaatgtgaccggcaggtgtcactttatggttatttaagaggagcacacttcaaagataaaagccaaattcacatgccaggacaaggtggggctcacccatgagctggtccagagtctcatctccacctactccaccattgatgccaagatggcttcaagtcgagtgacgctgctttccaattccaaaccacttgggtcagaggctatagaaaatcaaggagatggctttggattccctgttctgtgtgctcctgtctggctcctgaacccagctggagaggtgtgtcaatcccaactggtgaagtactgagaggaagctacacaaaaggcagcaaggtgttaataagtgtacctctgacattttaaccacctctgacttttccatggaatggacaagtagtagtctctgtcagagcaatgttttaaagg

SEQ ID NO: 264726 - DNA, 866 bp, Homo Sapiens
tctgttgaggaatcacgtagcacatcagatttggataaagatgatgccagttacttacgtctgtctttaggagagttctttgctcaaagatctgaagctcttggttgccttggtggtggtaacaatgtgaaaagaccatcatttggctattttattagatcaccagagaagagagaacctattgccttaataagaaaatctgatgtatcaagaggtaatttggaaaaagaaatggctcatcttaaccatgatctatattcaggagatttaaatgaacagtcccaggcacagctaagtgaaggatcaattacacttcaggttgaagcagtagagagtacttcacaagtggatgaaaatgatgtgacgttaacggctgataaaggcaaaacagaggacactttcttcatgagcaacaaaccccaaagatacaaagacaagctaccagatagtggtgattctatgcttaggatcagcaccattgcttcagccattgcagaggcatcagttaatactgatccttcccaacttgctgcaatgatcaaggcactttcaaataaaaccagagacaagacttttcaggaagatgagaaacaaaaggactattctcatgtgcgtcatttcttacctaatgatttagaaaaaagtaatggatccaatgcacttgatatggagaaataccttaaaaaaacagaagttagtagatatgaaagtgcattggaaaacttttcaagggctagtatgtctgatacttgggatttatctttgcccaaagaacaaactactcaagacattcatccggtggacttaagtgctactagtgtaagtgtgagggcaccagaaagaaacacagcagctattgtttatgt

SEQ ID NO: 264727 - DNA, 333 bp, Homo Sapiens
cgcctcccaagcggctgcctgccactatttcaccatggctgaatgaagcgtgtggcacaccgaggatccccagttcttggctgaggtgctcttcactgccaccagcatgctcagcttcacccgcctggcctacattctgccggcccacgagacgctgggcactctgcagattaaaattggcaagatgattgaagacatgatccgagacgtgcgctccaaacacctctgaccccctgaaacgacaggcaaaatttggagggtttatgttcatcctcatgatcatcctgaccgccttcctctgtggcctcaacaacatctatgtgccctaccaga

SEQ ID NO: 264728 - DNA, 412 bp, Homo Sapiens
  misc_feature (345)..(345): n is a, c, g, or t
  misc_feature (379)..(379): n is a, c, g, or t
agccttcgcactggcctcctcctggctgggcttgcccagtgcactgccgggacgcctcccaagcggctgcctgccactatttcaccatggctgaatgaagcgagtggcacaccgaggatccccagttcttggctgaggtgctcttcactgccaccagcatgctcagcttcacccgcctggcctacattctgccggcccacgagtcgctgggcactctgcagatttccattggcaagatgattgaagacatgatccgttttcaatgagacgttttcagtttctgttctggaccatgtttcggtattgggaagagcacagcttggttggaacgttgcctcagttttntggttgcccgagttttgcaggccgggccctctantggcatctttaaccattcattcatggttcattt

SEQ ID NO: 264729 - DNA, 719 bp, Homo Sapiens
cattactaaacccaaggtgaatctccaagttggagaaaggagaagagccatggtctttagaacattaattcctgaaccagaggtacccaggatattttaaagttgatcacatcaaagggatccgggaaaaacaagaaaaacctctgtggcaagaaatattcatcagtgatgctgacaaaacattgagtaaagaaggacagaaagttttagaaaaactatttaatctggaaatagctccagagctttcagaaaaaatatcctgtaaatgtgactcacacagaatgaatttgccagttgcttctcaattaattataagtgaaagaaaatattcaagaaagaagactgaatacatgaatgtgtgtgagaaactgcagcttgatattaagcatgagaaagctcatgctgaagagaaatcttatgaacatggtgaaaatgctaaagctttcagttataagaaaggtcagcattggaaatttcaaactttggaggaatcttttgaatgtgatggatctggacaaggtttatatgataagacaatttgtattacacctcagagttttctaacaggagaaaagtcctgtaaggatgatgaatttagaaaaaaactttgataaaaccactttatttaaccacatgaaaactgacaaaaggggaaaatgctctaatcttaatgaatatggaacatcctgtgacaaaaccaccgctgttgaatacaataa

SEQ ID NO: 264730 - DNA, 556 bp, Homo Sapiens
ctccagctgcgagtcgttgttaggagatgttatctcacctcctgagaggctgccctgggggggccgctcctcatcagagtagtggtagatgtcttcggtgggcagcgaagaagtcttctccacctggacaccgcctgggggctctggcctcagcttttccggcagggatagctcactctcagcgcctgcctccagttcctctggactagaatcagttgccactgcatcctctttctgcttgggtttcctcctgcgacgcctcttcctccgcccagtggaggccgtgcctgccatgacgaggccctcaggctcactggcagtgcccagctgggagtccgaggggaagccagacagacccccccaagggatgggtgaggtgcacaggccgggaggcacatgttcatcatcgctctccagctcctgaacaaagaaggcctccccgctgtccccaagcttcatgtgcaagtccacaggctccccattgagctcaatgtctaccacaaactcccgcgaccgcaggacgcccagcttgccaaaacgcacgtggaaggggagc

SEQ ID NO: 264731 - DNA, 205 bp, Homo Sapiens
tacctgctttcccacaacagcaaggaagaaccatggcccaggggtcactgtcattcggggacgtggctgtgggcttcacccggaaagagtggcagcagctggacctggagcagaggaccctgtaccaggatgtgatgctggagaactacagccacctgctctctgtgggctgaactgtctgcttgcttggaaggcccagctggct

SEQ ID NO: 264732 - DNA, 792 bp, Homo Sapiens
caccacctaatgcccccaaaccaaagccagatacaaaccccaaccgacctggtttcactggtgtcccagcaccacctaatgcccccaaaccaaagccagatccaaaccccaaccgacctggtttcactggtgacccagcaccacctaatccccccaaaccaaagccagatccaaatcccaactgacctggtttcactgataagagcctctaaccctacggggtggtctctatgttgtttacctggcagtgatgtccgtgtcatctgagaagaggagatttcaggggctgactttgacttagcagatgcctttcgtgatggaggaaataacgacccagcacctcttaattcacccaagctgaagccaaatgcgaaccctgagcagcctggattcattgacgaggaatttggaataacagatcccttacacgacacatgacatcaccgagctcagcaccactgaacccgcccgaaccaaaccccaatccaaaccccaagcagcctgattccacagggcatcactttgatttcacaaaagtatcttcatggggaacgaaacaacgctaagcaacatgggagtgagtgtccggccatgggatgcacatctgtgcatctccaggactggctgggttcctgcgtatgaagaagcagcggtccacacacatgggtgaacctgtgcttccttctcaccactacactgcttggcttccttatttccttcctgtcacctgcaatgcctaccctgtacctcgctccagatccaacaccatcatttaccacctcgttcagctcc

SEQ ID NO: 264733 - DNA, 567 bp, Homo Sapiens
cccagaccaaccctagtgtcggcacacgcagcaagcgccaccaaaaagaagaaaataaataatggcactaaccctgagacaaccacttctggtggttgccactcgcctgaggatgaacagaaggcaagccaccaacatcaggaagccctaaggagggagctagaggcccaggttcataccatacgaatccttacatgtcagaaaactgagcttcagatggcactctactacagccagcatgctgtcaagcagttggaaggagaggccagggatctgatcagccgcctgcatgattcatggaagtttgcaggagagttagagcaggctctctctgctgtcgctacacagaagaagaaggcggataggtacattgaggagttaacaaaggagagggacgccctgagtctggaactgtacaggaacaccataactgatgaggagctgaaggagaaaaatgccaaaaaacaagaaaaacttcaacttgtagaatctgaaaagtctgagatccagctcaacgtaaaggagctaaaaaggaaactggagagggccaagctcctgctgccacaa

SEQ ID NO: 264734 - DNA, 286 bp, Homo Sapiens
ttcaccgcagtgtcgcaagggtatgggttcttgtttcggcacagattcgacaaggtccaccccatgagccgcagaaatgtgatcggcagggtgggtgaaatcaaggctaggagatgtgggatggcattgcttgtgatgacgttatctctgaactctgggccatcaccggctatattaccaagagcccacactgcctgttcacacacagccacgttggaggaagacaggagctcaatcaagggctggatggctcccccttctaccacggcacgagtctgctccgaaa

SEQ ID NO: 264735 - DNA, 255 bp, Homo Sapiens
tggcactataggaccaactgctattgaatcttcaagattgctttcacttgtggtttccagtaattcacaaagttcaccacggctctgaaggtcaggagtcacttccccagacgactgcatatgtaggagaaatggacaattgggaaaacatctggtgtgatcgtctaatgggtcatcaccttcctgccatttctctaaacaacgtccacaggaaaagcactggacgatgtcctttatacctgtgtagaaaagacc

SEQ ID NO: 264736 - DNA, 588 bp, Homo Sapiens
tgcagcagcaggaagcttggggcaaagcggtggctgagattggccggccaaaagttgcaggagacccaggggagggagttgctgaggacggggccccgagggggatgacctggcaacctccgtgccttctcactctgtttcccgtccccttaggagcacctagaagctgccagccaccagaaccaacagctagagacccagctaagcctcgtggctctccctggagaaggagatggaggacaacatctggacagtgaggaggaggaggcgcctcggcccacgccaaacatcccagaggacctggagagccgggaggccacgagcagctttatggacctcccgaaggagaaggcggacgggacggagcaggtggagagacgagagcttggattcgtccagccttctggagtgacagacggcatgagagagtccttcaccgtatatgaaagccagggggcagtgccaaacacgcggcaccaggagatagaggatgtcatcaggctggcccagaaggaggaggagatgaaggtgaagctgctggagctgcaagagttggtgtcgccccttgtgggcaccatgaggggcatg

SEQ ID NO: 264737 - DNA, 592 bp, Homo Sapiens
ttctccacctgctccgtcccgtccgccttctccttcgggaggtccataaagctgctcgtggcctcccggctctccaggtcctctgggatgtttggcgtgggccgaggcgcctcctcctcctcactgtccagatgttgtcctccatctccttctccagggagagccacgaggcttagctgggtctctagctgttggttctggtggctggcagcttctaggtgctcctcgtctagcttctcctgcagctcctttacttgctgctccaactgcagtgcgctctttttctcgttgttcagatcctcgaagctgcactgtggctcggccagctgcttgtcgagcttgtggttctgggagagcgcgagcctctcctcctgcttttgtagcctctcctccttcttccacagcctctcctcctggtcccacagcctcttttcctgcttttgcagcctctcctcctcctttcgcagcctctcctcctgtttgcgtagcctctgctcctgcaatcgcagcctctcaccctgctcctgtagcgtcttctgctgctcccgaagcctctcgttttgttcacacagtctctcctgctcccgcactc

SEQ ID NO: 264738 - DNA, 384 bp, Homo Sapiens
tcatcggcagggttctgggcagcggtgaggaatttgccatgcccctcgtggtcgcccacaaggggcaacaccagctcctgcagctccagcagcttcaccttcatctcctcctccttctgggccaccctgatgatgtcttccttctcctggtgccgcgagtttggcactgccccctggctctcatattcagtgatgtactctccgtggcctcccggctctccaggtcctctgggatgtttggcgtgggccgaggcgcctcctcctcctcactgtccagatgttgtcctccatctccttctccagggagagccacgaggcttaactgggtctctagctgttggttctggtggctggcagctggttcctcccagcccttcttggatg

SEQ ID NO: 264739 - DNA, 605 bp, Homo Sapiens
caattatcttcaatcactccccctgctcgtatgacatcattatagaaacagctgcactcagataaactgacacatttcatggtgttctcatccaggtaaggagcactatctgggcacttagcataacaaccttctaaaagtgaagaaaatttctggccaacgagctgatctttgcatgtttttgcagtcactgtgccacaaggttcataatgccatctgcattccccaggcgcattgtagtaatcacagtagacaggacacagatttggttttctccatgagacacagactccaactgcactacacgcctctgcgtacatagccacggcagtgcagaatcccaggtacttcccctccatgtcacatgcacaggcttcttcaatgcacgcatcatggtaagcactggggtcaaccttgttgtggcagtctctgaaggtgctgtctctgaggatctcacatttccgcacagcccagagctttacaaaaaagtcggcccaagatacagaagtcatagcaaaataggctaaaagtatgccaaaaggatttaacacaaataagacttttggaaaagtttcatgttatcctgttttcttgcccgttctttt

SEQ ID NO: 264740 - DNA, 342 bp, Homo Sapiens
ccgggtgcaggtccatgagatcttcctggaccccaaaattctccaccaacctgttgtccacttgtcacgggcatgtttcacccttggcccgcaagacaccaattgccacgatgacgagggcacagaagcagctggcactgatgcccgccagcaccacaaggagggcgatgagggcctcgcggctgaggccaaggctgcattcacagtaggttccagctgcagcagggaagagcagaagggacaagatatgtgaggcccaagggcgccaccacgcaggcaggacacaggatgagcagaagggacaaatatgtgaggcccaaggggccaccacgcaggcaggac

SEQ ID NO: 264741 - DNA, 583 bp, Homo Sapiens
gcagcttcttagtgagcaggtttatgattaaagaagaaagacatcgttgatatattggacgactgattattggacagaatggcatcttgtcgacacctgcggtctcctgcattatcaggaagatcaaggcagctggtggaatcattctaacagccagccactgccctgaagaaccaggggaaaagtttgaagtgaagttaaatgttgcaaatgaaggccctgcacccaatgttgtctcaaacaaaacctaccaaatcagaaaaacaatggaggaatatgctatatgtcctgatctccaaatcaacctatctcgactaggaagaacaaaaatttgacctaaaaaacaaattcaaaccattcaaagggaagatagtgaacccagtgaatatctatcttaacctccttcgaaccatctttgactttcatgccatcaagggtttgctgactggacccagccaaatgaaaattcccattgacgcaatgcacgaagttatggaaccttatgtaaaaaaagttctgtgtgatgagctggggcccccacccaattctgcaataaactgtgttcccctgaaaaactttgaag

SEQ ID NO: 264742 - DNA, 657 bp, Homo Sapiens
aagttcccgcagagcccgcacatctgacccatgtacttccgctccaccagaaccatgaggtggctgtcaggaccccacacgacttccagctccagctccagctgcttggccaccagccgcacgctctggccgaagggtgtgatctggagtccattgctggtatagggcaggctgatgaccccgatgtccttgactgagatgatggcttcgctcacagtgacgacggaggcccccagctccacgatgatccgcgagatgctcccgtctgggcctcgccgcagctggacactgaaggtggggaaggcgtccttgcaggtggccgcgaagatgtagttgcacgtccccgagaagtcgtacacgtggtggtcgaaggtggagaagtgaccagccccccacgtggagcactggcctttgtccggggctgtctgtggagagtccttcaccctctggaggcctggcgctggtcgtaggaggtgttagccagacctgtgtggaccccacccgcagtcggtgtggggctaccccgtcgtccctgagggcgccgctcacctctgctcagggctgctccgcaagtttccctgcacacgctcggcgtagaatcagcaccgctgtgggcatgtgcacacacgtgtgtgtgggtacacgtatgtgtgttgt

SEQ ID NO: 264743 - DNA, 440 bp, Homo Sapiens
atccgaaccacacgacagtgctcactgtctgtgcatgctggaattcgaggggaagcaatgcggtttcactttatggatgaacagaatcccaacggaagggacaaagctattgttttcccagcacatacaaccatagctttcagtgtttttgaactcttcatatacctggatggtgcctttgacctttgtgtcacttcagtgtcaaaaggaggatttgaaagggaagaaacggcaacatttgcactgctgtacaggttgagaaatatcctatttgaaagaaatagaagagtgatggatgtcatttctcgttcacagctttacttggatgatcttttttctgactactatgacaaacctctcagcatgactgatatttcactcaaagaagggacccatatccgagttaacttacttaatcacaacattcccaaagggccttg

SEQ ID NO: 264744 - DNA, 967 bp, Homo Sapiens
  misc_feature (824)..(833): n is a, c, g, or t
ttttaagatgtataattatatttaaaaacaagcaatgcttaattttgtgcctgattttcctctttaaaaatggatttatctgggggttgcagttgatgacgttttgattttaatatgtttgctgctgctaccaagagctttgtcaagcaagttggagatggagggagattagttcctgttccaagcctcagtgaagctgacaaatatcaacctctaagtctggtggtaaaaaagaagcgatgctttctgtttcctagatataaatttacttcaacaccttttacactgaaagatattctcctaggagacagagaaatttcagctggtatttcatcttatcaattactgaattatgaagatgaatcagatgtttcactctatggaaggcgaggtaaccatattgtaaatgacgttgggattaacgttgctggatcagattccattgcagtgaaagcttcatttggtatagtaaccaaacatgaagtggaagtatcaacattactcaaagaaattactacacgaaaaattaactttgaccacagcttgatacgtcagtcaaggagcagcagaaaggcagtattgtgtgtggtcatggagagcatccgaaccacacgacagtgctcactgtctgtgcatgctggaattcgaggggaagcaatgcgggtaaaccacacttggtgggttctcttactaactaaagtgttgccatgggaatttttttaagtattgaatttctagtcaggcttgtgtattttgtgaaatgttctgatgaaagagctgcagttgtataggatttgcacagcaatgtctgttctagaatatgnnnnnnnnnncaaatcttgggattctaaacatgtgtaatataatgcaaaaacagtaatccttgtgaaattacgtgcatactggagtccctcaagttactatttaagtgttgttttaagaataaaaattgagtgagttgaattga

SEQ ID NO: 264745 - DNA, 618 bp, Homo Sapiens
  misc_feature (493)..(553): n is a, c, g, or t
ttggcttcccacaaggaggcctagtaacagaatcttacattacaggaatggcagccaaatgtggccttccaccagaaaagcagaagaatgcaagtcgaagagttctataagatgaattgttggaagaagatttgtcttccctcaaggagccctagtaacagaatcttgcatcacagctgtggcagccaaatgtggccttccaccagaaaagcagaagaatgcaagtcgaagagttcaataagaagaattattggaagaagaaaggcattgctattattcccatgaagttttcagttgactttgctgcaacaagctaccatcaggcagctgcactggttcatatctacacagatgggtctgtgttggtcacacatggaagcaatgaactggaacaaggtattcacacccaaaatgctacaggtggccagccatgagctaaaaatacccatgtcctatatgcacatctgtgaaacgagcacagaaaaagtgcccnnnnnnnnnnnnnnnnnnnnnnnnnnnnnnnnnnnnnnnnnnnnnnnnnnnnnnnnnnnnngccagccatgagctaaaaatacccatgtcctatatgcacatctgtgaaacgagcacagcaacagt

SEQ ID NO: 264746 - DNA, 717 bp, Homo Sapiens
accaggtttatcacctcttccctgggaagggaaggtgaagcctacataagcctgataaactgtaaaaatgaaaatctggcctgtggcttgagctgggcaccctgtaaaggagtagagcctattcagcacccagggatcactcattcctgtatcaggaccacactgtgctatcatgtgtggcatcttcagcttcaatcagtcctcagtaagctgtgaggacctgtgcccatggctgtggacttcacagtgtggctgtcagcttgtccccctaagtcacagatttaaagtatttgttagaaaaattaaaattttaagcaaactctcaaccataaagattatttcagtagacccactccactagaacttgcagatctgaatttccttccagctgagatatttccctgtggccaccttttggggattggtttagatctgctcagctcagggttggctccccttgggacagcctttcccagttaatttttgctggaagctcagcttgaatgcctgatgtgcgtgtcactaactacccactctctcttcttgtgcctcgacatagagttaatgtgggctgtgggcctgcagaagagcgagtgttgctaacaggactgcatgcagtcgcagacatttactgtgaaaactgcaaaaccactctgggctggaaatacgaacatgcttttgaaagcagccagaaatataaagaaggcaaatacatca

SEQ ID NO: 264747 - DNA, 406 bp, Homo Sapiens
caggtggaggatgagggagagaagattcgagatttggagttttgtcttgaagagcacagagagaagttgaatgccacagaagaaatgctgcagcaggagcttctaagtaggacatccttagaaactcagaagttggatctgatggctgaaatatctaacttgaagttagaaactgacagctgtagagaaggacagattggattatgaagataagttcagagacacagaggggctgattcaggagatcaatgatttgaggttaaaagttagtgaaatggacagtgagagacttcagtatgaaaaaaagcttaaatcaaccaaatctttaatggccaaactttctagcatgaaaatcaaggtgggtcagatgcagtatgaaaagcagcagatggaacaaaaatgggaa

SEQ ID NO: 264748 - DNA, 282 bp, Homo Sapiens
cgccctgcagggacccgaaggggccggggtgtgggagcaggatgggcagtcccgggacggcaggagcgaaggacgggaagaaactcacgtctggaatgtcgcaagtaggggctgtccagcttgggcgcatacatgtcaaactggcactcccggggtcggcaggccaaggccggggtggccaatcaccacgtgcgggcccaggggtgcaggtaagagaggagcctgtgaccaagtaccaatcagaattccagaatgaggctggcaatacatgattggctggct

SEQ ID NO: 264749 - DNA, 426 bp, Homo Sapiens
ccttcacgtcctgctcggccgcgcagaactgcgtcggtgccagaaggctctcgggccgctcgtgcttcctgccctccagctcccagtcactgggcttcccgggctgcatgctctccatcaggctttgctgctgttggcttttcttcactgggggcatcagatgtgtgatggcagggccagaactgggagcagaagggtagggttgcagcaactcttctgagtggatcccagtgtcacggacagcctcaggacctgcagtgggggaagcatcttgcccagcattggcacactgggaagccacccctttgtacagcttcgccataaaggacttcttgagctttttccgtttctgaataagcaaatcttcattgcattgaaacagcagggtgtagtgtgagataaatactcggaggcgctggacacaca

SEQ ID NO: 264750 - DNA, 689 bp, Homo Sapiens
cactgcgtccagcatttgggtggccctcaggatttcccagtcctctgaaatggccatccttctcagtgcgaacttgaagagtgaaaatacagctaaagactgtggcagttgacatacttccaggagtgtgcaatcttaatgtttctattggccaacactgcgtccagcatttgggtggccttcaggatttcccagtcctctgaaatggccatccttctcagtgcgaacttgaagagtgaaaatacagccttgaaaaccatttttaaaatctgctccatttggtaagagatctggagtgtattcactgtagccacctacataaaactgactgaagacattgagaccaaccagtcttcctggggcgataatggatttatttttatgatcatctaccttcagccagccctcttggaagaacttgcccagatgaacagtgtggactccaaggctcagattgaggggctcgctcctgatgcttgctatgccagaccccacgttataactataaaccacactgccattgagcaggcccacagccaggaagagataccttcagccagccctcttggaataacttgcccagataaacattgtgaactccaaggctcagattgagggggtcgctcctgatgcttgctatgccagaccccaggttataactataaaccacactgccattgagcaggccc

SEQ ID NO: 264751 - DNA, 409 bp, Homo Sapiens
cagaagcatagagaggaaagtaatcactagcaagtggaagaaccgggattcagatccagaacaggctgactccagagtcactggctgtcatgtagtttcctcaactactgcctcagctctacaatcccagagtaaagctcttctccaaatgaagagccaggaagaggtagaggtggcaggaattaaactttgtaaagccatgtccctgggttcagtgactttcacagatgtggccatagacttttcccaagatgaatgggagtggctgaatcttgctcagagaagtttgtacaagaaggtgatgttagaaaactacaggaacctagtttcagtgggtctttgcatttctaaaccagatgtgatctccttactggagcaagagaaagacccttgggtgataaaaggaggg

SEQ ID NO: 264752 - DNA, 645 bp, Homo Sapiens
gccaacaaggagtggaacaggtctgccacgaccatcccataggtgatctctgaggaaggaactatcactctgttgaggcagtctgcagaaatgttgagaagaatcttctctatcagctttgattctacacggatacaaacatcatgtcttccatcaatggcagtcattaacgctggcctataatatattttcttcatagtaaatggcaagcagctaaaacattgtttgtagatcctgttctcatctgtttctagttccaatccacattttgcacagccagtatatacgatgttgggaagagaagaaaaaatactcttcagagaactgtgagcatttagcgctatcttctgagatgctgtaataggaaatgccagctctgaaatctgggctttaatcagaaccactcctgaacacttatcctctaggtgggttgctaagtctgatatcttcacaaaggagggtgcacttttttgaaattttgctttaaatgtaattgcccttatatcatcatcaaacaagcactcacaggatgaccaaggcgttgtatgcaattctaggttttctagtgtgtaattgcactgaacaaaaagatatttaaattcccaaatataaccttttttcctttgaagttgagggtaccaggct

SEQ ID NO: 264753 - DNA, 506 bp, Homo Sapiens
ggaaccattgatcgaatagcccagcggatcatcaaagaagaaatagactacctggaggagaggagagaatacgggcctgcgtactcctcatggagcgccttggagggtgagctggccgaacccctggagggtgtgtcagcttgcattgggaactgctctacagccttagaagagctgacagatgacatgacagaagacttcctacctgtgctcagggaatatattttatactctgactccatgaagagtgtattgaagaagagggaccaagttcaagcagagtatgaagccaaactggaagctgtggctctgcggaaggaagaccgccccaaggtaccggcggacgtcgagaaatgtcaggatcggatggagtgtttcaatgctgacctgaaagctgacatgaaaaggtggcagaacaacaagaggcaggacttccggcagctactcatggggatggctgacaagaacatccagtattatgagaagtgcctcatggcgtgggagtc

SEQ ID NO: 264754 - DNA, 496 bp, Homo Sapiens
cccgctactcccacagaagcactgcccataagaacttcatcttctccatcggggggattggagaagggcaggagctcatgggctccatggaaaggtatgacagcatctgcaatgtctgggagagtatggccagcatgcccgtgggggtgctccaccccgcagtcgctgtgaaagaccaaagactctatctctttggaggagaggacatcatgcagaaccctgtgcgccttatccaggtttatcacatttccagaaactcgtggttcaaaatggagacaagaatgatcaagaacgtgtgtgcccctgcagtggtgcttggggagcggattgtcattgtgggaggttacacaaggaggattcttgcttatgaccctcaatccaacaaatttgtcaaatgtgcggacatgaaagaccggaggatgcaccatggggccacagtgatgggaaacaaactctacgtgacgggcgggcggcggctgaccacggactgcaaaaa

SEQ ID NO: 264755 - DNA, 824 bp, Homo Sapiens
aattcatttgtgagtgcccatcaggttacacaggtcagcggtgtgaagaaaatataaatgagtgtagctccagtccttgtttaaataaaggaatctgtgttgatggtgtggctggctatcgttgcacatgtgtgaaaggatttgtaggcctgcattgtgaaacagaagtcaatgaatgccagtcaaacccatgcttaaataatgcagtctgtgaagaccaggttgggggattcttgtgcaaatgcccacctggatttttgggtacccgatgtggaaagaacgtcgatgagtgtctcagtcagccatgcaaaaatggagctacctgtaaagacggtgccaatagcttcagatgcctgtgtgcagctggcttcacaggatcacactgtgaattgaacatcaatgaatgtcagtctaatccatgtagaaatcaggccacctgtgtggatgaattaaattcatacagttgtaaatgtcagccaggattttcaggcaaaaggtgtgaaacagaacagtctacaggctttaacctggattttgaagtttctggcatctatggatatgtcatgctagatggcatgctcccatctctccatgctctaacctgtaccttctggatgaaatcctctgacgacatgaactatggaacaccaatctcctatgcagttgataacggcagcgacaataccttgctcctgactgattataacggctgggttctttatatgaatggcagggaaaagataacaaactgtccctcggtgaaagatggcagatggcatcatattgcaatcacttggacaagtgccaatggcatctggaaagtc

SEQ ID NO: 264756 - DNA, 637 bp, Homo Sapiens
tgaaaagggaaatgaaacagtctgtggatgtggactctctcaggttgaacgtaggtggatcagcttgtactcaacatctgttcaggctggaaatgcagaggaagttcaatatgttaactcaatcatactggtttcctgggtgccaaggcagaaaatctaaaacatatgacttctagaaacactatgtgggagctatttagaacaaaggtgatgatcctggaagaaaatgtggagacgctatctcgggtaccagcacagttggacttctttgctgccagcaatcaacagcccttaaacatcaacatttcaaggttttgtcgaccagtgtaccaagtaaccttatttattaagtggaagtcaattataaataaaagacgtcatccttattaccgtcatgatgaggagtaggataaggagaaggaagaagagaaaattgtcttgttgttgatggcagaattcttaaaaacaattcttcgttgataagaacaggatatgatacaaaatcgtgtagcaccaacgacgcaccattatcaacttctttcctccgtgtggtatttatggtctgatgagcggtgctctctccccaaatacatatggtgaagatctacaaaatagtatttcttctactaaacccaca

SEQ ID NO: 264757 - DNA, 537 bp, Homo Sapiens
cgctgatggccttggtagggggagccgtggctgggcggagagcacgagcggcagcactggggtgcggacggtgggcagctggcagcggcccagtaggcgcagtgtctcacagaacccgaaggacaggcggtcccgctcacagcggggaggctcgacgggctcacaatcctcggtgccacacagccgggagctcacaagcccaggcctcgtggccacactggtcactgtcttcctcgggtagccccgtctgggtgttgacacacttgaccagtgtgtgaccactggatgccaccaccacaggggcctgagcactggccccagggccccaccacccactgtgtgcaggggtgggtgttgcagggccgggtggtgttgggtctcagtgcctcctcgcagaggtctggctctgggcaggtcaccagacgctgctgctcaccaacggcacaggccttggagcactccctccaggaagacatgtaccagctgaggcagggctgggccccgcagggccagtgcacaggcagcttggcaggtcca

SEQ ID NO: 264758 - DNA, 732 bp, Homo Sapiens
cacgcttttactcccgaaccaacagcttcctgaagattgttccagaaccaaagtagcttgaatgtaatcaacagaaggttgttactgtgcattactccctaaacagtgaagcatatgaggatgattccaatgtaaagttcttctatttgatgatggtaaaaggagctatcttactcagtggacaaaaggaaatcagaaacaaaggctggaatggaaacttctcgttcccaatcatcatcagtgctgatctggctcctgcagccgtcctgtttgtctgcccccttcagcccagtggggaaagtgtggatgacagtgtcacattacaggttgacaagtgctttaaacacaaagttaacataaagttctctaacgagcagggattacctgggtccaatgctagtcgctgtcttcaagcggcacctgtcttattctgtgccctcacggctgaggatgggaatgtcctacgactgaaatctgaacaacagctgtcacctgaaagtgtgtataacatggttccaagtatagagccggatggttatttccaccatggcctcaatctagatgatagcaaagaagacccttgcattcctcagacggatatgtcctacaatgcattatattacacacctgtaagcaactatggggatggagatatatataatattgtcaggaacatgggtctaaaagtctttaccaatctccattaccgaaaaccagaagtatgtgtgatgg

SEQ ID NO: 264759 - DNA, 765 bp, Homo Sapiens
ctcagccccctggaccccgagatctgtcccaccaaaggctgagctgcagccttccaggatcctgtgaagcgggaccacctctcacattctcctggacggggaatgccctcagccccctggaccccgagaccacccgctcctcggagctcaccctcacccccaggcccgaggaccatggcaccaacctcacctgtcaggtgaaacgccaaggagctcaggtgaccacggagagaactgtccagctcaatgtctcctatgctccacagaacctcgccatcagcatcttcttcagaaatggcacaggcacagccctgcggatcctgagcaatggcatgtcggtgcccatccaggagggccagtccctgttcctcgcctgcacagttgacagcaacccccctgcctcactgagctggttccgggagggaaaagccctcaatccttcccagacctcaatgtctgggaccctggagctgcctaacataggagctagagagggaggggaattcacctgccgggttcagcatccgcagggctcccagcacctgtccttcatcctttctgtgcagagaagctcctcttcctgcatatgtgtaactgagaaacagcagggctcctggcccctcgtcctcaccctgatcaggggggcactcatgggggctggctactcctcctcaaaaaaatcctcttcctgcatatgtgtaactgagaaacagcagggctcctggcccctcgtcctcaccctgatcaggggggctctcatggggg

SEQ ID NO: 264760 - DNA, 909 bp, Homo Sapiens
gttttgacaaccaacaaaactacaaagatctgacttctggtcttggagaaaatgcttgcgtaaagaaaagtcatgaaaagtaccttatagctttaaagagctctggacttacatatcctgaggataagcttgtatatggtgtgcaggagccatctgctggtactagttctctggctgttcaaggtttcataggcgcaacaggaactttgggacaagtggattcttcagatgaggatgatcaggatggtagtcaaggtctgggcaagagaaaaagggtaaaactaagcagtggcaccaaagatcaatccataatggatgttttgaagcataaaagcttcctagaagaactattattttggactataaaatatgaattccctcaaaagatggtaactttcttactcaacatgcttccagatcaagagtataaggttgcttttacaaaaacttttgttcagcattatgctttcattatgaaaacactgaagaaaagtcatgaatcagacacaatgtctaacagaattgtgcatattagtgttcagttgttcagcaatgaggagctagccagacaggtaacagaagaatgtcagctgctggatattatggtcactgtgctattatacatgatggaaagttgccttattaaaagtgagctacaagatgaagaaaatagtttacatgtggtagtgaactgtggagaagcattactgaagaataacacttactggcctcttgttagtgattttattaatattctttctcatcaaagtgtggccaagagatttttggaggatcacggtttgttagttacatggatgaactttgtatctttctttcaaggtatgaacttaaacaagcgagaactaaacgagcatgtggaatttgagtctcagacctactatgctgcct

SEQ ID NO: 264761 - DNA, 1002 bp, Homo Sapiens
cctccgcccagcccccgacgggcagcccaggaggccacgaactcgcagttctgtgtaaaggaacattcctgaaagagtgagtgcgatgcccacgtagctgagggcactgaggcggctgccaaacaacagccgggacaggatgaggttgcccaccacggtgaggttgcccaggacgtggacggtgagggcagaggtgagggccagcagggagaagctggccaggttatagagaacagacaggaggcagctgagcaggatgcaggcccagaggcgagagtcgccagcagtgggcggtggggcaacgccagcctccagcaccagggctgcacccgccagcaggcagaagctgggcagcgaggtggcgtaaagcagggtcaccgcgtccagcctctcctcctgcagcagggcactttgctgaaccgacttgagtccgcggaggcaggtggctgcgagcaggaagccacagccggtagggggtgtccggaactctccagccaggctgcaggcggcccccaggcagagcggacccatggcggccaactgaagcgggtggtggcggcggcccagcagcagcgccgacagggccagggtgaacagaggtgtggtggtagtaaccagttgtgccaggtccaggggcacagcccttaggcccacgttgccgcaggccatggacgtgccaaaggtgagactgagcagtaggactcggcagcgagtgccgcctggcatggggcgccgtgccccccggtggcatgccagggctgccaccagcatgtgcagggccgacagcagcaggggccgcccaaagccgtgcactgtgaagatccacttgttgaggcttgacatgctggctcccgccagcagccacaccagtgctgccatggccactcgggcccggccaggctgccggagggcctgagggctgccagggggccactcggggggcccagccgcaagagcaccaccagctgctgctcctacttcggctgaggtcatcctgccatc

SEQ ID NO: 264762 - DNA, 641 bp, Homo Sapiens
  misc_feature (226)..(226): n is a, c, g, or t
catgctacaatcaaaaccaatgtctgctacattttccacttcttcctcagcatttaagttctgacaaactgcatgcatccatctatcacattgtctacattgcagaataagatcttcttctctatagtttcgatagcagactggacaggaagataagcttgcacaaggagcgcactgtgtgtaattgttctgccattcacatcttagacctgcagatgttgctccnacagtgtctgcaccaaacacaccatttgcacttccagcctcctttgggaactgtctgcaatggagggtctaggcagtaggtgtgataacttatgtcacagtcatcacacagcaggagtcttcctgggtcagttgccttcccacaggcctcacacacagtgcactcaagacacctccaacctttgctaagaaccactttagtgatcttaatactgacacagtatggatggtaacactgaccacactgagaacaggcaagtaatcttccttctgctccttggccaaaactgccacaaactacacacatatcctgattcaaagtgaacttgtcactgctagaaaacaacacaactgtattgtgcatagagttttcttcatcatccttatttgatgaaatatctgcagtagacacccca

SEQ ID NO: 264763 - DNA, 154 bp, Homo Sapiens
gatggcgcccagggacttctgcatcttctcatcattgcagtgcaggtattgccaggagatctgcgcctcctgaccaccgggtctcaactcgtgaggacccggaatgctccccggtaggtccaggcccttctctttgactccgctggcctcaggg

SEQ ID NO: 264764 - DNA, 608 bp, Homo Sapiens
tgaccgattgcagagcaaattgaggacatgcgcatcaaagtcatgattctagagttcctctttgttgcagtagagacccagccaggcctcatcgaactgtttctgaacctggaagttaaggatggcagtgatggctcaaaggaattcagccttgggatgtggagctgtctccatgcagtgctggagctgattgattcccaacagcaagatcgatactggtgcccacccctgctgcatcgtgccgccattgcctttttgcatgctctgtggcaggatcggagggacagtgccatgctggtcctccgaaccaaacccaagttttgggaaaatttaaccagtccgctgtttggaaccctttctcctccctctgaaacatcagagcccagcatcctggaaacctgtgccctaatcatgaagataatttgcttggagatatactatgtagtaaagggttcattagaccagtcattaaaggatacactgaagaaattttccatcgagaaacgctttgcctactgatcagggtatgtcaagtcattggcagttcacgtggccgaaacagaaggcagcagctgcacctccttgttagagtaccagatgctggtgtc

SEQ ID NO: 264765 - DNA, 720 bp, Homo Sapiens
cataagtagagctccatttggagctgtgatcaagatggctaaaaatgctactgtcatcacatccttcgcatatggttccaatgtggggtgcggagactcttgctgtttctagagccagaggacctaacacagcctgtactgtagctttgggcatccatgctaaagcaataaatattttctccttaaaactaaaaccagcaaagcacatcaatagatatgtggttaaaattcgaacacataatgccaaacttagagtggcaacagatatgccaacaatatttgattcaagcgatgaaacagatacttctgctccaactaaaccaaaaagaagtggttgaaaaatatcccatacagtcgtaataatcttttggactttcatcttttcttgggaccattttgtccctgcaatgaaactcaacactagtgtgcataatcctccagatccatgtaaaccaatacgttggctgcctaagacggcagaaacacacatagtcaaaacaaggaatcctctcttcaatgtaagttttttctggtcttcacttggaaaatatcgaacaaaaaatcccaaaacaattcctgccagcagactaatacatacgttccttatagaggctatggcgttattaagtataccacctgagagaaaagactatgctcaagcatgtattgaatccagtgatagccagaatgtcatccatactgctagcagccattaataag

SEQ ID NO: 264766 - DNA, 533 bp, Homo Sapiens
  misc_feature (441)..(452): n is a, c, g, or t
cgcctcagcagtgccatcactcttttctgaagtgctgctcttcctgttgacatcatattgctgacagaggcaaactccatgaatgtgttatagttcgggcaagaggttatgcactgacacttcatccaccccacaccggatatctgcttcctcacagaaggtggcggaaaccaggacatggcaaccagaacagcttcagtgtcagggttccacagaaacatgtacagggccacttctagtttggtctgcgcttgtcggcaagaggaacatacaccaatgtttgtaaaacttcactatctacaaattagggagagtaacttacatagtcataaatgattgtaacgtctaccgccagttatttttaaaatgtatatcacattaacaactcagtggaagataaacaattcctttcaaatgcattttattttcatcatacattgnnnnnnnnnnnnatctcaagaaagctacttgaatttcgggggataacttaccaccccccgaccttaagtgcattctcaaaatcagatgccatg

SEQ ID NO: 264767 - DNA, 511 bp, Homo Sapiens
aacatggcgccaccgaaggcccagaagcaggtgaacacgaagtacagctcgtacagctccctgggggagtcggggggcacggtcttctccgtgagcaggcactccagcaggtacaggatcgtttggatcaccgtgatctccggcactggcgtgatcttcttgaacccaaagcgcaacttgtccaggcacgtgggcaggtacttgtcaaagaggatcatcaggttggccttctccgactgcaccttgcgcctctcgatccagctgctcaccaccgggttccatcccaggtcggctgggttgatgtagaggatgccggctctggaaacggtggctggggtggccgtcctcaggtggctgatttcgaacaccagcctcatggtgcggttcagggggatccgctcgttgctggccagggtgaggaccttgttgtcatccatgactgtgttgagagactcgatccacatggggtctatgtctccgtcaaggatgatccacttggggccgtcatggg

SEQ ID NO: 264768 - DNA, 746 bp, Homo Sapiens
gtgtcccagctgagaacggcctcccccagggggaccctgagccattgccccccgtgccctttccccggacagtccctgtggcagatgtactagcccgggacagcagtgatattggctgggtcctggagctccccaaagaggaagctccccagaatgggacagaccataggctacccaggatggcaggcccaggccacgccccactccagcggcagctatctgtgacccaggatgaccccgagagcctcggggtggggctccccaatgggctggatggggtggaagaagaagatgatgacgactacgtaaccctcagtgaccaggacagacactcaggcagctccggccgtggccatggccccagacggccctcagtggcgtcctctgtgtcagaggagtaattcgaggtgagagagcactcagtccctctccggaggcgccactcagagcaagtggccaacgggccaaccccaccaccgcgccggcagctgagtgccccccatataacccgagggacctttgttggaccccagggtggctccccatgggcccagagtcggggaagagaagaagcagatgcgtcgaagaggatgcagccccagcgctccacagacaaggaggcacaggacaaggtcccagaaccctgggtgccctgcagcctgggttcagtgcccggagcccgtcctacatgggaacaatgcgcggctgatcatgcccggcatgatgatcaggcccatgggagcatc

SEQ ID NO: 264769 - DNA, 571 bp, Homo Sapiens
cagtgctcccctgttcctccaacaccttcaacaccaccacaaagtgaagaagatgaggctgtagacaaaaagccaactctactcagtgcccaggaagatactcctgaccttctccatgaggacagattacagtatctgcaggaagagggttccggtgtgatgcatcaggaatgtcagatccagtcctgtgagctctcggtggctcagaagcccaggccctcttctcctgcagtgacatccttggcatcaccaccactctgctttggcagtttcctaagctgtgtctgccagaccttctcaaggtctaggaagcagaagcctcccagaagaaagggtaacaaccaggctgaggcaggaggtgatgctgaggtcctgagacctggcccggcaaaaccagagttgagcctcagcaaaacgtgtagccacttgaaattgatagagctttcctttgtgtttagttttatagttctctctgtatgtcattgttcctcttagttgagtttttgcctgtcaaagagatagagagctgcttttatgctgagatcctcaagccaaaacccacaagtaaacg

SEQ ID NO: 264770 - DNA, 223 bp, Homo Sapiens
cggagacgcagcaggaccctgagctccattacctgaatgagtcggcttcaacccctgccccaaaactccctgagagaagtgtgtacttcccttgccgactactccatcttcaggagaggtgttggagaaagaaaaggcttctcagctccaggaacaatccagcaacagctctggaaaagaggttctaatgccttcccatagtcttcctccggcaagcctggag

SEQ ID NO: 264771 - DNA, 342 bp, Homo Sapiens
tctccaagcacaaagtgctctggagctggaagcagattcagaggagcaggccatcccggggaggcacctctgcctggggcaagtgttccctgccgaagtttaccgtccccaaaggcagacttggcgtgacgaggataggagacttgtccctgcaggatatgaggaaggtaccttctctggccctcatagagctgaccgcgctctgtgacatcctcggcttggacctgaagaggagcaaggcggggaagtggaaagcggcagaaactcgcctctttggtgtgccccttgacagcctgctagaagctgaccacaaagtcctccccagcacacaggtcccgctgg

SEQ ID NO: 264772 - DNA, 266 bp, Homo Sapiens
tcatggcatatggcaagcatgagggctgtgcttgttcatcacttcgatgtctgcaccttaggacagcaattttgccaccactgacaagttctcactataaacagcataatgggacagctgtgttgccatacacatctacaatatttcggatcagcaccagaatctatgagaatatttgcacaagcctccctctggcattgcagagccttcatcagaggtgtcctgttttcaccatcaaggacgtcaacctggcgttttctatctac

SEQ ID NO: 264773 - DNA, 609 bp, Homo Sapiens
agccaagaggtacctcagatcgccgtggtgatcagcagtgggccagttgaggaccatgtccatggacctgcgaaggcattgaggaaggcaggcatcctgctttatgctattggcgtcagagatgcagtttgggcagagctcagggaaattgccagtagtcctcaggagaattttacctcctttgttcctaacttctctggtctgagcaatctcgcccagaagctgcggcaggaactctgtgatacgttgacaaaggcagctccacatgttgaccacgtctctccagcttgcagagaagcagccctggcagacattgtgtttctagtagacagttcaactagcatcggaccccaaaacttccagaaagtcaagaacttcctttactccgtcatcttggggcttgacatcagcagtgaccgtgtccgagtgggacttgcccagtataatgacaacatctacccagccttccagctgaaccagcaccctctgaagagcatgatcttggagcagatccagaatctgccataccgcacaggaggcacaaacacagggagcgccctggagtttatcaggaccaactatttgactgaggagtctggcagtcggcaa

SEQ ID NO: 264774 - DNA, 778 bp, Homo Sapiens
ccagctgccgtggcctagttctgggcaatctagaaatggagaattctgagtggatttgtttgttggtgcttttctctaaattattcgaactaattctattcccatttttggaggaaagtggtgatgtatattctccaagaattttaacaggccacacatttactgactttccatttatttctatcccattcatttctttcacagctatctttgcatcgctgttttttgtaaaagcaagagatgcatatctgtaattagtagaatcataaattgaaatttcagaaacttggtatttttggaaatgagaccttaaatcggcctcagatactgaagggcagaggccaccaacatgtatcaaataacctttatctctttgtgagggttcaacattcttcatttctcctgtaagatccaaattccatgtgtcttgttctacttgatttccctgtgtccctgagacgtcaactcctgtcaggctctctttagcatcagaccagtcttcgcttgtctcttggtaatgtctgcagtctttatcaccaagtttcagttgactaaagtctgcatttatatcaccatttttaaagtcatctttcttgggtgatatgttttgtgtagcatgactattgtcagatgataaagacatttgagagagtgtcttttttaggtttgaagaaacatcaacatcatgagccctctgattatcttgttcagcatctgcttctgaaaagacatgtgtttcttttttcattagcctggaagcaaaagtagagaaggtaga

SEQ ID NO: 264775 - DNA, 501 bp, Homo Sapiens
acccgcttcccacctccgaagggcaggcgtcaccatctatgcagtgggcacccacaatgtctcagagagtaaggacctggagaagatagcatcatatcctccttggaagaattcagtccccctggaatcctttttgcagctctccatagtaggaagcaagcttacacaccagctctgctctgagatggtggacagtaaagtttccattagtgggacgagctatcccctacaagaaggttgtgtgcacatcgaaaaggcagatatttacttccttattgatgggtctggcagcatctatccagaagattttcttgagatgaaggtgttcatgaatgaagtgataaagatgttccagatcgggcccaacagagtacagtttggaatcattcagtactcagacaaaattaaaagtaaatttatcctcagccagtatcccagtgtgacagagctgaaggtagccattgataacatccagcaggggggaggtggcaccaaaaccgg

SEQ ID NO: 264776 - DNA, 725 bp, Homo Sapiens
aagaaaccaagccctgttccccatgggaactcgactggagagaaggaccagctcgaatgaggaaacgcatcaaacgcttttctcctttggaggccctgagctcaggaaggcacaaggaaagccaagacaaaaatgatcatatttctcaaacaaatgctgaaaaccaagatgaactgacactgagggaggctgagggcgagccggacgaggtgggggtggactgcacccagctgaccttcttcccagccttacacgaaagtctgcactcagaagacttcttggaactgtgtcgggaaagacaagttattttacaagagcttcttgataaagaaaaggtgacgcagaagttctccctggtgattgtgcagggccacctggtgtcagaaggggtcctgctttttggccaccaacacttctacatctgcgagaacttcacactgtctcccacgggtgatgtctactgtacccgtcactgcttatccaacatcagcgatccgttcattttcaacctgtgcagcaaagacaggtccactgaccattactcgtgccagtgccacagctacgctgacatgcgggagctacggcaggctcgcttcctcctgcaggacatcgccctggagatcttcttccacaatggatattccaagtttcttgtcttctacaacaatgatcggagtaaggcctttaaaagcttctgctctttccaacccagcctgaaggggaag

SEQ ID NO: 264777 - DNA, 613 bp, Homo Sapiens
ctcagaacctgacacttgcacggaggccaggccccaccaggcctacaggtgatccttcctactcaacagtgtccttgaggcctcgagacccctgccctcctcccagggcccagccagtccattgaatggaaggacaaacacatggaaggatgcagctgagcccgatggaagtcaatgctgcgctcagcaccccctgtactaacgcagaaatatacacgcactcagatgccaacacccagggcccctcctccatttcagaatctccccacctgtctccacatccatgaaggactcatctggcatgaaggtacaccaggactccacccgcagggacagatggtcacaccccaccaccatcctgcctcacaagtcgcagagcagccaggccacaatgataccacaggagcacaggatgttcatgggggaagcctacagtgcagccacctgcttcaagatgctgcaggacatgaacagtgctgaccccttccacttgaagtacatcatcaagaagatcaagaacatggctcatggctcccccaagctggtgatggacaccatccacgactacttcatagactacccagagatctccagcaggcacaaggtccggctg

SEQ ID NO: 264778 - DNA, 589 bp, Homo Sapiens
ccgggaggagctcctaaaaaaaatgcagtctttatgggaaaaagcttgtgaaaatctcagaaatctgaacatggaaaccacaagaaccagatgctggaaggattatgtgagtttaaggatagaagcaatcagagctgaatatcagaagatgcctgcatttctccatgaagaagagcaacatcacttggaaaggctgcgaaaggagggcgaggacatttttcagcaactcaatgaaagcaaagccagaatggaacattccagggagcttttaagaggaatgtatgaggatctgaagcaaatgtgccataaagcagatgtggagctactccaggcttttggagacatattacacaggtatgagtctctgctgctgcaagtgtctgagcctgtgaatccagagctcagtgcagggcccatcactggactgctggacagcctcagtggattcagagttgattttactctgcagcctgaaagagccaatagtcatatcttcctgtatggagatttgagaagcatgaatgttggatgtgaccctcaagatgatcccgatatcactggaaaatctgaatgttttcttgtatggggg

SEQ ID NO: 264779 - DNA, 252 bp, Homo Sapiens
tgtaactaatgatctcaggagatccgcccactttggtctcccgaaagtgctgagattacagtcatgagccaccatgcccagcctatttatttctgattctttaagggtgactggacgtgttgatcagcgctcgctgggatttggctgacgtggccccagccccgcctccctccccaccccacaatggcagaagaaactggacagagtaaattagctgcacccaagaaaaagttcaaaagaatatggcagaga

SEQ ID NO: 264780 - DNA, 452 bp, Homo Sapiens
tcgcccaggtcacagtgggggtttctaaacaggaactggctcttgtcgaattcgtccatggcttgcatgacgccgtctcggtaactcaaccccattacccaggtgaaacggggaatgaagccagcatagcctgagatggccttgcgttggattaggttagggtggtccagctgcggcagccgctggaagctgcccacatctagcgtctcctgctggcggcgggcggggggtgggtactcatccctctggcagtggtacagctggtgccgcctgggggcctcgcaaacaggagtggcgctcttccaggcctcttccccgtatactgggtgtcccaagtctctggagtctcccttcctgcctggtgaacacggagggtgcggggtgtcgggcgtgaagcctgcaggcagcagaatctgtctgggtatgttctctacccctggcggctcctgggc

SEQ ID NO: 264781 - DNA, 864 bp, Homo Sapiens
atgcccctacctggccacctacgtggactggcacttcctttttgagtcccaggccgccaagacaatacgcgatgccttttgtatatttgaacagaaccagggcctccccctgcggcgacaccactcagatctctactcccactactttgggggccttgcggaaacggtgctggtcatcagatctgtgtctactatgctcaactatgactatgtgtgggatatggtcttccaccctaatggggccatagaaatcagactccacaccaccggctacatcagctcagcattcccctttggtgctgcccagaggtatggaaacaaagtttcagagcacaccctgggcacggtccacacccacagcgcccacttcaaggtggacctggatgtagcaggactggagaactgggtctgggccgaggatatggcctttgtccccatggctgtgccctggagccctgagcaccagatgcagaggctgcaggtgacccggaagctgctggagacagaggagcaagccaccttccccatgggaggcgccacccctcgctacctgtacctggccagcaaccacagcaacaagtggggtcacccccggggctaccgcatccaggtgcgcagcttttctggggagccactgccccagaacagctccgtggagagaggcttcagctgggggaggtaccagctggtggtaacccagcggaaggaggaggaacctagtagcaccagcatctacaatttgaatgacccttggacacccactgtggacttcactgacttcatcaacaatgagaccattgcagggaaagacttggtggcctgggtgacagctggttttctgcatatcccacatgcagaggacat

SEQ ID NO: 264782 - DNA, 986 bp, Homo Sapiens
ctatgaaacgctcaaattccttgtgggccatctcaagaccatcgctgaccactctgagaaaaacaagatgcaaccccggatcctggccctggtctttgggccgacactggtgaggacgtctgaggacaacatgacagacatggtgacccacatgcctgaccgctacaagatcgtggagacactgatccagcacgtaagcccctgttccggggggcgcccggcagcccctgggggccaggccatgttcctctgagcccctcgctcttgctccgcctggcggacagtgccccaggaagggctcggcagctgtagagcatgctgctagcgtgctatatactcctccaaagccatcggctgcatttcaagacaaggcaggaatggatcctggaatccctgctgccctgggatgttgtgtccccagcaggagagtcaagaggcccccgagcttccgagatgcctgggaaaggtagaagaggaggaagggcagggaaggtgctactggtggagggcggaaggggcagcttcagaagttggcccctggagaggtgtcctggcagacacgagcagacgggggccaaggtctggcctgatatcaggaggccccggctctagtgactttccctgctggccccactgaggttttggggagatagtggtgatgttcctggtaacaaggggtggatggggcagggcacagggccttggcctgaggcaggatcctgcaccagtgcttggcatgtactgggctggccacctcccttctcatggcttcctggatgccaacagccctggtcctgtaggttcttgttactgtgcatgggcggaggagaacccagagtggccagcagagggcgcagaaggccttggttttccagagcccaaccctaaggcagcactgccgccttctggtgtgcacacggatgtcattatgaatagtggattttccatttccaattcttgtctcagcccacaaaggatgagaacag

SEQ ID NO: 264783 - DNA, 624 bp, Homo Sapiens
tttgatggccagccagttcccctcagtgtggatgatcaagggctgagcgtatcagggctcatggcgactgctgcagcatcaacccgaagaccgggggcgtcatcatgctcggctggagtgacggcacgctcaaccccgcggttcggcagcctggaaacctgtaacatagtggactcctttgaggaggtggaggacagcctgtatgtcccccagtataacaagtacggggaagagagggtgatcgtcttcctgaagacagcctctgggcacgccttccagcctgacttggtgaagaggatctgtgacgccatccgcgtgggcttgtctgtgcggcatgtgcccagcctcatcctggaaaccaagggcatcgcgcaggtggaaggtggcgttattcgtgcccacgagctgcacatggacccctgcatgaagcgtaggggggcacagagcaggcgagccatttccatctcacagcgggagggccggcgacaccacacgaagtgacatgcaggccctcctcggaagccggcgcttagatccctaattagttcacacgtcgactgaatttttcagtacacgctcaatggcaataaagtggaagttgccgtcaaacagatcatcgctcga

SEQ ID NO: 264784 - DNA, 625 bp, Homo Sapiens
  misc_feature (493)..(501): n is a, c, g, or t
  misc_feature (615)..(615): n is a, c, g, or t
tggtaccggcccggaacttagggatatcgtcgacccacgcgtcgtgttgatgtcaccgatgatgctgagtcgcctccttcagcagcgtggtgcatgtgcagcatctcgtcatgctgctgtgcctgctctgccaactcctccatcagtgtgttctggttcccacatgagtacatattggccagcggctccgagatgatgaactccggggtctgagagtgggcaaacagggaagaaggttgggacctggtgcctgtgccgccctggctgccttgctgggcccttctgcgactgtgcgctggacttggagccccttggagtatggcttttcacacgggcttctataccgcttcgactggaagatccacctccccactgccttttctcactcagatggggacaccgaggctccagaggaaaagacacctgtcaaatgtcacagatctgggaggggacttaagacctatcatgccaagaggacacctgtctactcagnnnnnnnnnggtggggcggggggcagtgatagggtctcgctctgtcaccaggcttggagtacagtgatgactgctcacttgcagcctccacctcctgggctcaaagtgatcctccaacgtcancctctcgagt

SEQ ID NO: 264785 - DNA, 330 bp, Homo Sapiens
ggattgctctgtatccaagaaaatcactgcagaggccttttcagttgttatggcacagttgcttggaattaatctgggattgacatatgatgatatctacaattgccactgaccaggaactacatgcataatgaatcctgatgcgatatgatcccatggtatgaagttttttaaaaaatgcagcatggatggatttaaacggatagttctgcagcctgaacttaaatgttttcaggataaaacagtttcaaaaatgacttaccgaaaatcttcaacttgtggcaatggaattttggaacctacagagcagtgtgattgtggctataaaga

SEQ ID NO: 264786 - DNA, 156 bp, Homo Sapiens
gcacgcctggagcaaagtccaggtttcggctgataccaacataatctgttccagcttctgctgactcctgctctgactttctggagcgcacggcgatggatgatggttgggaaagatcagtgcctcttatccaaacaccaaacctccacgtagcga

SEQ ID NO: 264787 - DNA, 447 bp, Homo Sapiens
cctgttggaccgcttcgatggaatactggcagatgctggacagacagtggagaatatgtcatggatgctcgtatgtgataggccagaaagagagcaactgaaaatgcttctcttggctgtgttgaacttcacagccttgctcattgagtacagcttttcccggcatctgtacagttccatagagcatttgacaactttattggcttcctctgatatgcaagtggtgctggcagtcctcaatctcctatatgtatttagcaaaagatcaaactacatcactcgtctgggatctgacaagaggaccccgctgctaactcggctacaacatttggcagagagctggggtggaaaggagaatggatttggacttgcagaatgttgcagagacttgcatatgatgaaatatccacccagtgcaactacactacactttgaattctatgcaga

SEQ ID NO: 264788 - DNA, 598 bp, Homo Sapiens
accacctcctctgcttgcttgcagacccctgccttataccccgagaactccagactgagggtggagatgcccagggcacatgcgccagacagcttggtgaagaagacgtaggaggagtagaagatggtctccaggcctggcccgtgacggtgctgcagctgaaagtcatccaccacgtctggcagcatggaccagggtagcagcaaggacacagcaatgctcacgccagatacaaaggccacgacatatgccacaggtgctgagggcacagcagccagcaagatcgcaaagggcaccatcgcaaagatcccaaaggctgacgtcttcttccccaagcgctggagaacccactcccacagcggggtgctcagcacggctgagaccaggacagttagtaccaggacctggacggggacctgtagctgggaggcatgtgtacagaacaggaccaagtagctctgctccacctgaacagcagcagagatgaacaggaaggagatcaccagcttcaggtagggtgggtgccgggtagtgagctcagcccagccaggaaactcaagcctgggcctgaggctggggcagaggggtctggccgctc

SEQ ID NO: 264789 - DNA, 441 bp, Homo Sapiens
ttggaagccctaggattctatcaggcttctcaggaggtcctggaaacaatgtgtggtcatgacaaatgcttcatcttctcatggcctatctggccacctccactatgtactccctatccttgataaggcaagatgagctttttgactaagaatggctccatatttgttcattgccaagcactgataaaatccttcatcggactgctctcctcgcctgccttccacctcactgatgtataaagagccgttagaaagaacctcgatccgtttattttcagacatttttgctccatttttcaaccatgtgaccttaataggaacttctccgtgagcctggcaatctaaaacgactgggtcctttcttgtgacagttacatcctgtggttcttttacaaaagacagttcgctaaagcaccacactcctggcaaaggactgagcag

SEQ ID NO: 264790 - DNA, 1079 bp, Homo Sapiens
cttcactgcattggatattattagcaactctgtgtcaacttcaggaactcctacctgaagtcccagaaaaagtgttaaagcatttttgtagcatcacttccctattcaagattggttcttcttccataacaaaatcaccgcaaatttcgtcacctcaggaaaataggaatcagattagtaccttgtcttctcaaagttcagcttctgatttagactctgtcattcaagaacataatgaatattatcagtatttaggattaggagagacagtgcaggaagacaaaaccaccactttgaatgacaactcttccattatggaactaaaaggaatctcaagttttttaccacctgtgacttcatacaatcagaccagctactggaaagactccagctgtaaatctaatatagggcagaatactccttttctaattaatatagaatcaaggagaccggcttataactcctttctaaaccacagtgattcagagtcagatgtcttttctttgggtctaacacaaatgaactgtgaaactataaaatcaccaactgacactcagaagagagtgtcagttgtcccccgttttataaattctcagaaaaggagaacacatgaagcaaaaggtttcataaataaagatgtatcggaccctatcttttcactagagggcactcaatctcctcttcattggaactttaagaaaaatatatgggaacaagagaatcacccgttcaacttacaatatggtgcacagcagactgcatgtaacaaattgtactctcagaaaggtaatttattcactgatcagcaaaaatgtctatcagatgagtctgaaggcctcacatgtgaaagttcaaaagatgagactttctggagagaattaccatctgtccccagtttggatttatttcgtgcttctgattctaatgcaaatcaaaaagaattcaacagcctttatttctaccaaagagctggaaaaagtttaggacagaaaaggcaccatgaatcttcatttaactcaggagaaaaagaatcattaacaggttttatgtgctcacaactaccacaattcaaaaaacga

SEQ ID NO: 264791 - DNA, 561 bp, Homo Sapiens
tggctaaggaagaggtatgtgagaagtcccccgctcaccctccggcctcggtccatttggtactgtatgtccctcaacttgttgccaacatgaatttggctgaatttgaagagtccatcccaggacctgcagaattcccgccagggctttgggatgaaggggcgaagccatctggggatggcgcctgcatacatggaggtcttgaacatgctaaacatgagctccagggcctcgatgtattccacagtcagctgtgggatgctgttttccaggcagcccaaacgactctcataaaggatggtggccactccttccattgaatatttgaagaaaagatcattgacattggtcacggtttctccatctactgcctggctcctgaggaggtagattcttttaattaagtcagcaataacttggttgacttctccagaataaatggccacatctttcggtttcagaattctttgtcacaatacgcttctcatcttgagccactgttcaccctccgccgagatgagcccggtggctctcccccgcaagtctcggtactcccgccag

SEQ ID NO: 264792 - DNA, 691 bp, Homo Sapiens
gtgcttcaagcctgatgacattgacccctgcctctgtacccacttgatctacgcctttgctggaatgcagaacaatgagatcaccaccatcgaatgggatgacatgactctctaccaagctttcaatggcctgaaaaacaagtaaatgacggaaaacctgagtttcaaatcttttaacctttaaggacagtttaaacaagatcttccacagcagacttcaggctgaaattccaaacaggccaacaagcagaaatagtcaactgaaaactctcttggctattggtggctggaactttggcactgctcctttcactgccatggtttccactcctgagaaccatcagactttcatcaactcagtcatcaaattcctgcaccagtatgagtttgacgggctggactttgactgggagtaccccggctctcgtgtgagccctcctcaggacaagcatctcttcactgtcctggtgcaggaaatgcgtgaagcttttgagcaggaggccaagcacattaataagcccaggctgatggtcactgctgcagtagctgctggcatctccaacatccagtctggctatgagatcccccaactgtcacagtacccggactacatccatgtcatgacctatgacctccatggctcctgggagggctacactggagagaacagccccctctacaatacccgact

SEQ ID NO: 264793 - DNA, 327 bp, Homo Sapiens
tctgtccagcgggtcagggctgtggggatgctggacagggttcctgcttggctggtagctgtgcctctgatcatggaaaaagtcatccagcagctcatcatcagaacgggcgatgatgtggacgtcatcgttgcctaccaggaggcgggcccgaccccggctttgtaggggaaggctgctgctcagctgaaggatgtcagcagcagctgagggaccaagcaacctctgcagtataagaggagggttgggctggcgattcccagggtagtgaacatgaatggtgtggccagtattggccgtcagctgccttagggtcctctgactgcg

SEQ ID NO: 264794 - DNA, 724 bp, Homo Sapiens
  misc_feature (188)..(415): n is a, c, g, or t
ggtgtgttttgtgtcaccattaggtgtagatggtcagccttttgaacaaactgacactacagaagaggcaggtttcagctatctaaaaatggcaactgttaaaaagcagttgggattgctacgttagggtggtatcattagaagcatttaaaagttgagtgtagaggccgggtgcggtggctcacacnnnnnnnnnnnnnnnnnnnnnnnnnnnnnnnnnnnnnnnnnnnnnnnnnnnnnnnnnnnnnnnnnnnnnnnnnnnnnnnnnnnnnnnnnnnnnnnnnnnnnnnnnnnnnnnnnnnnnnnnnnnnnnnnnnnnnnnnnnnnnnnnnnnnnnnnnnnnnnnnnnnnnnnnnnnnnnnnnnnnnnnnnnnnnnnnnnnnnnnnnnnnnnnnnnnnnnnnnnnnnnnnnnnnttcactggtattaaggtggtttagttattacagtatttggaagttgaacaaatgactattgaggtaccatttggttttgacttgaaattttagccagttcttacaacttgtaaatgaactttagatctaatcatgcgtgttccttaaaggttgtggtgctttaaactttcctttttaagggccagcgggccttaaattctttttatgatcaacgagaatacatagggagaagtggttcattattggaagaaagttttgccattgttggaagataataaaaaagaagaacagtattcctgaacctattga

SEQ ID NO: 264795 - DNA, 1611 bp, Homo Sapiens
  misc_feature (973)..(973): n is a, c, g, or t
  misc_feature (982)..(982): n is a, c, g, or t
  misc_feature (1025)..(1049): n is a, c, g, or t
ctaacttaacttttccttaaataaaacaggtatttctccttggagtagtatataccagccacttacaattaaaggagaaatgtaattctcaccacagctcctatcagccgttatgcctgccccttcctgtgtgtaaacagctttgtacagaaagacaaaaatcttggtgggatgcggtttgtactctgattcacagaaaagcagtacctggaaactcagcaaaattgagacttctagttcagcatgaaataaacactctaagagcccaggaaaaacatggccttcaacctgctctgcttgtacattgggcaaaatgccttcagaaaatgggcagcggtcttaattctttttatgatcaacgagaatacatagggagaagtgttcattattggaagaaagttttgccattgttgaagataataaaaaagaagaacagtattccctgaacctattgatcctctgtttaaacattttcatagtgtagacattcaggcatcagaaattgttgaatatgaagaagacgcacacgtaacttttgctatattggatgcagtaaatggaaatatagaagatgctatgactgcttttgaatctataaaaagtgttgtttcttattggaatcttgcactgatttttcacaggaaggcagaagacattgaaaatgatgccctttctcctgaagaacaagaagaatgcagaaattatctgacaaagaccagggactacctaataaagattatagatgacggtgattcaaatctttcagtggtcaagaaattgcctgtgcccctggagtctgtaaaacagatgcttaagtcagtcatgcaggaactcgaagactaatagtgaaaggaggtcctctctataaaaaatggttctttgccgaaatgcagattcatgaaataaaacattctacaccagtctcctaccaaatattcactatcaccaagtaaaagttacaaggtaaacaggnaagaatggnatcatttcattgtgaaattgtttctaagtgttttaaatgctcnnnnnnnnnnnnnnnnnnnnnnnnnagtattctcccaaaacaccacctcgatgggcagaagatcagaattctttacgggaaaatgatttgccaaagaagtaaaggccattacgaaactaaatagcagtaagtcagcatcccgtcatcgttggcccacagagaattatggaccagactcggtgcctgatggatatcaggggtcacagacatttcatggggctccactaacagttgcaactactggcccttcagtatattatagtcagtcaccagcatataattcccagtatcttctcagaccagcagctaatgttactcccacaaagggttcttctaatacagaatttaagtcaaccaaagaaggattttccatcgctgtgtctgctgatggatttaaatttggcatttcggaaccaggaaatcaagaaaagaaaagggaaaagcctcttgaaaatgatactggcttccaggctcaggatattagtggccggaagaagggccgtggtgtgatttttggccaaacaagtagcacttttacatttgcagatgttgcaaaatcaacttcaggagaaggatttcagtttggc

SEQ ID NO: 264796 - DNA, 338 bp, Homo Sapiens
aggccgcccgggggcagtgggaactcggggcgcctgtcccggcaccaccacagattaccagaaccacctccccggtgaccagactgaaaaactaacagaactgacggtacttccatcattgctgggtggtgtcagaggaagggtaccagcgcacctgagcgtggagggcggcggcagcggcagtggcagttgggtaggtgaacgcagcatgggagatggctggggtcagctctgtggtgtacaaagggtagggggcccaggcctctggggatgcagggatcagagcagcccccatcaggtcataggggtcccgtgcgatgaagtgtgctcctagggcg

SEQ ID NO: 264797 - DNA, 538 bp, Homo Sapiens
ttgttctcagagatattctgattggtaaaggatggggtgtttgactgagtgtgcttttggcaacaaaaatattggcctcttttactggagcgtgtccctgaaaaatggacaggagagctaatagacaaacaaaatccacatggaagtgtggtggctgcaaaacgaagttcacagaatttcaggcaaaaacatcatatatgtaatttaccaaacagtggaattagaagaataaaaaccacaagagttggtgaagttgaagaggaaactccatgtggagacacggcgccgtacttcagacctcccggtctactaatactgatggtgtggctggaacctggggtgtgtacagccctatccagaggatgctcctgtttcggctgattcctctacaccttgtgtggggaaggtgggcaccagcggctccctagccgcagcagcctcaagtgcctccgcagccttttcagcttcctcattaaagtaaaaaaaagtgtgttcttctttgaaacctatttaaagtaacaataaagtttactgtcta

SEQ ID NO: 264798 - DNA, 662 bp, Homo Sapiens
acttcagaaagcccaagagaagagatgaccacatcctcaataatatttgatatctccaagaaatatataaatagtactcttcccaatgattcagagaatataaagcacaagaataacataatggaaaaggagtatcttgatgtgctgagtgatgatactggcccccaagtgtcttgttatattacagcaccatcatatgttctacaacaactagaatgccggataataaatcacatgagttctttaatagtgggtgataatgaagagttagttagcaacgtcataactattgaatgctcagataaggaaaagagagttccatttccaataggcattgcaattccatttactgcacgttacagaggaaattacagagatatcatggtgaaagtgtgtgacataaaccttcaatcaagttacctaaacccaaattcactagaaggaatgaagggaggttataaggggacctgtgcttcagtaaaagattacaaattgggtatcttttctgttgtgtcttgtttaaagaaagagtcgttcacagtaacaaagaaaggcctcgctcttaagtcaagcatggattcccgaatatccttaaattaccctccaggagtttttaactctccagtgctggtgcagttaaagatccaaccagttgacccagc

SEQ ID NO: 264799 - DNA, 466 bp, Homo Sapiens
acacctcctagcagtgcacctccctgcattgaggactccatgactgacaccaccgtaatagcgtcttccagagttacagtatcacgaaacatcaggcgagcatgagcttctgctaatcgtatcaagctttccaacagccgaatggtggtccgggcagcgttccgggaatcactctgcctttgcatctggtagtaccggagaagaacctgattgcccacatcagacagtgtgggctgcagattccttatgaggcagaaataggttttcatcttttccatgctccagagcttctctgatttgcttgggtaacctttattttctaagataaaggaggaaatgatacgatcccagtcttcattcttggtatcaagcaaaacaaggatcaggtcaaatcgacttaagagtgggctgccgagggcaatgttcacagacacggactcctgggggtcgtactggcctttggggt

SEQ ID NO: 264800 - DNA, 778 bp, Homo Sapiens
agatttataaacttcaaaaatggtagtgattcaaatgtatgtctttcaatagactgtattttattgcaggataaatctaaatactggagggatagcaggccttcaaatgaatccttatgtaattcagtcaaataattttcactgagaattagtttctcggtccaactgtatgctttccatacatttccatcaatgtaagaaatatagtttccttggaaatttaagatggtgaagatgccatagtaggtgtagggctctggcacaggcacttggcggagcctctgctttgggctgagatcaacacatgacagagtctcatctccgcaggtgcagagctcacatatgttggtgcttgtggaggccttctgttcctctggtgcagtttcagactgcaccaatgaatcctgcgaagattctaactttgtaggtggacctgtgacttcagtcaggcttcgatgcagagtctgaacctggtctggatgaggagctctagtcttctccagggctgtggaatgtccaatctctgtagtatgttctggagttatggcaagccccgggtctagaggctgagctgaggtttcctccgtggttggagatggtttaacctctgtagtacgctctgtagatatgctaagctccaggtccagaggttgaactgtggcttcagtcatgtgtgaaagctgagcctgacccttgtctgaaggtgaacacctcatggtgttctggaggaggagctgtagtcgtcccggctgttaaatattcaacctctgttgtggat

SEQ ID NO: 264801 - DNA, 346 bp, Homo Sapiens
gcgggtgggctgtgcggctccaccgctctcggctgccccccttaagggtgccagcaaggccagggggagccccttctcttccttcagtcccaagtcccgctggagagctggtgatgggggtccctgggcagggtctggcatggccgaggggccccgtgccttcagcggctgcgcgtccaacagcgaggccgaggccttgaggttgcagacgggcagcacctgcctcctggctctcctcacactgacgcccgccacgcagaggtcggacccgctgaatgggggcggctcaaccaccggctgcctccacaggagctcgaagttgccgatgtcacagctgcggtccacg

SEQ ID NO: 264802 - DNA, 442 bp, Homo Sapiens
ccacttgatcatattccgctggctcagacagagcagggttgacaaaataccagaaactgggcttgtgtctttctggattgacattgacataatctgtgacttcctttatgttctcatagtccagcggggagtcattttttagttctccagggtcagaaaagacgacttgtgtgtaatccacatcctctgtggcctggcaggcaggaggcgaactgcaggagctatccaagctatctgagggtgtgtcgctgtcatgcctgtaaagggaatcagacattgggatgtctctctctgtctgagtctccttcatctctttgacagcaggtggatgatggtggccagagctgggcctgggaacctggagactggccgctttcagtatctgttcactcttgtgggccatgtgcctgctgagcaggtagttgatggcggtgaggaagca

SEQ ID NO: 264803 - DNA, 713 bp, Homo Sapiens
aacctctgagactccctcatccctccctggccccacagccactgcgtctgtcctgctgccattcaccctcaattttaccatcacccttctgcagtatgaggaggacatgcatcgccctggctccaggaagttcaacaccacggagagggtccttcagggtctgcagaggcccttgttcaagaacaccagtgtcagctctctgtactctggttgcagactgaccttgctcaggcctgaaaaggatggggcagccaccagagtggatgctatctgcacccaccgccctgaccccaaaagccatggactggacagagagcggctgtactggaagctgagccagctgacccacggcatcactgagctgggcccctacaccctggacaggcacagtctctatgtcaatggtttcacccatcagagctctgtgacgaccaccagaactcctgagacctccacaatgcacctggcaacctcgagaactccagcctccctgtctggacccacgaccgccagccctctcctggtgctattcacaatcaacttcaccatcactaacctgcggtatgaggagaacatgcatcaccctggctccagaaagtttaacaccacggagagagtccttcagggtctgctcaggcctgtgttcaagaacaccagtgttggcactctgtactctggctgcagactgaccttgctcaggcccaagaaggatg

SEQ ID NO: 264804 - DNA, 421 bp, Homo Sapiens
ttttgtggcttcctggtatgagaggcaacagttgattctgttggcgtcttctgtttcttccttcattacgtgcttttcttttaatttgggcctcttgaaaagaatcaaagtaggagctctccaggagttgggaacaggttaatctgtcatctggattcatcttcagacaccccttcatgaagttcagagccacaggatgaacatctgagaacttttcctcaagagtttccatgtcttctggctcaggtatactgatgccatggaaaaacccgttacttttaaagattgattgatgtcttgggattaattttcctagtgttctgattatcagataaagttggtccacatctgattttccaggccacagtggctggcctgtcaggagctctgcacaaaaccccgtctctactagtgttctgat

SEQ ID NO: 264805 - DNA, 755 bp, Homo Sapiens
atccttgtatctacagagtatccgtgaggaaggaattaaaaggtggaaaagcttatgcaaagctgggctttgcagatctaaacctggcagagtttgctggatcaggaaataccactcgccgctgtttactggaaggctatgataccaaaaatacaagacaggataattccattcttaaagttttgatcagtatgcaactgatgtctggtgacccatgttttaaaacgcctccctccacttcaatgtctataccaattgctggtgaatctgaatctttgcaagaagatagaaaaggtggagagactctcaaagtgcatcttggaatagcagatctttcagcaaagagtgcctctgttccagacgaacttggtgcctgtggacattctagaacatcaagctatgcaagtcagcagtcaaaagtatcagggtatagcacgtgtcactcccggtcatctagtttctctgagctctgccacaggagaaatacctcagtgggaagcacatcaacaggagttgaaagtattctagagccatgtgatgaaattgagcagaaaatcgctgagccaaatcttgatacagctgataaagaagatacagcttcagaaaaactcagcagatgcccagtgaaacaagattctgtagaatctcagctgaagcgagttgatgacaccagggtggatgcagatgacattgtagagaaaatattacaaagtcaagacttcagcctagattccagtgcggaagaagaaggacta

SEQ ID NO: 264806 - DNA, 970 bp, Homo Sapiens
  misc_feature (735)..(735): n is a, c, g, or t
  misc_feature (920)..(920): n is a, c, g, or t
  misc_feature (937)..(937): n is a, c, g, or t
  misc_feature (950)..(950): n is a, c, g, or t
  misc_feature (957)..(957): n is a, c, g, or t
ttgaagctcacagttaggcacagaggaaaagaataaagctatactgttgctctcctgtcttctggctgaccacacagttcatgtattaagatacttctttaactttctcaggaatgtttctcttagatccagtgagaataagatggatagcagcaatcttgcagtaatatttgcaccaaatcttcttcagacaagtgaaggacatgaaaagatgtcttctaacgcagaaaagaagggcgtgtaccagactttatcctggaaaagataccagccatgttgggtattgatggtctctgtgctactccatcactggaaggctttgaagaaggtgaatatgaaactcctggtgaatataagagaaagagaagacaacgtgtaggagattttcttagtggagcactaaataaatttaaacctaacagaacaccttctattacacctcaacaagaaagaattgataatgaaacaaccaccatcggttaaatttgatccaaaaatattgcatctaccagcattttcagtggataagttataatttctgaaagaccaagattggaatgactttttgtaacaagtgtgctcgcagatcgactccagtgagaagagctcggggacctcctgagccaagtttaatctcctttgctatttgtgcatggtggctggtcaccaggaggtggccaccaggcttctcctttccccgctgttctaattgctaatcccagtatttgcggatantccaaactgggatattgttctcaggcgctgtggtctcaccttccactggggcaacaatgggccatttccagcatgggacggcgcagtgttggcctgcatgcctgactgccacacaccctccagaatcaggtgtctgaaaagtaagtcctgtgttcgtttggggccttaatgggcaggccaaaggngcaagtgcagtcaccgnctcttgacaatangagctgnggtagtgggtttc

SEQ ID NO: 264807 - DNA, 687 bp, Homo Sapiens
cagctgcagaaagccctgggctgaggcggaagaaggccagcgccgggtggagggcgcgctcattaacgcccgggcagcacgtgccctgcagaaggaggcgctcctcaggctggccttggagcacctggcgagcgtgcgtgcggcaggccaggagaagcggcggctgcaggagcaactggaaacgctgcgccaggctcttgaagagagcaggaggcacagccaaggtctggccaagcaggggaagctgctggaagaacagctcaccaacttggagcacaggtgccagaaggctgaggtatcgctcgagcccctgccacagatggaccaagagacactgaagagggacgaggatgtggagaggctggaggctgagaaggagaagctggaccagtctaaaaacagcctgcaccaggaggcggacggagccctgaggcaaaatcagcacctgcaggcccacacgacacacatggagcaggcccacacccagcggctccgggaccagaatgctcagcacctgcgggacctggccacagaggcaacaacagtctctgaacagcctgcaccaggaggtggacggagccctgaggcaaactcagcagctgcaggcccagatgacacagatggagcacgcccacacccagcggctccaggacctgacagctcagcaccagcgggacctggccacag

SEQ ID NO: 264808 - DNA, 601 bp, Homo Sapiens
gagggtccagggctggggagggaactgagggtgcagccgtggaggctcagcctctgctgggagccaggccagaggaggagaaagaggaggaagaactggggacccctgctcagcggcctgagcccatggacggcagcgggccatacttctgcttgcccctctgtcactgcaagccatgcatgcatgtgtggagttgctgggaggaccacacctggcgcctgcagagcagcaactgcgtgcgcaaagtggccgagaggctggaccaggggctgcaggaggttgagagactgcagcgcaagccggggcctggcgcctgtgcacagctcaagcaggcactggaagtgctggtggctgggagcagacagttttgccacggtgccgagcgcaggacgatgacccggcccaatgccctggatcgatgccgagggaaactcctggtgcacagcctgaaccttttggctaagcaaggactgcgacttctacgcagcctgagacggcgcaatgtgcaaaagaaggtggcactggccaagaagctcctggcaaaactgcgctttctggctgaggagccccagccacccctccccgacgtgctggtctggat

SEQ ID NO: 264809 - DNA, 554 bp, Homo Sapiens
gcttcctgacggagcccgtcctgcacggggacctcatggccttcatccagcccaaggtgggcctcccgcagcccgcggtgcaccgctgcgccgcccagctggcctccgccctggagtacatccacgcccgcggcctggtgtaccgggacctgaagccggagaacgtcctggtgtgcgacccggcctgccggcgcttcaagctgaccgacttcggccacacgaggcctcgcgggacgctgctgcgcctggccgggccgcccatcccctacacggcccccgagctctgcgcgcccccgccgctccccgagggcctgcccattcagcccgccctggacgcctgggcgctgggcgtcctgctcttctgcctcctcacgggctacttcccctgggaccggcccctggccgaggccgaccccttctacgaggacttcctcatctggcaggcgtcgggccagccccgggaccgccctcagccctggttcggcctggccgccgcggccgacgcgcttctgcgggggctgctggaccctcacccccgaaggaggagcgctgtg

SEQ ID NO: 264810 - DNA, 676 bp, Homo Sapiens
gagtcatcccctggctcgagccatatccagctgtggcactttatcctggagctgctgcagaacgttgagtaccagggcgtcatagcctggcagggggactacggggaattcgtcatcaaagaccccgatgaggtggcccggctgtggggtattcgcaaatgcaagccccacatgaattacgacaagctgagccgggccctgcgttactactacaacaagcggattctccacaagaccaaagggaagaggttcacctacaagttcaacttcagcaaagtcgtgcttgtcaattacccgctgctggacatggcggcagctgccactggctccccactcttgctgacccccagtccctttgggggggccccagggccagaagctcctcccctcacccctgagaccctgcaaaccctgttctctgccccacgcctgggagagccaggggcccggacacacctgttcacctccgagacagataaattgcgtctggacagccctttcccattcctgggctctggtgccaccagctattccaagccccctggcatgctgggtccttatggccgcgccttccctgagtacccctgaaacggtaacccgtacctcacgggccccttcccacaagctgcctccctctctctaccccccgcatttctaccccaaccctctggccagt

SEQ ID NO: 264811 - DNA, 576 bp, Homo Sapiens
  misc_feature (50)..(50): n is a, c, g, or t
  misc_feature (54)..(54): n is a, c, g, or t
  misc_feature (58)..(58): n is a, c, g, or t
  misc_feature (80)..(81): n is a, c, g, or t
  misc_feature (429)..(429): n is a, c, g, or t
cctggctcaaggcagatccagctgtggcactttatcctggagctgctgcngaangagnagtaccagggcgtcattgcctnncagggggactacggggaattcgtcatcaaagaccctgatgaggtggcccggctgtggggcgttcgcaagtgcaagccccagatgaattacgacaagctgagccgggccctgcgctattactataacaaagcgcattctgcacaagaccaaggggaaacggttcaacctacaagttcaatttcaacaaactggtgctggtcaattacccattcattgatgtggggttggctgggggtgcagtgccccagagtgccccgccagtgccgtcgggtggtagccacttccgcttccctccctcaacgccctccgaggtgctgtcccccaccgaggacccccgctcaccgaccnagcctgctcttcatcttcatcttccctcttctcggctgtggtggcccgccgcctgggccgaggctcagtcagtgactgtagtgatggcacgtcagagctggaggaaccgctgggagaggatccccacgccgagccctatgcagtctc

SEQ ID NO: 264812 - DNA, 389 bp, Homo Sapiens
tctttcgggaggatgacggcggccttggagagccccagaatgtcacaagcgtccatgaattccttcagactctggaagctcgaaacattctgcctatggaacagcagcaggctcttgtagttttgggtggcaccccccaggcggaggtagaccaaccagtagctgtagtcagtggaaagcacgtggaaggccttcacccctttcactccctcctgtcctcccctcgggcccgccgcgtatccacaggcgtaaacaaacaccggcatcttcccgtctttcctcagaatcacctaaggggactggcaccccttcaacccatgtggggtctccaaggtctgcaggcagcttcctcccaacacccacccatgtggggtcccaggggctgcagg

SEQ ID NO: 264813 - DNA, 888 bp, Homo Sapiens
tcttcacaacaaggtggtcagccccggcttccggaaaaacggcatcgtggtctcccgtatcggcgtcaagatgtacgcgaccatcccggagctgggagtccaggtcatgttctccggcctcatcttctccgtggaggtgcccttcagcaagtttgccaacaacaccgagggccagtgcggcacttgcaccaacgacaggaaggatgagtgccgcacgcctagggggacggtggtcgcttcctgctccgagatgtccggcctctggaacgtgagcatccctgaccagccagcctgccaccggcctcacccgacgcccaccacggtcgggcccaccacagttgggtctaccacggtcgggcccaccacagttgggtctaccaccgtcgggcccaccacaccgcctgctccgtgcctgccatcacccatctgccacctgattctgagcaaggtctttgagccgtgccacactgtgatccccccactgctgttctatgagggctgcgtctttgaccggtgccacatgacggacctggatgtggtgtgctccagcctggagctgtacgcggcactctgtgcgtcccacgacatctgcatcgattggagaggccggaccggccacatgtgcccattcacctgcccagccgacaaggtgtaccagccctgcggcccgagcaacccctcctactgctacgggaatgacagcgccagcctcggggctctgccggaggccggccccatcaccgaaggctgcttctgtccggagggcatgaccctcttcagcaccagtgcccaagtctgcgtgcccacgggctgccccaggtgtctggggccccacggagagccggtgaaggtgggccacaccgtcggcatggactgccaggagtgcac

SEQ ID NO: 264814 - DNA, 710 bp, Homo Sapiens
cacacagatcagatgcggtaaacacttgaaagacagacgctccctaagcccagtgctcctgcttgcagctagaggtgggttaatcacattcttggtcccatcttcataaccctccagtggttcctcctctccctcaacccttgaatggctcctgtataaagagccactgagccaggggctgcggacaaccacctcagggtcaccttcaggaagcccattccagccagtccccactcaactgcattctcggggcagaggctgcaaactgaggctcctctctgggaccttcacagcatatagcacgatgctacacacagctcaaagaacattcaccaaacaaaggaaatcaacgcaccatctcatcctcacacatgccccaacaaagggttcacatgaaagcagaccaactgtcaacaagtagaggcctaaacataagcaccgtttcctcccggcctcctgtgggaaaaccgtgacagtgacgatactgatggacacacatcagaattcccgacagcagaactgcccttacctggtagtaggtcttaatgtttctcaccaagatggtcaaattctgaatgcgaaggttcacatcattgttgacgtgcttattgatgcgttaatttgtgggcctgggatctatttgcagcataatttggttcaaaaagatgccgtccactaaatccatgtacatagtcaggttgtcctggctg

SEQ ID NO: 264815 - DNA, 228 bp, Homo Sapiens
ggagcagaatctgctgtcgcccatacccctaagcttgagaagagacagagctgcacgaaaaggcaatgctgctcagttactgttgccccaaaatgttctctccaaccaggcgctggagcagaatctgctgttgtccatacccctaaggctcccagggaccttaaccaggctggacctaaaaagcaatgtcatccagaatattgctgaacgggagatcaaggacctcaa

SEQ ID NO: 264816 - DNA, 748 bp, Homo Sapiens
cttctcgccgcggtgcgtgcgctggtgatcgatgaggttggacctttggctgagggccttgccgcactctgggcacgcgtagggccgctcgccgctgtgcacgcgcgcgtgctccaggagcgcgaagctgcggcggaacagtttgccgcagtcgccgcaggcgaagggccgctcgccgctgtggatgacctggtgcttgatgaggttggagctgcgcgtgaaggtcttgctgcactcggggcaggcgtagggcttctagccgctgtggatgcgctggtgctccaggagcgcgaagctgcggcgaaacagcttgccgcactcggggcacgcgtaaggcttctcgccactgtggatgatgcggtgcttgatgaggttggagctgcggctgaaggccttcccacactgctggcacaggtaccgcttctccgcgcctttggggcccggcggccccgcagccgaactctgccccaagccctgggcacctctatggagcacagacgacctcgccgcctgcccctccttgccaccttctggatcggccccggggagtggtcgtccagaatgcttctgcgttgaagtcgacgtcttgctctgtgttctgtcacctatgtgcaatcactgcggtggcccaggttctggggatgtctgctacccagggtccttcccctcgttccaattgggagatcaggtgaggcttggagaaggaaaatcccagtgacaccaaatggctatagttctccagcatcac

SEQ ID NO: 264817 - DNA, 378 bp, Homo Sapiens
ccgtccctgggaaaggttggtctcctcctgctgcatcagatggatgatttcattgtacatacggtgaggagcatccaaaccccagatgaaatccacgtgagcccattcaggaatattcttatggtagatgaggttggtcacctcagagagcagcattttcacgtcttctggatttgaaagccagtcctgacctcctgtccacattgctgtagggaccgtcatatctctgactctgtaccttacaggagttggctgattgcatttttccagatttttggtctcactcccccagtcaaatgcccggagttcaccagaattcactgcctggctccagtgtagaatattttgcacagatgttccagcaagagtgtgggcagc

SEQ ID NO: 264818 - DNA, 650 bp, Homo Sapiens
ggcactggggcactgcggctgcggggaccccaggcccccctcgtagatgttggggggtgcgtcagggtggccggggcgtccttgggcctggctcactgcatctgcagaggagacagcgggagggtggtggtcagccccccacagcagttgtgctcttgccaggtactccaggacctcttgggcctgagcccagaagggctaggctgggggagggcacccttgtctgggtccatgctggaactggaagcactgcttcccaggctgtccctgggcaatcgggcttccagaagggctgaacagaggctgttacgtgggcccagagtgccctgtggcaggtccagggcccaggctgtgccctcaggctgtggcaggcagcccccagccataagccggcccagccagtggctctcacactggccagtgggtggagggtggctctccaggtagaggcccaggccccggaggtggcgcagccggaagttcttgggcttgcttccctgggcactggggcactgcggctgcggggaccccaggcccccctcgtagatgttggggggtgcgtcagggtggccggggcgtccttgggcctggctcactgcatcttctcttatgtgcagctcagaaaatgcacagaccaaaacaaagattca

SEQ ID NO: 264819 - DNA, 356 bp, Homo Sapiens
ttgccagttctggcttggtggaaaaggctacaaaccctattgtagtgccaagtgaatgtccaatgaaatacaatttctcctgaccagttttatttacaatgaagtctattactcctgggagatcatatttggccatttcatcaaaactaaaggcccagaatttctcatctgtctctgagagtgttttgtgtcttcttgaccaagtgtttccccgactgtctccaatgcatacatcataacctgcatctgctagaaggaatccaaggcttccattggcataattctcaagccagtaggcattgtctgcaaacagggcatgctgcatatacacaactggccggggacctgtgctccta

SEQ ID NO: 264820 - DNA, 225 bp, Homo Sapiens
cagcatgggccgaagcgctggccacgcagatccaaaacgactcttcatactgttcttccaccaccacaaactgggaagagcttctcctgaaagttggcgattcgttccgtcaggtcgtgaaatttcaccgcagccacgaagctggcgatggctaacgccacgacgcagcctgccaggacattccataggctgatgcccccaggaccgctgactgcccggtacggg

SEQ ID NO: 264821 - DNA, 729 bp, Homo Sapiens
tacccccatagggctcagaaacgtccctggcttctcaagttctggggtcatagtgcatcagctgaggccaggtattggccagtcccaccacagccaccgctcacgtacaactggccctccaaaatcgcagctgcgtgggcaaaacatggtgctggaagtgcaggtgctggcctccagacattgagctcagggttgtaggtctccacagagtccagggcaacatcattgtgtcttccacccagggcataaagttttccatccagtgccaccaaggagaaaaggcttcgagcctgggacaaaggagccatctcctcccagtcctcttgactgggctcccacctgagagttgaagccagggtgttggagtgactgtagaaatcttgtcccccacacacatagagttcacttcctgccaggcttgcagccccatgccggaagcgtccgggggcaggcagggcaggaagctgcccccactcaacagttcgtaccagtcccacgccacagcggaaggcccgggcccaccacactgctcgggatggttgtcttagggccatgtctggtctgagcccatccccgccaatcactaccagtgcccggtcaggctccctccgtctctcttggcctggaacatcagcctctaccatcagctggtgcaacagatctggggtcaggggtggaagtagcccggctgcccgcaccctccgcaactccctggtgaacatgcggcca

SEQ ID NO: 264822 - DNA, 252 bp, Homo Sapiens
gagtcggcgtcagaccctgtgctaagggagtagccctggtgaaggatccccatgtcggagcagtagccgcttcggtgtggggagggctcacagatgcccagttcggcaagggtgaagttggttccttgtctaggaaactcatctgactcccggtggatgaggtctgtgactcggtttccatagtgcatcctgctgtcatggtcataggccttcagagtctcactggagctgtaggatttctgtgtgggcacg

SEQ ID NO: 264823 - DNA, 894 bp, Homo Sapiens
ctctatgaacaaacattcccacccagatattctacatcccatccacaatccctttgagtttagaggacaagacaataaagggatgtatcagtgttgagccttacatactgggagaatttgtaaaattgtcaaataacacgaaagtggtgaaaacagaatacaaagccacagaatatggcttggcctatggccatttttcttatgagttttctaatcatagagatgttgtggtcgatttacaaggttgggtaaccggtaatggaaaaggactcatctacctcacagatccccagattcactccgttgatcagaaagttttcactaccaattttggaaagagaggaattttttacttctttaataaccagcatgtggaatgtaatgaaatctgccatcgtctttctttgactagaccttcaatggagaaaccatgcacatagaatacggcacagtctggtcctttggggcttgggcagggccgtgacacaggttctggccaatgatttgcaagaggaattgatcagtatcactttaagtcctgcatttaattggcagcacaagatcctgcagagcctctttccctctgccacagttatcaagaatgggtcaggagaccgctgcttctgggcataagtcctgcaaggaaagcaacatggaaaacagccccaactcacccatgagggatgaaaagcactcttgagaaaggcatgtgttgtttaagccattgagattttagagctttttgtcactatctgtcaagactgatactactggggcttttcctattgatttgggagttctttacatattaaaaaaatgtgagcctttgtgatacgaattcaatttgttttcctgtcttttgacatttgactttgcataaaagtttatctgtgc

SEQ ID NO: 264824 - DNA, 622 bp, Homo Sapiens
cgctggtacttctgcagcaaggtactgtatgtgtcctcactgcaggtgtcgtgtgtggtggttcctagcctgatctgtgacaccagtgagggcaagttgctctgaagaagtggctccgaaaagaccagattttcaaacaggtgtttattatgcagttcccacgtcacttggaactttttcaagtgttcattttccagagtgccaaggaaggtgctgatggagcgtgcggcctggcagagggcgccgtactcctcaagcaggagggagatgaactggtgcgcttgcggcgggccctgcaggccagatggtgccttcaccttggccgcagccgacagctgccggagcaggcggaccttcatctccagcacatactctcgagcttgctgttccagacgctggtacagctggtaggggtccctctcgcagagcctatccacgagctccttcactccctccttgtcaggcaccacagactggtcctgggcatctgccaccggggttcctgcctggcgagggatgcagcgcaccgcgtagcgcacatctgaccagtagttatggagctgctgaggttcccgggccgcctctgccgaaaattctctgcgctcactgcaggcctcgcacg

SEQ ID NO: 264825 - DNA, 563 bp, Homo Sapiens
gtacagaaagcccttctccagagaggggctgtcaaagctcgcaatcgtggttgttcagctctttactcaagcgcaggctccagctagacccccgggtcttcttgagggagtttcgcagaaactgaatcagcttgtcttcccaggctttctgatcccaagtgaactcagtatgttcttccaggtaccggaccagtagcgcaatctccagctcccacatgtcggccatggagggtgcgatgctctggctcagggtcctcaagaggttgagcatggctatcccacgaccctcccccttgtaaggtgatgacatcagcaccaggagacgggccagcagcttctgaggtgcaggcaggtccacttgcctgcacttaccagccacgaagaataagctcttgttattcgagtcatgtgattagaaccccagcacatacacggattgcagggttggcttgggatgggctccccaggaacctcaccttccaggtaccggaccagtagcgcaatctccagctcccacatgtcggccatggagggagcgatgctctggatcagggtcctcaaga

SEQ ID NO: 264826 - DNA, 608 bp, Homo Sapiens
gggtaggagcttcggtactgtgggctggagaagttgccccgcatggccatgtatacctcctggcattctcctgagaagtagtaggtcttgaagccacggcctctgatgttgaagtcggacttgaagaccacctacagttcgtggcccagagacacgattgtggggtccctggtgctgccacagtagtggtgcccacgggtggggccaggccccccaagcacagccaggtagtcataggtgcactcttcattgccctccacctggaagtccacgaacaccagcttgacgtgggcagggccagcggcccggatcacccagtggcactccatgctgttcgggtagttgttggggtactcaggactggtgaggacccctgacaggccagtcttgacgccgccacacacatctttctggtagcccgcagaaaagccatggctggccacatgcttgtccgagtggaagatgacagacatgacatgccaggaggaggtgaagggcggcgggggcaccttgccgcagaacctccccagcaggttgcccttgtctggtgaggccccattgtagatctccagaaagtcgaagctgcaggtgtcgtggtactctaggtc

SEQ ID NO: 264827 - DNA, 724 bp, Homo Sapiens
tcctgagcagcggctgaatgggctctacctgtgacccaccgttcctctcctggtaggcagcaacaatatgggtgaggtcgtagtcataggcaaaggggctggtcccgttggtcacagatacttgggacacgggaggaggatgtggtgtgagcacctgggagactcctcctcttttccttctacccttctgcccaccttcctgagcagctgctgaatgggctctacctgtgactcaccgttcctctcctggtaggcagcaacaatatagggtgaggtcgtagtcataggcaaaggggctggtcccgttgatcacggatatgttgtatcgggcatctaggccaccacagctcagcggctgcttctgctgcagcctcaggtctccgttcacgtataactgggatcccgggacaggaaaggaggactgaagaaacgccatgctctgcatcacgagggtcgccatcctgtgtaatcgataggagaaagtcaggatgagctgcacaccgagaacgtgctcagaggactgcaggaatctaggccaccacagctcagcggctgcttctgctgcagcctcaggtctccgttcacgtataattgggatcccgggacaggaaaggaggactggagaaacgccatgttctgcatcacgagggtcgccatcctgtgtaatcgatagagagaaagtcaggatgagctgcacaccgagaacatgctccgtggactgcag

SEQ ID NO: 264828 - DNA, 610 bp, Homo Sapiens
  misc_feature (514)..(514): n is a, c, g, or t
agtcaagtgtagactctcgccaaagccgctctgggcaaggtggcatctccacagaaagcgactgtgcttttgattcagattatactagcgaggaacctcctgatcgaagacagtcaagtgtagactctcgccaaagccgctctgggcaaggtggcatctccacagaaagcgactgtgcttttgagccagactatgctatcccgccacttccagagagagaaggtatgcagcacattcggattatggagggcatgtctcgatctcttccatcctccccctgactcacacatcagtctatcagtgttcggctccagcctgtgaagaagttaactggtgatgctgaacaggagcttggcccccctccatctgtaaatgaggaagcaaacacactcaagacacgtcagggtttcctcctgtggagagaaagtcacagaagttcagccaggtgaccaatacagcatggaagtacaggatgaaaatcagacctcagcatacacccagcggagaaatactnctgggtttcctccttggagagaaggtcacagaagttcagccaggtgaccaatacagcagggaggtacaggatgaaaatcagacctcatcaatcacc

SEQ ID NO: 264829 - DNA, 291 bp, Homo Sapiens
  misc_feature (66)..(96): n is a, c, g, or t
agggcatggatccgcacggcctccttccacggaacaccacccaggtcagatgggggcaggcgaggnnnnnnnnnnnnnnnnnnnnnnnnnnnnnnnatctcagactcggaactactgctggcgacgtcctcctcggcgcccgtgtccagcacgctgctcaggttgtgctcggcctgagtctcctccgaaacctcctgcagtgcctcagcctgcctcagggacaggcggtagttctccagctcgatccgctctggggtgcccctcagtcgcttggcgatgctgggctcctcc

SEQ ID NO: 264830 - DNA, 750 bp, Homo Sapiens
agcggagctgctgaacttcgcctcggaggacgacgagggggagctggaacacgagtactacaaggccagagtgtatgaagtggtcacagccacgggggatgttcgcggtgcagggacggatgccaatgtcttcatcacgctttttggagagaatgggctctctcccaagctccagctcaccagcaagagcaagtctgcctttgagaagggcaacgtcgatgtgttccgggtgagaaccaacaatgtgggactcatctataaagtcaggattgagcatgacaacacgggcttgaatgccagctggtacctggaccatgtgattgtgaccgacatgaagaggcctcatctacgttactacttcaactgcaacaactggctgagcaaggtggaaggtgaccgccagtggtgccgtgacctgctggccagcttcaaccccatggacatgcccagaggtaataagtatgaagtcaaggtatacactggtgatgtaattggtgaagggacagatgctaatgacttcatcaatatttttggagagtatggagacacaggggagcgtaggctagaaaatgaaaaggacaactttgaaaagggagctgaagacaggttcatcctggatgccccggatttggggcagctgatgaagataaatgttggccacaacaataaggggggctctgcaggttggttcctgtcccgagatagtcattgaagatattgggaacaaaagaggatatgacttccccctta

SEQ ID NO: 264831 - DNA, 788 bp, Homo Sapiens
agcatgcgatatttctccccagtgtgtctttgctgtattcttggcattcctctatccaagagccatacctatagtagagaaaatactgcgtgtcctcaggggcatctgtgccaacaagccaggtgcagtgaagggaaacttggtatgaccttaaacgtgaataattgtcttctgtagtgtttgtggtgcaagttaaattcacaattgaggttccaggagaccctggtggggcatgaagttcagcagaagcccagctgctggccagtagtgagtggtcgttctgcaggatggtccgcacacttgctgaaaagcctttgtggaggatggttacacatttgctttcagtgattctggtttcatagtcatcttcttttggagcgtttattttcacttgatattctagattaacattcctttgctcttgatcaggatttggtttccattgtaaaagaacttgagccaaaccagtaactttaatggtgaaattgacaggtgggagaagtgaaatcttttcatcaggaagtaagtcagcttgcagtatctcagtggcccccaaaaggatgagtaatacatgcgccacgatgatcatatcctgtctacagacgatcctcttgttccgaccagtactcaacagaagatggcgaggaccgtgtctgtcgtgtctatgctcgtggctgcaaccccagcatctagcatagcgtcaggcacaggaccaatgctcaatgtgcctggcccgaacagtccgtcctaccctggggtaggttttattaacagtctcgttttgcaaa

SEQ ID NO: 264832 - DNA, 662 bp, Homo Sapiens
gaagtggaaatcacctggccatccctaaaccagctcacctcaggaactggaaaaccactaatgtgagcctcaaaggttgcggtactaccctccagtaccacaacgctttgtaacggctgcgtaaacgtcggtgcttgagttgtcatctttctaggcactttcagtatctccaggtaccacttagaagtcatctttgaaccaagtgacacatggtcctgatcttctggacactgtgcagtgtggaagcagatctcatccttcctggaggttgacaggtctaacactttctaggaacgttagaattttgcttcataccacagtagctacattcattcctgcagcacagcagatgaccaactggtaaatcatccactccaggatgtgatgtcagaggccaaaaggacttcttttattttattttgatcatgttattattggagaaagcccagctcagcaatcctgtaattacaatttccttctattttttctctcttgatctgcgattcctttgagtatattcagggacgtggctgcccagtgcaggtgctgacaatacacatggcaggaccatctacactgaacgggatgggtcaggaggcttcccaggcgaagttgaatctcagcagaactgtcacgtggagtatgacattggaagagagagc

SEQ ID NO: 264833 - DNA, 671 bp, Homo Sapiens
ttcgggatctagctccacgtagcgctcagggattgacaccttctctggtttggacagctctctgctgatgtccaagtcatagtcttgaggctccaggtccaactcagtgacaggcatggcctgcactttcaaccagccattctcctccttgtcctttttttccccttgcacgacccgttccagcaactgcaggtcaaagtcctgctcacgcttccatgagccaagatctccagggagcggccggctgaggtagcgagatgagggcaggcccgtcctctccccttggcccagtgtcctcttgcgctctcggaccagggccttctggtgtcgcttcatgcgctccagctgctcctctgcactcatcttgcctcgctggtgatcccctgagtacaggcgctccaaggcactcttaggtctagggaaggtcgccttgctgctttcggcattgagacccctccggagtgtgacgtagggagcaatggtggacgactgctggagccttgacgtggaccctgagagccctctgcctggcagcgtctggtacctgctctcagggcccacaagtcctagggagggctgggccatgtccccgctgagggtcgccagctcaggctcactgacatacgaccgcagctccaccctggaatcccaatacacacactgccccagct

SEQ ID NO: 264834 - DNA, 790 bp, Homo Sapiens
gcgatttgtgtttccagtacagtttgggtggcccaatgatagagcatctggtggaattccaacctcactttccaaacttatgtaaagaaaactccacagaaaaagccagaagtcattggatctgtgtcactttctttgcgagctgtcattcaatcagagctgctttctttcagtgatcagcttccagtgcaacaagaaaatggtcagtctccatttggccccctcaaggtaaccatggagcttattacagataacaaagatttcactggtatcaatactaagttaagtggcaacacccattataccccactttgtgctcctacaagtccaaataaggcactaccagaacttaaccaagatatgacctgtaccaaaaatccacaaaacttaaaccaaattcatgaggaaactgcaaagaaagcacagaacttggtgctccccaaccgaaagtcaccaagccctgtagcaccacatccttcaaccttcgtagctacgccagcctcccataatttagtcaatcagacaaatgggacaacaaaagagagtgctttgctgttgcatgtgctgttgatggtgccagatgggaaagattttattagtggagaatctgagaaacaatcaccatgcaatgtttatttaaattgtaaactcttcagcacagaggaagtcaccagatctgtcatcgcatggggcacaacacaaccggtctttaacttttctcaggtgattcctgtatcgctgtcttccaaatacctggaaaggcttaagaacaatgtgatggtaatgaaac

SEQ ID NO: 264835 - DNA, 1328 bp, Homo Sapiens
acatggtattcatcttctgtctcactggagtacgagggacccctcgtttctttttgctgtcttcttgatgagctatagtggattcttcacgagattttctctggtagagctcggcaaggcaatgtattaattcgccttcagttttggaagactcttccttattagctgaggcagcctgtagtaacccaaatgactccatcaaatcggaactggcaccactgatgttacagaaaggaaaccacttttccacaacagctggactccagggagtggtgtggccaagctcctgctgggcccactctggaacaggagaagcagcagaagcagtatctgcaagcgaatcatgagtctgattcaatatactatccacaacatctgagaaaagggaagctgtgtcccgggggctgtcagccacagctgtttggagaacatgtcgttgaaattcagcctccttggtgcggcacacagtgaggatcatagcactggcagagagtggggaaataactccagtgatggggggccggccttcaccagggtccacatcagcaaccaggtgtaactcttcagcagtcagcctgcttaccaactgctgaaataacagcctttgagttgctgtgctctcctctggacttcctagcatccagctgtcagtgcccaaagtactgctcgttgggagagaccactgggccactgagccttttagaaaaattctgactggtgtctgaaaatgtctctgatgcatggccaagggctctagggtgactgtccatgtttcttgaatctctttgcctgcttcaacagggagaaataacattccttccattcgtggaaacgaggcctcatactcaggagaattgtagagcaaacagtttaaagtggcatcagttggcagcattgaaatccacggagaaagatgaggttcacttgacagctttattccactcctgagcagcatttccccagcttgagcaaaatcccagctgaaagattcagatggcaagacagtgccacctccgtggtggagcagttcacaaacagtccagtatccaaggtggtctggggattcccacaacttagaccattcggtggtatccacccagtagaaggtgatttttcgggcgaccatgacttcccggactctcttgggcaacaacttctccatcacctgcttaggggtgggcggcaggcgctgggcctgggcctcgcacccagacacgaactgcagcagctccctctgcgagtgcggacagggggccaggaggaagacggcgtacaccaagcccccgagcgcggcctcggcctccttggcctcgctctccacgtccagc

SEQ ID NO: 264836 - DNA, 806 bp, Homo Sapiens
tttctgatcgctgccacttcaaaacaaaattaaaaaacttctcgacagggctcaatgttaacttttaatttatccagttcaggatattttgtcaattcccacttgaaaagttcctcttctttattaataaactgcactgcttcttcagattcctgaatacgtttttgtagttgtcttacatctgtcacatactgttgcatgcgctccagctctgcaaattctgtaaactcctccatgcggcgtgattctttttctatttccaaaataagtttctctctcttggccattagttcattttcttttttatgtttagcattctcaattagctcatcattttcatcaaagatgggattaattttcctaggccacatgaggacagttgcatttaaagctaagtcttcttgaggaaataggaaaacatctaaaaagtaactcatttggcgtttagattcctggatccttaaaatcaactcttcgattcctacagtccgggctttttctacataagatatcagatccatcatctcttctgttgtttcagggacttttaatgcatgttctttaattgcttcaaattcactgcaaatacattcattttcttttctatattttgaagctatgtcatttaataatatgtttgcaaaggcttttgctttatttgtcaggcctgtcttcaaatcttcacaatccaaacgcaccataggggaatgaatccactgaggcaaaagcattatttctgaggcaagactgagaaaattttctataaactctgtatattcatcagaagtatgatcttctgtctgaaa

SEQ ID NO: 264837 - DNA, 700 bp, Homo Sapiens
ggccagccgggtggtctcctctgagcaattacagggctctggtgcagggctgagccaagtgccgtgatactgacgagagacctctgcaacctcagagaggtccaccaggtttacaaatgctctggggacctcctgctgcaggtagtccagcacccccatcagctcatccacgccgcccgccgcaagcccattctgttgagcagaggggcacaggtaacactggcttgcattactgaagaacacattgatgaacttccagtcaaattgaaagtcaagttgcaggttctctttcatgtttctcaccagttcttgagcctgaatccacaagtcttcagcaccatcgtggggtatgactctctttccagtgtggcacacaggcattggaacagaaggactgaaatatctgatgatgtctgaaaggactgtcatcactcccatgcacacctgctgtggcctttcagtccagtcttgcttctccagatcgcccgtccctgggtctggagcaatttccagattgccaatggctgccacaaatttaatatcagaaggattcagagagtgaactgatttagaaggcatattcactcctaatttatttgggttgcatgggaatggagaattcttcagggtctctggccatagctgcccttccaatgtactctttctaggagaggtatggatctgaggggtcccttgcccc

SEQ ID NO: 264838 - DNA, 412 bp, Homo Sapiens
ttcctgctttcattcattggctgcttaggaggtgagcttctcttacaaggccctgtatttatcaaagaacccagcaacagcattttccctgttggttcagaacataaaaaaataactttgcattgtgaagcaagaggcaatccatcacctcattacagatggcagctgaatggaagtgatattgatatgagtatggaacatcgttataagttgaatggaggaaatcttgtggttattaatcccaacagaaattgggatacaggaacttaccaatgttttgcaacaaattcacttggaacaattgtcagcagagaagccaaacttcagtttgcctatcttgaaaattttaaaaccaaaatgaggagtacagtgtctgtgcgtgaaggccagggagttgtgctgttctgcggca

SEQ ID NO: 264839 - DNA, 482 bp, Homo Sapiens
  misc_feature (287)..(287): n is a, c, g, or t
ttgttgtaaaccctgctgccacgaagttattcttgtattgccccatctttatagaatctagccagtcaccaactgtgacaaacaaaggatattccggaacttcaccaggggactctggcattacaaggatgtcctccaccagggtgtgaagggcactgggatttcggatcagtttgacaaggaagctgacaatgtcagtaaattttggtctgtgatttctctccttctgccagcagtggagcatcagctggtgtagagatgctggacagcccatgggagctggaaantgtttcattttaattaacatcaaaatgattcatgatttgacccaaggatgtcctccaccagggtgtgaagggcactgggatttcggatcactttgtcaaggaagctgacaatgtcagtaaattttggtctgtgatttcactacttctgccagcagtggagcattttctggtgtagagatgctggacagcccatgg

SEQ ID NO: 264840 - DNA, 668 bp, Homo Sapiens
agagtgcgtttcgtagagcaggaaagcagtgagtgaaatgtcctcttcatctccaccctcccaggcgtgggtgaaaagctggccatcattcttaaagcagccgcttgttttctgttggcttgaaagccagattaaggtctgtttttgaacattttcatcaatgaatacatattttttcattctctccaatgtcttaaaagtaagagcactgagtcatatgcttcctttctgactctgctgccaaaacacactataggaaccatcagagtttttgaaagataattgcctttgataaccatgagataagagaaagaaagccttagattgaacttcctctgtcagttgctcagtagatttcagatagtccagaacataagtatcagatgctagtagggcagcattctgctctccacttccatagggcatttggagaacaaccagattctgcaaggcaagtcctagaatatcccccacaacagtgaaaaagcctctggctgacccttctactacatcgtttggcaagtccaaaactccctgcttggaggctttggcaccttctgtacagataaggaaactctgggtactgtccttttcaataccttcaggctctactaagaagctttggaccacagtgactttccagtttagcttttgctgctccattcctt

SEQ ID NO: 264841 - DNA, 513 bp, Homo Sapiens
ttcctccagccggttctccccagcactctcgtcgtcgtcctcccggaggctccgggatatgctgtcagactcagacagtcctgggaacatcgacatgtcagctacaccggattggtcatcctcttccccacggacagaaacgccttcttcctcactcagctgcccctctgtgcagatgtcgggcactgcttccctgtgccttgagtcctgtgggttggagcccatctccggctccggatggccttctctcttgtttgtgtaatgtggattagagcccatttctctttcttctgggtccccttccctgtcctcagagtcctcaaaatcagaacccatccctttgtcttctgagtcctggtgtgcacagacaccctgattatcttcttgtttcatccaggaagaaaagagcaagggaggtgaccaggaatcccttctccttgccttccaagctcctccctgggcttggtttctccgagggtctctgatgcccccttcggtggtcggcgggacggt

SEQ ID NO: 264842 - DNA, 429 bp, Homo Sapiens
ccacttgctgtgatatttgatgtgctgcatctggctggaactgcaaaatttgcaaaacctttctgcagatggccactctaacatttatatgtgctctgtgagatatatataccacagatagtagatctttgaaattaataacaggatctgtatttatgatttgatgggtgaggtttttaataagagaagtattaacaagtgcttcattaagaaggagtcccagtcccgagtagccaacttctctgagtcgaatatgttgtttactacgctcataaacgttcgtgcatttcaacatttgttccataatcttaaaaatgatttctcttagtctgtcagagtacttctgatttaagagcaatgcgtacagtatgtcagcatttcctggttcaaaaagcagtaagaaaagctgacctctggatggggctggag

SEQ ID NO: 264843 - DNA, 499 bp, Homo Sapiens
tttttccggcccctcaacgaagcggagatcctccgcggggacaaattcatccccaaatttaaaggcgatgagaccgtggtgatcgggcaagggaagccatatgccttcaacagaccgctacctcccaacacgacccaagagcaggtttacaatgcatgtgcgaagcaaattgtcaaagatgtccttgaaggttataacgggacgatttttgcgtatgggcagacttcatcaggaaaaacccacaccatggaggggaagctgcatgacccccagctcatggggatcatcccacgaattgcccatgatatctttgaccatatctactccatggatgagaacctggagtttcacataaaggtttcctattttgagatctacttggacaaaataagggacttacttgatgtatccaagaccaacttggctgttcatgaagataaaaacagagtcccgtatgtaaaggggtgcactgagcggtttgtgtcgagacaagaaaaaa

SEQ ID NO: 264844 - DNA, 594 bp, Homo Sapiens
ctccaaatgcccaagtaaaggcaaacacaaaaagcttttgaataatttttgttaatttatcaggatttttctctggataccatgtattttcatccctcttttctatatccttgaatgtgacagactctctttgggaatttgcctccttagatgacgtgtcattcaaatcatcactttgttcaaatcctccatttttacccatgaagtcaaagaaagcatcaagaattctgcagagggttatgacgactgttatgtcctccataggatatggctgaaatttctgacgattccttataaattgtagtccgtctgtgacactatttttaatcatgaattcaagacaatccactcctgattgacttataattttagaagttttcagaagccatgacttaacataaggttcccatcccagatcaacaggatccatatagaccatggcacatcggctgacagtagcaggactggcctgagagagattgtccacttcaaaaatcactcttaatttattagttaaagctattctcacactgtttgctaggcacaatgttctagtatcatctagcacagagttcagattttctacccaaaagg

SEQ ID NO: 264845 - DNA, 794 bp, Homo Sapiens
taggggacagcggtcacagagtggaccaaatttgtggatgttctgaatctccttcaacggatgcagaaaagaatgggcaaggctagtctagccgagaattgtcttgaggccaaatacgggagcgatctctatgaggaccaatgcccacgtgcaactgcatacagtgtgtggttacacatttctctcttgcatgcagcattcccttatgataaacaaggcatgacaagtgggagaaagctttcccacaatcagagcatccatacggtctctcccctgtatgagttctccgatgtctgttgagacatgatttatctctgaaagctttcccacagtcactgcatgtatagggtttctctcctgtgtgaattctctggtggttaatgagacctgacttgtgtgagcaggattttccacactcagtacatacaaagggtgtctttcctgtgtgaaatctctgatgggatattaaacatgtcttctggctgaagcctttcccacattcattgcatacatagggtttctctccagtgtgagtacgtcgatgaataaggaggttgcccttttggatgaagccttttccacattcattgcatatatagggtttttctccagtatgaattcgctgatgtacaatgagatttcccttctgaatgaagccttttccacaatcacggcatatatatgacttctctcctgtgtgagctttctgatgtgcattgagctgtgatttccagcggaataatttgtcacattcagtgcattcatagggtttctctcctgtatgagttctctgg

SEQ ID NO: 264846 - DNA, 656 bp, Homo Sapiens
ttctataggcctgacaacatcctcggtcaagctgaacaccacagccatcctgcgagaaggggccttgtaccagcggcaggtggagcaggagctgcagagggttgataagctcgtggatggggctggggacttctctgagttcttcgagtggcagaagaagatgcaggcgaaggaccgggaggagcagctggctgcaagcgagtgccggcggttgcaagggaagattagccatgaggaggccgtcctagcccggcagagcctcatgcaggagaacaagcagagggtggagcagcagaaggagcagatggccaagctgatgctgcagcgtgcagagagacggctccgggaggacaggtccaggaaggagctggtggagcaggtgatagaggggcagaagaacgccaaggcggcccagacgaagctcgcgaagggccgacagcagacagttcacgaggcgatcgaggagagcagggggctgctgcagcgcagggcgcacgcagcccaagaggagcagcggcgccgttgtgaactcatctcccagctgcgcgcactcgagacacagcccaagcgcaagggcaagctcgtggacctgacccagatccccggctacggcctggaaggagagatgtccatagtggagctgcgagagcggctgg

SEQ ID NO: 264847 - DNA, 423 bp, Homo Sapiens
cgagctcctgctgcacgaagcacttgtagacggccggctggaaaacctgcagctgcctgccgccggtggaggggtccagaaaggtggtgaagtcctggccggagagctggctctcccacgtcaggggggtgtcgttggcacgccagttgacgggcctgtacatggatcctaagggacagtcgagccacacaaattctgtcttctcatcgagcctgaagttgtcaaaaatgacgtaatccacccttaactgtgtgttattggtgcactggacgtggcaggcttccacctgcagctcaggccgcaagcggctagaccacaccagcacctctcccagatagagccagcagggcatggcttcctccagaggctcctcaatgtagcggtaccccaggcgtttacgctcgcccggctcctcacagcggg

SEQ ID NO: 264848 - DNA, 730 bp, Homo Sapiens
acagatggaataatgttctgtccttccggtatccccagagctggttccccttcatgccatgacagtcatagagtgtaacggggctgttgtgtgagatcgcatcaaagcagaatttccgggtatgcagtggctcaccgggtcgaatatcttctctccatccaaaggtaaaaagctgttcatgagaccatgttctttcagaaccatccttgacacagatgtccagcctcagctctgttccggtggctccatgcttgctgtccacacagagatttgctgccacatttcggatctccccccaggcagcaggcgggggctccactggagggtagtatttaggcacgtcccaggccacagcagccatgaaccatttgaagtccttgcacttgagctgcttgcgcagctccttctgggcagagatgtcccccgtggagagatgcctgtactccggccgccgctggtaaatgtactcggcaaattcatccatccaggtctcagctacccgcttcaggtttcttgccaggcttgtcccagatggaactttgtatggaacgtacttcctgtagatatgaccaactctagaacatggaacatcaaacatttctcctccacacatacaaaccttaaaagagatttcatactgttctcctccccagatttctaaacctggatcatagccacccaattcccaaaaccatttccgatccacagcaaagagacctccagccataac

SEQ ID NO: 264849 - DNA, 275 bp, Homo Sapiens
tcatccagggccagcgccagcctctgctccttcacatggtacagttccttctgtgtccggagggcatcctgtgccacagagaggtagtccttgagcatcctctcctgttcccccctccattgttttcttggatcttctatctgcgtggttttgttgatgtgatcgatgtagtagacaacaatctgagggtcaaaccctgcttcccatccccacggcagctcatccccaacacaatcagcaaatgacaagggcttcgttaacctgtcccgggggtc

SEQ ID NO: 264850 - DNA, 402 bp, Homo Sapiens
ctctgcagagtgccccatgcagcttgaggacttcccgatggatccttaaacttgccctctgaaatttggcagctatgcgtaccctacttctgaagtcgtttacgtctggaccaacggctccaccaagtcggtggtggtggcggaagatggctccagactgaaccagtaccacctgatggggcagacggtgggcactgagaacatcagcaccagcacaggcgaatacacaatcatgacagctcacttccacctgaaaaggaagattggctacattgtcatccagacctaccttccctgcataatgaccgtgatcttatcacaggtgtccttttggctgaaccgggaatcagtccaagccaggacagtttttggggtcaccacggtgctgaccatgacgaccct

SEQ ID NO: 264851 - DNA, 642 bp, Homo Sapiens
acacgctgagggacatcttggttgcttcccatttggcgtgattcatgactggccttttttgtgtatctgtaattaagagattacacatcagaagtaatcttcacacagtatttattagccaaacatgataagtaatggctttctgcagaaaaacacactggactccagaaatcctcacgtgtggttctaatgcctccctcctctgcattctccccttgcacagactaggcacacagtgaaatattttttgaaatttaaatgttataaaaatgatacccacttcagaacagttttccaacatggaatatgtccagtgagaagtaaaaactcacttccacaccagccctattcttactctcaagaggtgactacactttgtcatttttttaaggtggacaggaagtaggatttattggtgggcattaggagggggcagcacagtagaagccctcatgagtgcagggaccaccgcttgtccggagggtcacgattgggggtatacttgaccccacagttattgggataagctgcttctcagccatcatgtcttcaaaaacatccacactgaacttggtaaagtcccacttctctgagaagtggatattctggcggccagggaacttaaagttggccttgcatagg

SEQ ID NO: 264852 - DNA, 308 bp, Homo Sapiens
aatcgagggaaagaatccttggccatgagacaatagattaatttctgagcctcatcaaagcatttgagtgttggttcagcaatattctttgagatgaggtctctggtaccgaagtcaatgttaatctctttaggtgcatcagcttcaatgaattcagaataaatcatcttggctttggaagcaattttgtctgcatttttcgttttcttaatctcataacaggcaagccagaactcaacattttcttcactaaactctgattttagaaatattcgaaaagcatctagaccagcttggttggctaaaag

SEQ ID NO: 264853 - DNA, 854 bp, Homo Sapiens
  misc_feature (88)..(200): n is a, c, g, or t
gttgcattaaataaaattcagaagcattaaaacttttttatggctaatacatctttcaaattcatactggtctctttctaactccaannnnnnnnnnnnnnnnnnnnnnnnnnnnnnnnnnnnnnnnnnnnnnnnnnnnnnnnnnnnnnnnnnnnnnnnnnnnnnnnnnnnnnnnnnnnnnnnnnnnnnnnnnnnnnnnntttttcctccaggacctggagtcactaaaattggctgaacgggttctggcgctgccaactattcatcttggtccatgaaatttaaaagattttcagttgttgctccacctacagtaatttttaaaactgcagatagatgtggtattatctgaggagactgtgatagggcacatgaaggtccacttcgttgtgtatatgtaatatgcatgggattcacattcattgaaggctttgattgactatacattccccttgaagaacttcaaggtgttacagtgcctgcatagagagaacgccaattacatggggaaagttgattactgatgggtgaaggacagctattaattactgttccaggtctttgagaaggttaaaccataatttctgtctttttcatgaatcctctgtgcaagctagatgttgtgtattggatatatgctactgaatgatttcactgtttctgacagccaggaggtcctgattaggtgacacaaagatgtgactacttgggtggcccaactgggaaggctgtacttgatgatgaggaaagctgaagggtgaagaacattgagacctaggtggtgactggtaagctgactgagaaatctgctgtttgggagaatactgagatgtctggtagttctgttgatgtgg

SEQ ID NO: 264854 - DNA, 716 bp, Homo Sapiens
cctgaggtgcatcctctccaaggtaaaaatccaacatgattgtagtgtggaatcagcttgtaataaataaggttagcaatttgaggaagtaaattttcaacatccttgggatcagccacaatgtcctgtccaccattccatattgctgttggaacttccatcttagtaatgttgtataaaggaggtgtaagctgatggaagtgcatcatgttctgatcagagattccccaatcaaaagcttggagctgaccaaaattaacagcctgagcccagtgcagcatattctgaacagatgttcccgcaggattgtgtgacaaataaacatccaagcgactcatatttaagttttccggatcaaatccactcagagtaaataggaagttgctgcaaatacgacggaatagctttcgattgcacactttggtggcaatgaattggtcaaacaatgtatgagggtggaacattttgtcaccaaacaacaccttaactactcgcctggaaagggttgttagttttttcataggacttagggggtatttaactatgacaactggagccagtgcaaaaaatatcttaatctttttagccagttctgggtttgtagaaaatgctataaaagctatggtggtgccttgtgagtggcccacgtagtaaaatggcttctgtccagttttctctatgataaaattgattgtggctggaaggtcatatttagc

SEQ ID NO: 264855 - DNA, 537 bp, Homo Sapiens
actcggccagggtggccccgtttccggcctctgatggagttagagtagctgagggagccaaggtgctcctgctggatagtgccacagtggccatagggaatgttgaagatcaggcagcgtcccatgactttggggcgacatagctcatcatttaagtggatgtcccaggaggagtagcccagcctccggagatagcctcggtcaatgacggcttggaagaggtgaggcaagcaggatagctgggctcctaaaacccagcgagtgggtggaaatccagagatctcagtgtaaacacagaagcgggtccccatcacagcctgttctttctcccctgcttggctgttctctcagctcccccatcagcatccttagcctcagacgctagagggaagactttacaattgtccttaggtacaagagagtcagccagacctgcgcacaccacgcccgcatcctcgcggtgctggcagttgtgccgggcccagcccgacgtgggtgcagcgctccagcgcgttctcgtggccggtgcagcgcacg

SEQ ID NO: 264856 - DNA, 649 bp, Homo Sapiens
tacctttgcacccgctgacggacacagggccattgcccccgcacctcctctgccaggacccccatctccctgcagcagcaggtgagctccagctcatccccacggcccaactcgggacttcagggaagctgtctctgagctccggtggctctcccagcacgaggctccctcctcagggcccttgatgcggctgaacttacatccccccacaccccggacgaggaggcacaatttgctggaggagccgggaacccggtagacacagcagaggcctctgtgggttccctgaagggccagatttggggtccagctggcccagagggaaagtggccagcaggtgtgcaggtgcaacctgctgaatcggaatctcaggcgaacagtgtgcaggctggagtccacgatggaatctggggggcagcccatcctctgctccaagctgcaggtcctgggacctgctggtgcctgtggaactggctcaggatctggccctgggaggaaagggaggctcttggtcatcccaaggtgccatggtgtgagggtcgcccccccctccacccctgcagcctgcccatgcaagcccagggcttctccagatacagagagctcacctggctccgggcagggcgtgccagcaggtgtgcaggtgcaa

SEQ ID NO: 264857 - DNA, 481 bp, Homo Sapiens
ggatgctttctctgggctgatgctttgatgtggggtatttatttgaaactgatttcttgtctctggcttcagattctcatctatcactggatgctttctctgggttagcaaaggtcaggaagacctgttccagtgtgatctgactgacagaatagtcttctaaatcgaattgctctttagcttcctccaaaatgccaaacacctggaaatgttgttgcaacataacatttaaaatcctctaatttatcttcagtcttgaccttgaccttcaggatgtaaatgttgccaaacttgctcttgagatgctgagggctgcccaagcaagtgaacttcccttgcaccatgatggctagactggtacagagggcgtcacattcctccatactgtgggaggtcataacgatggcttttccactttcacgtgtctttgtcaccatgttccagagcaggcgtctggctactgggtccatgccagttgatg

SEQ ID NO: 264858 - DNA, 441 bp, Homo Sapiens
cgaagaacagaactctccaggattcaaatccaaacaaggaagacaacaggaacaccagggagatgagaaacaaggtgagtgagacatacatcacccatccttgcagcaatgggtttgcgaccggggtggtggctaccaggatccagacccagaacccaaatatctgaacagagcatctggaagcccctcatgggtgggagaggggctgctgcaggggccgggatcacacgctgaggttctgagacagttgctgcctgagtaatgacgccctaggaaccgtgaaggatatgtcaaaaagatgcatggtctcaggtctgtgtggccagggctccaggccatggctgggaggtgtgggtttggggtggggcagacaagttgctgagaagcaaagaggtgtgccaggggtgggtacccggtggcaggtttttctgcatagctggg

SEQ ID NO: 264859 - DNA, 1018 bp, Homo Sapiens
  misc_feature (66)..(102): n is a, c, g, or t
catatataggggctagccgtagaagcgaacgacgagcgccaggagttagtgagcagaggaagcggnnnnnnnnnnnnnnnnnnnnnnnnnnnnnnnnnnnnnagtcgacggtagcggacatatgcccgggaattcggccattacggtccggggacccacaacaatataatgtctttacggagacttacatgggatcagtcaagagttcccctacaaatctgaaatggattctatgccttatacacagaactttatttcctgtaatcagcctgtattaccacaacattccaaatgtacagagctggactaccctatggggagttttgaaccatccccataccccactacttctagtttagaagattttgtcacttgtttacaacttcctgaaaaccaaaagcatggattaaatccacagtcagccataataactcctcagacatgttatgctggggccgtgtcgatgtatcagtgccagccagaacctcagcacacccacgtgggtcagatgcagtacaatccagtactgccaggccaacaggcatttttaaacaagtttcagaatggagttttaaatggaaacatatccagctgaattaaataacataaataacacctcagactaccacacatcttcagccacttcatcatccgtcagaagccagaccttttcctggatttgacattccagtggatttcctgtaaaatttccaaaggcccaaatttttgagccctgcgtgttgggaatcaacattaagttttggtgaagagattatgcgaaccacataaacactggtcactggttggaacgttcagggcaagtttcacatgggagggcccttggtggcctggcttatttcacaaatattccccaagacaaaacttaattttgggtctcgaacagcggcggtgtacaaggctctcccacacctatcctatccggccgatctaaaggggggggcccgcagtagacgcaaattccaaactgggcggccaatcacacctctttcggaaaacg

SEQ ID NO: 264860 - DNA, 381 bp, Homo Sapiens
ggaggcaggcactgaggacggggagaacttcgggtgaaatgcatccctcctgtgactggattggagacacaagaacagaaacatcctgatctctctactctactgtgcaggcttatgtactcataaaatggcagttatggacctatcctccccatgggctttaactaaacaggactctgcctgtttccatctgagaaatgctgaagaggaaaggatgattgctgtatttctgacaacctggttacaggaaccaatgactttcaaagatgtagctgtggagttcactcaggaggagtggatgatgctggattctgctcaaagaagtctgtacagagatgtgatgttggaaaactatagaaatctcacctccgtggaatatca

SEQ ID NO: 264861 - DNA, 949 bp, Homo Sapiens
  misc_feature (84)..(119): n is a, c, g, or t
  misc_feature (157)..(290): n is a, c, g, or t
  misc_feature (293)..(304): n is a, c, g, or t
  misc_feature (505)..(750): n is a, c, g, or t
aagatattatgtcatatagggcgctagctcgccgcagcgaacgaccgagcgcagcgaaggtctagtgagcgaggaagcggccgnnnnnnnnnnnnnnnnnnnnnnnnnnnnnnnnnnnnagtcgacggtaccggacatatgcccgggaattcggccnnnnnnnnnnnnnnnnnnnnnnnnnnnnnnnnnnnnnnnnnnnnnnnnnnnnnnnnnnnnnnnnnnnnnnnnnnnnnnnnnnnnnnnnnnnnnnnnnnnnnnnnnnnnnnnnnnnnnnnnnnnnnnnnnnnnnnagnnnnnnnnnnnngtttatcccaagttgagaaggcaaggttagtaacctaggtaacctatgttcttggctggacaatcaaagaatgtcaagttagggcactcggatacaacccaattttattcctaaactaccgtgggctaattataccctacgggtatgattgtatacagctctctgtatcttccaatcttacatgtcacaatttatgatagnnnnnnnnnnnnnnnnnnnnnnnnnnnnnnnnnnnnnnnnnnnnnnnnnnnnnnnnnnnnnnnnnnnnnnnnnnnnnnnnnnnnnnnnnnnnnnnnnnnnnnnnnnnnnnnnnnnnnnnnnnnnnnnnnnnnnnnnnnnnnnnnnnnnnnnnnnnnnnnnnnnnnnnnnnnnnnnnnnnnnnnnnnnnnnnnnnnnnnnnnnnnnnnnnnnnnnnnnnnnnnnnnnnnnnnnnnnnnnnnnnnnnntggcctccaacctgggtgacaagagggagaatccatgtcacgaaacagcaacaacaacacttgtgcggcgcccggcctcagagaagttttacacaccaatgtttgcggcgcgccacgaacggcacgggataggcggccgggaacctgcgcacacggtgggttcccccaaaaaacgcggggacaccgggttggaacatcg

SEQ ID NO: 264862 - DNA, 1013 bp, Homo Sapiens
  misc_feature (39)..(39): n is a, c, g, or t
  misc_feature (82)..(117): n is a, c, g, or t
  misc_feature (167)..(202): n is a, c, g, or t
  misc_feature (244)..(244): n is a, c, g, or t
  misc_feature (264)..(264): n is a, c, g, or t
  misc_feature (297)..(297): n is a, c, g, or t
  misc_feature (473)..(473): n is a, c, g, or t
  misc_feature (513)..(571): n is a, c, g, or t
  misc_feature (721)..(721): n is a, c, g, or t
caagatgatagatcatataggggctcccgcgttaatagncgaacgaccgagcgcagcgaagtagtgagcgaggaagcggcgnnnnnnnnnnnnnnnnnnnnnnnnnnnnnnnnnnnnagtcgacggtaccggacatatgcccgggaattcggccattacggccgggnnnnnnnnnnnnnnnnnnnnnnnnnnnnnnnnnnnntgggttcatgccattctccttcctcagcctcctgacacattntgttctttagacctgttttngtatctatcagtagtgaacgaaggtgcctgtgntgccatcccctcaccagcactagattctttttttctcctgtcattgccaggttcttagacaattactgatatgccattttagtttttcactttggttattagcaagtttgaaagttacatgataaaaagtatcttttctcttttgaattgcttattctttagcctgttattctgtntgggagtttaacctatttctggttaatttataagagcaannnnnnnnnnnnnnnnnnnnnnnnnnnnnnnnnnnnnnnnnnnnnnnnnnnnnnnnnnnagaattaatgatatagaaatctgtgacacaaaataactctcctataatcccactttaaccactgttacaaatttggtgcatattcctgaaagatccttatatagtgaggaatttttaccattgcttatcaaatatgttgtaaatatattncctaacttttaattttacccttaacattttttctattattttaatagttaatacatgtacctaatacaattcaaaatataaaagattatgcaatataaagtaaatttttaaaaatttaggttgactttatcattatacgaaaaatctaggaacaaaacaaggaaggaaaaagaaatcattctcaaatcaccattcagaaacaggcattttgggccaggcgtgggggctcgcactggtaattcagcactttgggaggcaaggtgcaggagtcactcggatctacgagtcaaga

SEQ ID NO: 264863 - DNA, 1014 bp, Homo Sapiens
  misc_feature (50)..(297): n is a, c, g, or t
  misc_feature (436)..(436): n is a, c, g, or t
  misc_feature (779)..(896): n is a, c, g, or t
agtcgacggtaccggacatatgcccgggaattcggccattacggccgggnnnnnnnnnnnnnnnnnnnnnnnnnnnnnnnnnnnnnnnnnnnnnnnnnnnnnnnnnnnnnnnnnnnnnnnnnnnnnnnnnnnnnnnnnnnnnnnnnnnnnnnnnnnnnnnnnnnnnnnnnnnnnnnnnnnnnnnnnnnnnnnnnnnnnnnnnnnnnnnnnnnnnnnnnnnnnnnnnnnnnnnnnnnnnnnnnnnnnnnnnnnnnnnnnnnnnnnnnnnnnnnnnnnnnnnnnnnnnnnnnnnnnnnntaataataaaaactggcccacaaacttcctggagaattgaccgtgggctctcctgagtgaataggagctacttccctgctttcgttgcctgaggttttagaggtggggaagcccccatgatagggaaaacagccaccanggaggccgaacagctgatacgggatcaaggcccggggtacatcaaagggcttttccttcctctcaggctaaattaccatcacgtcagtagctccatcacttgcataagcggagggtaaggttactcaagcccagccatcgatccctttcaggctgaacctgtgtcctcatcatccaaagtccccatgcttgcatacgtctcccaccttcagttggagcactgactttcatcgttggcaagggcaatggggagttctctttgggctctgatttggtgaattgcttcaatacatggttaactctctgaaccccatccccatttccgagtcttaggaagaactgtnnnnnnnnnnnnnnnnnnnnnnnnnnnnnnnnnnnnnnnnnnnnnnnnnnnnnnnnnnnnnnnnnnnnnnnnnnnnnnnnnnnnnnnnnnnnnnnnnnnnnnnnnnnnnnnnnnnnnngtctgtactaaatccaaaattagcgggatggggggccgctgaagccagtacaggaggagaggaagaaatggttgaaccaggagggagtgctgagccaaatggacggacacaaccgggg

SEQ ID NO: 264864 - DNA, 846 bp, Homo Sapiens
  misc_feature (50)..(127): n is a, c, g, or t
  misc_feature (725)..(725): n is a, c, g, or t
agtcgacggtaccggacatatgcccgggaattcggccattacggccgggnnnnnnnnnnnnnnnnnnnnnnnnnnnnnnnnnnnnnnnnnnnnnnnnnnnnnnnnnnnnnnnnnnnnnnnnnnnnnnctgtagcaaataatttttaagcattctcaagatgtatgatgttgggtttaacatcatatgttcacagtgttttaaataagaaataatctgtctttagtatacaggatggttctttgtttgcctgaaaagtataagaatacaatttacttttcccaaactctttttccttattttttccttccaaataacctttaattatttaatccccatactgattaaaatatgtctgtccaaagggatctactactatttgcttttaaaaaagtgttccctatttatttaggaaaaagtgaagcaagcaactgaatttatatgtaaaaataacatttagacctgtggatcaaagattattttcaaaaatgagatatcaatttggtatcagtaaaaagtgtcttttctcttagtatataaataaataaaatgcaaattaagagtgtaagcagttgtgaatcattacaagcagtctgggataactaactcctagggataaccatttctatcctgttccaaagtcctattttatagtttgaaaagcactttgcacacaggtcttgtatataaaagtaaagatgtaattataggatatagtgttcctgcnttgtgtaataagaacctcatttaaacttgacagctatggtatttgaggtaatgatcacttgctttgcgtgttattgtaaacgtaggttaaaatacaaggttaatcaaaagaaaaagaagag

SEQ ID NO: 264865 - DNA, 1408 bp, Homo Sapiens
  misc_feature (89)..(129): n is a, c, g, or t
  misc_feature (1287)..(1322): n is a, c, g, or t
agtctggaaatggttgtccctcaaattaactgaagcagacacaccccctgccagatcttgttaaaatatagattctccatgaactggannnnnnnnnnnnnnnnnnnnnnnnnnnnnnnnnnnnnnnnntgggcagggcagcttccaattcttgttcaggggccacattccaaaaggcctctctgaaatggtagaaattctctgaggacctgattaaggctaggccctaattgggcatcctccaggatccattcccaagctcccaattccacaagaccagtagagctggttttattttggtctaccagtgacaaggaacagtgacagtcaattgctaattggcatgaatcatgcagtttgaagctttcttgaactgtctcctgggaggtgtttgtctcttctctcaatctagagcaaccctctgaacatttccaacactgtccaaaaataagtaataataacaaaaaaggaaattgccataagaagattagcaacaattacccatttttcagtacaaatcaaaacagcaacaaaattcaggcctcactgtttaaaagtaaagataaatacctctttgggtgtaatttctatgacagtccagcaacatcaatttaacaccttttacatctcaacctttgtttaaaattattttgctctgggaatctgaaatttcaggataaattagcaaatctggtgaaaaagcaaatggccatttttatttttagtgtttttgtttctgtttcatgtaggggttctgtctgagcagacagctaagagcaaaagaagtagggtcaggcacaggtagggtgactcaggtgagttggcccagttcctgggaggagaaaactaggaagaatggggaataagtggggcttgcttcataaatgtgagagggctaggaagaagaataaattcacacaagatagtcttacactgtcacatgacaagtgggagtttgtagagagagagagaccaggagagtctgtgcaaagtggaatactggagacaatacaggtaagaacaaaggaaacataactagagaaccatgaaatgacggtagacagaaaaaagtgaaatgagtatatagatcatgcaccatagcccagcgagggtacaagcgatctagcgcacgagaatggacgtaggcgcgcacccaatatacgcgtgctacaccgtgcctggcggctccggatcaagtgaagagaacactggagacagaatcggcagttctagtcccggcctgtatatgtgccgaattcccgggcatatgtccggtaccgtcgactnnnnnnnnnnnnnnnnnnnnnnnnnnnnnnnnnnnncggccgcttcctcgctcaatactcgctgcgctcgtcgttcgctgcaaaggatgggccatatgaggtatatacgttttccccccttt

SEQ ID NO: 264866 - DNA, 1068 bp, Homo Sapiens
  misc_feature (53)..(53): n is a, c, g, or t
  misc_feature (60)..(60): n is a, c, g, or t
  misc_feature (68)..(68): n is a, c, g, or t
  misc_feature (102)..(102): n is a, c, g, or t
  misc_feature (105)..(105): n is a, c, g, or t
  misc_feature (127)..(127): n is a, c, g, or t
  misc_feature (136)..(136): n is a, c, g, or t
  misc_feature (150)..(150): n is a, c, g, or t
  misc_feature (168)..(168): n is a, c, g, or t
  misc_feature (277)..(277): n is a, c, g, or t
  misc_feature (866)..(1001): n is a, c, g, or t
ccattttgtatagactttcacatatgagggcgggctacttcgcgtgctgacangaaacgnacggatgncgctagactgatgtgctagctgtaggcagatggnaangtcgggaccgcaatctaacatntcggtgtantaggccactcacantatactatcagaataggntctagtacatgctcgagcgggctatcactgtgtcacagtattagccgctgcgggacagttctgagaccattgtatcagtgcactgggtgagtgccttatcaccgaatgnttgaattgcttgcgcgactatcaatgcccatgatacgcacgactgcatggactcagaggtcgtttggtacggacgtgtagtttcttatccgtgctttcattagtaagactaatgaacacaatgacctggccggctctacttctatacacgttgctttccgatccatacaggcccaacaagagttcagagtatgagagaatcgaaatcccaattccatattgtacctcatgtcactatcgggaaagtgtgccttgaatcagcagtagagctgcccaagatcctgtgccaggaggagcaggatgcgtataggaggatccacagccttacacatctggactcagtaaccaagatccataatggctcagtgtttaccaagaatctgtgcagtcagatgtcggcagtcagcgggcctctcctacagtggttggaggacagactggagcaaaaccaacagcatttgcaggaattacaacaagaaacaggaagagcttatgcaagaactttcttctctagaataaatcaggagacaaaatggggaacagatgaacaatatccagtgtaaagttacttaagctaaatcaatttcaannnnnnnnnnnnnnnnnnnnnnnnnnnnnnnnnnnnnnnnnnnnnnnnnnnnnnnnnnnnnnnnnnnnnnnnnnnnnnnnnnnnnnnnnnnnnnnnnnnnnnnnnnnnnnnnnnnnnnnnnnnnnnnnnnnnnnnnaacccatatacatattgctcagctgattttgaaaaagtgaaaaaagcaatttcaaggaaggaagact

SEQ ID NO: 264867 - DNA, 742 bp, Homo Sapiens
  misc_feature (488)..(579): n is a, c, g, or t
  misc_feature (627)..(662): n is a, c, g, or t
gatagattgggaaagctaaagaaactcccatacacaccttggtaccaccaatcaacttaaacatgacatcctcagagagacagtctcagatcatccaattagcaccttctattatttatttacttcctagacacttgtcgaaatctgaaaattctttattcgttggtttgtctatattgacagactgtaactggatgaaggcaagagaccttgtcttgtacatagttgtgtcctcagcacttggcagaatgtctagatggagcaggtgcttaaatacttgttgaaaaaataaaaactgcaactgcaggggtttttaaatatataaacataaaaatattactcatcaaaatttaagtaatatagctaaagctatgctcagaggaacattcaataggattacattttttcattataaaacataaaatattataaaagttgcaatttttttaagttaaaaaattcaaaactggccaggcacagtgggtcannnnnnnnnnnnnnnnnnnnnnnnnnnnnnnnnnnnnnnnnnnnnnnnnnnnnnnnnnnnnnnnnnnnnnnnnnnnnnnnnnnnnnnnnnnncggccgtaatggccgaattcccgggcatatgtccggtaccgtcgactnnnnnnnnnnnnnnnnnnnnnnnnnnnnnnnnnnnncgccgcttcctcgctcactgactcgcgcgctcgtcgttcggttcagcgagtaggcccatagtgatataaaaaggtctttt

SEQ ID NO: 264868 - DNA, 1021 bp, Homo Sapiens
  misc_feature (80)..(115): n is a, c, g, or t
  misc_feature (153)..(316): n is a, c, g, or t
  misc_feature (398)..(398): n is a, c, g, or t
actgatagatcactataggggctagctcggtacagacgaacgacgagcgcagcgaagtagtggagcgaggaagcggccgnnnnnnnnnnnnnnnnnnnnnnnnnnnnnnnnnnnnagtcgacggtaccggacatatgcccgggaattcggccnnnnnnnnnnnnnnnnnnnnnnnnnnnnnnnnnnnnnnnnnnnnnnnnnnnnnnnnnnnnnnnnnnnnnnnnnnnnnnnnnnnnnnnnnnnnnnnnnnnnnnnnnnnnnnnnnnnnnnnnnnnnnnnnnnnnnnnnnnnnnnnnnnnnnnnnnnnnnnnnnnnnggtgggtaaagggccatgagcccaaaccacttaggtggttcaccttttcatctgaaaatgctttactctgactatgtgctantgggttttatttccagaaaatatagttctccttttttctgcatgaaggatacatcggggttgccacatgctttaagcaatttaaacaagagagataagaggaaaatgcaaccaccacatctgactgtgcccaatgtagactttcctctattagatggaagtacacaacctaatatgatatatcattgtgtagtatctcagactttgtaaataaataccattattttctatatggaaattttatagaagagctatttctgtatacgtaattactcctgattttctgaaattgcttctggtagataacagacaagtcctaagcagtgttccactaagggtggttccaggcctgcctgccgtggagttgactgggggaattttacagttttgcgatcctaggatgcgtcccagacgctcagtcagaagtgctggaggtggggcctgggaagctgtatttgtaatgaactctggtgttttttgtccattaaagtgtatctttgtccatcctataagattaaaggaaagaaaaagcatctcaaatgagtgtaagttgttcttgagaaaaaaatgtatcagacttttatgatttgaatgaaatgtattatagaaaaaaataaacacttt

SEQ ID NO: 264869 - DNA, 433 bp, Homo Sapiens
  misc_feature (13)..(13): n is a, c, g, or t
  misc_feature (26)..(26): n is a, c, g, or t
  misc_feature (44)..(44): n is a, c, g, or t
  misc_feature (50)..(50): n is a, c, g, or t
  misc_feature (74)..(183): n is a, c, g, or t
  misc_feature (205)..(229): n is a, c, g, or t
ccctggcccaacntggtgaacccctntctcccactaaaaatacnaaattngcctgggtgtggtggccgcatgcnnnnnnnnnnnnnnnnnnnnnnnnnnnnnnnnnnnnnnnnnnnnnnnnnnnnnnnnnnnnnnnnnnnnnnnnnnnnnnnnnnnnnnnnnnnnnnnnnnnnnnnnnnnnnnaaaagagtgagactctgtctcnnnnnnnnnnnnnnnnnnnnnnnnncctctttgctggtatatttgaagagcttgggatggatttgactaaatctgccccgaggagggtgaacaaggtgatctcagagatcactactgctcttggagttccttctcctaaagctaaggccagcctccatcacaaatgcccataaaatctggctcgtctttgatgaacaataaatatttgttgaacaaataaataactgcc

SEQ ID NO: 264870 - DNA, 570 bp, Homo Sapiens
gcgctgactagaccctatctcttaaaagaaacaaaaaaccagttaattccccgttccccccactggactactgaaggctgtttcagaaccgcaaagctgttgggagatccgaagagtattttgtaggttatcctccatatgacatttatacagcaacacagcacttcagagataacctaagtccaaaaatgtaactggtcacagaacactgccccaagaaaatggggcagaggtttaaacttttagctcatacaactataaacttgttaagatttaacaaactacaaagtaagagtcacactgcacttcccaatccaacaactataaacgtggtaaaaagagagaactcaccacaatgaatactaagcaactaatgaactactggtaaagagtggtctatgtggcttaaaaatttaaaaacctctaaagcgtggaaaccttaccaatccagaaacagagtaaaccacatctaatgatttatctttggaggtcgaatttttttaattaaaaaatgcttaaatgtttgcatatttcataataaaatcttcttaaagatctactagtaatcat

SEQ ID NO: 264871 - DNA, 708 bp, Homo Sapiens
  misc_feature (335)..(376): n is a, c, g, or t
aaaacaaaactgcatttccttcaacataacatttaagtgcaatacggtaactgcttactcatataaaccagttacattttttaaggggagctttttgaaaacaatgcttcttgtaaatttgcaaacacagagtttgtaccagaaggaaacatttgtactattcacaccaatgaatacgctataatatacatggcaaagagatttttgcactgtcttcacatatacactgcttctttcaggggagtctgtaaactactctttctttcataaatttatgattgttcctggaggacatcctattttttaaagtccccaaatcattagctttatgacannnnnnnnnnnnnnnnnnnnnnnnnnnnnnnnnnnnnnnnnnatgcgcacatgtgcgcatgggaagggggggtgttacttactaaatgtcttcatgtacatagaaaaagaaatttcataaatttacagaaactgcattacccttgcccttgacatctgataaaagagattgttaacttttaaaaggagagagcaggattttcaagaatgctttcaactgtctatacagtcactgtagtgttcctagtaaattcaacagatgtcgtgagaatgtagttatttattaaaatctcatgtcttacataatgacagccatgaggttaaatatttacattgctttataaaagttcccctcttgctttagtgtttctgttt

SEQ ID NO: 264872 - DNA, 628 bp, Homo Sapiens
  misc_feature (41)..(76): n is a, c, g, or t
  misc_feature (120)..(172): n is a, c, g, or t
  misc_feature (174)..(184): n is a, c, g, or t
tgaccgagcgcagccgagtagatgagcgaggaagcggccgnnnnnnnnnnnnnnnnnnnnnnnnnnnnnnnnnnnnagtcgacggtaccggacatatgcccgggaattcggccattacgnnnnnnnnnnnnnnnnnnnnnnnnnnnnnnnnnnnnnnnnnnnnnnnnnnnnntnnnnnnnnnnnttggtgccgataaatattgatgaattctgctctctgctctctatggttgtcaacactgcagagttgaggcctcatatctcacctgcactgctgcaacagcttactggtcccttgctcccagccttctcctcttcagtccatcgtccacacagcactggggaaggggagccacttgaaacaaaagtcaacaactggttgtagttcataaacacagagctgtttgtgtcccctgtatctggaatgccattatgacccactacattttttctttcctacccctcttaaaactcagttcaggtagcagcttccactaggaagccttggatgaccataatcccattcaattccattttcacctctttcgcaggcagtctggggttagggaccctttctctttgctccccaaaataaactggttatctctaaaaaaacaaacaacaaacc

SEQ ID NO: 264873 - DNA, 908 bp, Homo Sapiens
ttccgagctaccattgaaggctgtgctcagctaaagcccaataactaccttctcgcctggcacacaccgttcaatgaaaaaggctcagggtttggagcggccaccaaggccatgtgcatcggcctgcggtactggaagcctgagcggctggagaccctcatcgaggtcagcgtggagtgcggccggatgacccacaaccatcccacaggcttcctgggctccctgtgcacggccctgtttgtgtcgttcgccgcacaaggaaagcccctggtccagtgggggagagacatgctgcgggcggtgcctctggcagaagagtactgcaggaagaccatccggcacacggcagaataccaggagcactggttttactttgaagctaaatggcaattttatttggaggagaggaaaatcagtaaagactcagaaaataaagccatcttccccgacaattatgatgcagaagagagggcaacatagacctacaggaacgtggagctcggaaggtcgagggggaatgacgaggccacgatgcccccatgatagcctatgacgccctccttgcagcagtgaaacagctggactgagctgtgtcacctgggccatgttacactggaggggagagcgcggccacgggcacctattgcagtgctgcctgtacgaggttgctgtacggcctggacctcgttcccaaaggctttgtaccaggacctggaggacaaggagaagcttggaggacccttgggcgactggatactctaaccggccttgtccaacagagggacagaagtcaaagccatttctttgcacttttcgcccttataaaagcgatttcacccccggagcccgtagggccctatatccagcccctgtgttacagagtgtaacctgtgaagatcacttgctac

SEQ ID NO: 264874 - DNA, 1108 bp, Homo Sapiens
ggtgatgttcacaaaggtactgaaggcccagctgtgggtgtacctacggcctgtaccccgcccagccacagtctacctgcagatcttgcgactaaaacccctaactggggaagggaccgcagggggagggggcggaggccggcgtcacatccgtatccgctcactgaagattgagctgcactcacgctcaggccattggcagagcatcgacttcaagcaagtgctacacagctggttccgccagccacagagcaactggggcatcgagatcaacgcctttgatcccagtggcacagacctggctgtcacctccctggggccgggagccgaggggctgcatccattcatggagcttcgagtcctagagaacacaaaacgttcccggcggaacctgggtctggactgcgacgagcactcaagcgagtcccgctgctgccgatatcccctcacagtggactttgaggctttcggctgggactggatcatcgcacctaagcgctacaaggccaactactgctccggccagtgcgagtacatgttcatgcaaaaatatccgcatacccatttggtgcagcaggccaatccaagaggctctgctgggccctgttgtacccccaccaagatgtccccaatcaacatgctctacttcaattgacaagcagcagattatctacggcaagatccctggcatggtggtggatcgctgtggctgctcttaaggtgggggatagaggatggctcccgaagaactaccagaagacggacaacaagagatctcggaaaacgccgggaagaatacacgatcccgccaaggcgggggcaacaacgagagagcgaagggaaataagcgcggcgccctgaggaaagcagacaggagcagagcgatgggaggaataaacgggcgggaaaggcgcaaaacaagaacgcaaccagaagaaagccgcaacaacaaggggccaacagcctcgggcacacgcaaagcaagcaagagccgcgagcacagcaaggtgcagagcgcacagatcgcgacacagacaagagcaagcacaacacgaaacagcaaggcacggcgagaagaacgacacacagcgacaaccccccccgccga

SEQ ID NO: 264875 - DNA, 441 bp, Homo Sapiens
  misc_feature (263)..(263): n is a, c, g, or t
  misc_feature (351)..(351): n is a, c, g, or t
  misc_feature (373)..(373): n is a, c, g, or t
  misc_feature (416)..(416): n is a, c, g, or t
attcggcatgagcatggagcttcgagtcctagagaacacaaaacgttcccggcggaacctggggtctggactgcgacgagactcaagcgagtcccgctgctgccgatatcccctcacagtggactttgaggctttcggctgggactggatcatcgcacctaagcgctacaaggccaactactgctccggccagtgcgagtacatgttcatggcaaaaatatccgcatacccatttgggtgcagcaggccaatccaaggaggcntctgctggggccctgtttgttaccccccaccaaggatgttccccaattcaacatggttcttacttttcaattgacaaggcaggcaganttattttacggggcaagattcntggggggattggttgggtgggattcgttttttgggcttgcttnttttaagggttggggggggatagga

SEQ ID NO: 264876 - DNA, 749 bp, Homo Sapiens
ttatccttggttaactgctctaatcgtgtgtcatattctgctggtttctgtaaatggatttcttctaattgtttctatttcctgcactgccctgtcatgccagctccgatttatattcttgtagtttaccaagttctaccatatctttttccatatgtgtcttaagatttaatacttcttcgttccaacatctttttatccttctcaagtttttcacatttctcttgtacatttctcatagataataactcctgatgaagaacttcattgtctttggccaaattgacacattctgaagacacagcttccttctcggccacaagatcattaaacttctgttttagcttcttaaacagaatatccattttcagttggtctgtatttaagtctccatggcaactgaagtcctcatttgcaaatgcatttaacatatttattgtcatttctaggcatttcttatatccagttgcctcttcttctaattcacgatttttctttcttatttggtccgcagtacagttcagtaatgatattaattcaaaaagttttctgaattcttcatgtttttcttcaggttgaatttctacttgaaataatttcttctttgaagtccatgtctcattcaaagtaatatgacaatgtgatgtaccttccagtggagactctgatattgaaaatgttttaaggtgatcgaccagttcttcttgaaattctctcacaatcacttctctttctgctttttctttttc

SEQ ID NO: 264877 - DNA, 789 bp, Homo Sapiens
ggcacgagccccctcatctcagagtaatgggaagaacctcccacatctccctggcagcagatgaggtggcttcacatgcacttccctgtctggacttcagcccgtattccgaggagtagagaggcagaagagatgtcagcaaagcaagtgatgaagcagagtggatgtccactgtcaccaagctggatggcaagctgcggcccacaaaacagccagtcaggttggctttcctggtttcagacatgctcataccattcccattttcttcagcctcttctcactgcctccagagaggtgggtgcctgggttgagagacacagctgctacgtgatagatgttgagagacagaagccaacgaaggaggtcattcatcaacaaatatgtttattggagaccgactttgtgcaaagcaatgctaatcagggttctccatggagcttccctcagctcttacctcacctccctccatttacattagggccttctcccagggtgtgctcggtgggcagtgtgggactcgggggtgtgggagttggtgagagcaggaggagaggtggggacagcaagaagccacagattggcatgaaggatcctgacctgactatccatgccatccatggcccccagactgactctgcacctggccctttgccagacagctctgtctccccatgtcctctggaacagctgggcatgggtcatggccattcatgacccttaagtgccacccttcttggaagaccccctccagaagcatactggaagccacctctggaaaagcctcatatg

SEQ ID NO: 264878 - DNA, 914 bp, Homo Sapiens
  misc_feature (878)..(878): n is a, c, g, or t
  misc_feature (891)..(891): n is a, c, g, or t
agggtgtgtctccgagccagcccagcatggacgggattttagacgccatcgcgaaggagggctgcagcggtttgctggaggaggtcttcctggacctggagcaacatctgaatgaattgatgacgaagaagtggctattagggtcaaacgctgtagacattatctgtgtcaccgtggaagactatttcaacgattttgccaaaattaaaaagccgtataagaagaggatgacggccgaggcgcaccggcgcgtggtggtggagtacctgcgggcggtcatgcagaagcgcatttccttccggagcccggaggagcgcaaggagggtgccgagaagatggttagggaggcagagcagctgcgcttcctgttccggaagctggcgtccggtttcggggaagacgtggacggatactgcgacaccatcgtggctgtggccgaagtgatcaagctgacagacccttctctgctctacctggaggtctccactctggtcagcaagtatccagacatcagggatgaccacatcggtgcgctgctggctgtgcgtggggacgccagccgtgacatgaagcagaccatcatggagaccctggagcagggcccagcacaggccagccccagctacgtgccccctcttcaaggacattgtggtgcccagcctgaacgtggccaagctgctcaagtagcctccgccggcctgccctgctcgcccctccacagcctcggtccctgcctttagaaacgcgggacagctgattgctctcctgtggccacacgtgctccttttaggctgcagcggcctgtctttagggtggccagtgtgatggcaccgggtgtgcgttcgagtgagcgttcccgagggccaagttgcggaggncccttcaatgtgntgtcaaaagggcttttgggtgca

SEQ ID NO: 264879 - DNA, 735 bp, Homo Sapiens
tgagaactcaggtagacccctacctaccctacgagtacacctgcgaggggatgctggagcggatccacgcctacatccagcaccaggacttctgcagagctccagaccctgccctaccagaggcccacgccccgcagagcccctttgtcctggcccccaatgccacccacctcgagtgggctcggaacaccagcttggctcctggggcctggccccccgcgcacgccctgcgggcctggctggccgtgcctgggagggcctgcaccgacacctgcctggaccacgggctaatctgtgagccctccttcttccccttcctgaacagccaggacgccttcctcaagctgcaggtgccctgtgacagcaccgagtcggagatgaaccacctgtacccggcgttcgcccagcctggccaggagtgctacctgcagaaggagcctctgctcttcagctgcgccggctccaacaccaagtaccgccggctctgcccctgccgcgacttccgcaagggccaggtggccttgtgccagggctgtctgtgaatccgcctctgccaccctgcctggcacccacgctggctctctcctgccgcgggagaaagcaccagcaggttctgaggccctggctgcttgtcctcctcgcaaccccccaggccggagcttccttccttagccgggaagctggcagaggagagccgtgcccgggaataggaggaggcagcatgccgagcccctg

SEQ ID NO: 264880 - DNA, 808 bp, Homo Sapiens
  misc_feature (50)..(50): n is a, c, g, or t
  misc_feature (68)..(99): n is a, c, g, or t
  misc_feature (798)..(798): n is a, c, g, or t
tagatcaggtcaaaggttccaattacgaagctaaaagaattcggcggggnctgggcgtgcttgtgggnnnnnnnnnnnnnnnnnnnnnnnnnnnnnnnnagaaagactccccatctatctcacagccagggcaccagggtgggaccccaggaccggctgctctgcggctgttagtcaagagttattttgtcgcggttgcaaacgtcttcctgccttgagctgggagcttcaccaggcttcggtgtagcggacgtccacttccttcaaattgggaagcttggccttcagatcttcgtaggtgtcagctgagagcttggtgctgttcatgtttaaactgcagagactcttcatggagctcagggccagcaggccagcgtctgtgaccggggtctcgcacaggttcagcacctggagcatggtgaggtgttccgacaggagccgaaggccagcgtctccaaactgagtggaccacaggttcagctgcttgagcgaaggcagtttgatgaggtgctcggcgcaggcactggttacattggtgaaggccaaactgaggttctccaggtttccgaaggagccggagctcagcaaacgagccaagtcagcgtctgtggacttggagggcagtgttagcctggtgggcccgcctttcctttgcagctccttcagctcccgctgccggtcacacagctgctcgtacatgcgcttccccacgtctgtgctctccagggttgagatgatctgcagttgggtgtcgttgttgtcgatgatgttgtattccagcatcaagcacaggatctnccaccatggt

SEQ ID NO: 264881 - DNA, 730 bp, Homo Sapiens
cgcaaaggagtatatttacaaggaacccaaactcacaccgctgtcggaaatttctcagagactccttaaactgtactcggataaatttggttctgaaaatgtcaaaatgatacaggattctggcaaggtcaaccctaaggatctggattctaagtatgcatacatccaggtgactcacgtcatccccttctttgacgaaaaagagttgcaagaaaggaaaacagagtttgagagatcccacaacatccgccgcttcatgtttgagatgccatttacgcagaccgggaagaggcagggcggggtggaagagcagtgcaaacggcgcaccatcctgacagccatacactgcttcccttatgtgaagaagcgcatccctgtcatgtaccagcaccacactgacctgaaccccatcgaggtggccattgacgagatgagtaagaaggtggcggagctccggcagctgtgctcctcggccgaggtggacatgatcaaactgcagctcaaactccaggcagcgtgagtgttcaggtcaatgctggcccactagcatatgcgcgagctttcttagatgatacaaacacaaagcgatatcctgacaataaagtgaagctgcttaaggaagttttcaggcaattgtggaagcttgcggtcaagccttagcggtaaacgaacgtctgattaaagaagaccagctcgagtatcaggaagaaatgaaagccaactacaggga

SEQ ID NO: 264882 - DNA, 782 bp, Homo Sapiens
ggatgaacctgatgataaagcaggctggtacggtcgcaatctcgggatatcgtcgaccacgcgtcgaaccccggatctacatgctgttcacgggccacctcttccacgaactcgtgcagcgcttcctgtgctgctccgccagctacctgaagggcagacgcctgggagagacgagtgccagcaaaaagagcaactcgtcctcctttgtcctgagccatcgcagctccagccagaggagctgctcccagccatccacggcgtgacccaccagccagggccagggctgcagcctgaggctcaggctgtgctggcataagtgctctgctcctaggtgatggcgtatgtttgtgtataaggtacctatcagtttgtatccctcccctccttggggtggcttcagtggggtggagagtggcctccatgatggaagatgataggggactcagccatcagacaacaccctggcctcctacacgtacttctaccaccctgaacccactgctgccctgggcagtgagtggcttgttttttctcctggacttgtaatttcactccagtatatttttacttcttcattctgggatattgtgaaaagcggtaaatataggatcggtgaccaattgggtcaggaagtccagtgttctggacttggggtaagcagtggggtagggacctcagatgggaagggtggtgctaagatctcctgactcaaagtgtatgtggctttaaggaacaatgctggggtacttggggaacagtgtcgaagggtagccttaagaagg

SEQ ID NO: 264883 - DNA, 822 bp, Homo Sapiens
tcgtgttctcgttacctgatgggtctcggagcgttagtcttgtcgtcccgcgccgtgtcgctgggctgtggttctacttcgtcttcgtgcttctcgttgtttcggactgttgtggtcgttttgctatgttgtggggtcagttgtgtttgcgctttcttgctcgtaacttacttactttcgagaaaactacaataccactacagaaattcacaagattcagcaattctctgtatcttgcagaaaaaagggaaaagcgcaatacgccctgcttgactgtcacttgtgttaatacacgtagccttcgttgtaggggtgggggttgcagcagcccccttccggcatgtaggccatgctctcatcaaagtgagaaagaggcactgtgtcctcctcgttgatgtgacgttccatgtctgtcttcagcagtggacgctgattatctggaaaggccatggagaaaagggcttctggatcacacacaaacttgtagacatatctctctccagccaccttttgcataattcctttctcatagtaatagcggagtgaacggctaagtttatcatagttcatagctggcctgtttttctgaatgccccaacgtcgggccacctcttcaggctcaatcagtttaaattccatgcctcgaccagtccaggcaataaaatgagaatttgaagggtcatccagaagagctaccaaaaactgccagagctgaagtgatcctcgccgttggtatgtgggtccttcccgatacattcctggctcttgtttgatgtctccatcgaatttttctgggacaacacaggtgtcatcataaaactg

SEQ ID NO: 264884 - DNA, 607 bp, Homo Sapiens
  misc_feature (43)..(55): n is a, c, g, or t
tgtacggtccggaagttacgggatatcgtcgaccacgcgtcgnnnnnnnnnnnnntcatataagaaagatgggataacctggtacacaaatgttgcccagtatgtgcgcattgccagtggacttcattttgtaaaaatggaatagaggcagtaccccaccatgtgtactgttgagccggctgttgagaaacaacttggttcagccggtggttttgcttctcctttgtgttcctgtgagtaggctgtgccgatggcagcagcgccacgtggtatctgtgcgctggcgaggagaggagcgctttccatttggaggcagtgtgagcacacgctggagtgcagcgttccaaagtccgcccgaaatggatgctgcgtccacggccatcacctgtgcgggaacacctggtttccttaagacaatttcctttttgtccttttatatttttctaaagaaaactaagatataaactaccaagtgctcttaagaataaaaataagaataagaatacaaaggagcactactcttggctacacgaaagatcttgggattcatgacactgagggcagggagaagaaagaacaccagccacgccgagccctatgcagtctc

SEQ ID NO: 264885 - DNA, 1008 bp, Homo Sapiens
ggtaccggccggaattacgggatatcgtcgacccacgcgtccggatgaagctgaggatcaacactcacaacggctgacacttaatgacgctatttatcaaatagaccttttgaaaactgatagcatgtgaatttaacagtatatgttccagagaatataaagcaaggaaaggctggtgttccagtgttttctctcaaaactctgtgtttggaacatcaaggatggattatcccaaaatggattattttctggatgtagagtctgctcacagactcttggatgttgagtcagctcaaagattcttctacagtcaaggagctcaagctcgccgggcgaccctgctcctgcctcccacattaatggcggcatcctcggaggatgatatagaccggcggaccatccggagagtgcgctccaagagcgacacgccgtacctcgcagaggccaggatctcctttaacctgggggcaggcgttttccctttttggggatatggatgaagcaagaatgggaccagcagtgccaactcttgggcgtcctcttgggctcgaaactgtgttccctggaaaaccacggctcctgaagacagccctacatacactacatcagccacatcttgctcaggccccagtacaaggtggacaattctctactcagggtatgagccctgtccaagagctaagagaaaggagggtggttggctggctttagagggggacagagttggtgagaggacattactcttggtcctatggaaggaaatgcgggtgccgtggtattcattctagagtgctgaacaagtaccacaagtacgcataaaaactcaatgcctcgaagaggactagagccaacagggtggtgggcacctttgaagcaggaaacgtgtttccactggaacggaactgggaaggcaaaaaacaaaagaccaacagagagaggacaactaagaggaagataagagaagaacacaaacgaaacagcatattccctccctcgctaactcctcgg

SEQ ID NO: 264886 - DNA, 1050 bp, Homo Sapiens
ggtacggtccggaatgctcgggatatcgtcgacccacgcgtccgcatttccaaagaaagcgtccgtgaagctagagtcctcagctgcagccttctctgaatacagtgatgatgcctcagtgggaaaaggatttagcagaaaaagtagatttgtccccagtgcttgtcatcttcaactatcttcaccaacagatgtgcttttgagttctgaggagaaaactaactcttttcatccaccagaggcaatgtgcagagacaaagaaactgttcaaactcaagagataaaagaagtctctagtgaaaaagatgcattattattaccttcattttgcaagtttcaacttcagttatcttctgatgcagataattgtcaaaattcagtcccattagcagatcaaataccactagagagtgttgttattaatgaagacatacctgttagtggtaacagttttgagttgttaggaaataaatccacagttcttgacatgtctaatgattgcatatctgtgcaagctaccacagaggaaaatgttaagcataacgaggcatccacaactgaggttgaaaataaaaatggtcccgagacattggcccttcaaatactgaagaggttaacataactatacataagagaacaatttctgcaaaagacaatgtgagccatttgtacctgtccttaaacaaacacagatctacagttcttcaagggcatcagaaagctgttttatacactacgaaaccaatcaatttccttatagctgtaatccctctaggttttggatttcaggtttactacagtcaagtataatctaggattaaagataggccgacttaaagaatcttggtcctcgcggaagccggaaacattgcatggcccttcgcatacagggtgtctcgaggcccgctttgaatggggcgcaaatagggccagcgcccttgggggattctcctgggatggaaaaaacgggagtaaattgctccgcaacagttaagcgagggcagacaaggtgacatgtgtaaaaaggacgcctctgtatgggggtcaatg

SEQ ID NO: 264887 - DNA, 831 bp, Homo Sapiens
  misc_feature (40)..(40): n is a, c, g, or t
  misc_feature (42)..(43): n is a, c, g, or t
  misc_feature (52)..(52): n is a, c, g, or t
ggaggaccaattattgactatagaaccccccttgggttcnannaaaacgcangagctgtacggcccggaattccgggatatcgtcgaccacgcgtcgggagatgccccaaaacagaggaaccacacaggcagggggtgaataatgtgaagccacctgcagttgcccctgagaaagatgaatctcctgttagcatttgtgaagatcatgaaatgaggaaccactctaaacctaccttaggcttgtgccttcacagggagattccataagacaatgtatcctaacacgtgactcaagtattttcaagtataatcctgtcttaaacgatagtcaaaaaacacatgaaaacaacgaagacgatggagtcttggggtggaacattcagtgggttccgtgtgggagaaaaacagagctgaaatcaagcacatggactggcagtcagaacactgtgcatcatatacgtgatgacaattgatacgggggccaacaggcaccagcggaatccatttggaaaagctttccgtgaagacggatcccttagggcacacaacactcatggtcgagagaaaatgtactgattttactcagtgcgagaacacctccagaaataactcaattcacgccatgcagatgcagttgtattccgcagagacgaacaagaaggattgtcacactggggcaactctgccaacgctccaaaattccggttcacacaagagtcattgcctggagagaaaacccataaatgccccgaatgtgggagagcctttttttcatcaagtcattccttatgacgacactatgacacttccacactggaggaaaaaccgatg

SEQ ID NO: 264888 - DNA, 840 bp, Homo Sapiens
ggtaccggtcaggaagtatgggatatcgtcgacccacgcgtcagggacatcttcaggctgtggaatagtgttggccgaggtcctcacgggcatccctgcaatggataacataccgaagcccggtttacctgaaggacttactcctcagtgaaattccaagcagcaccgcctcggtctgtctccaggaagacgggcgtggagaacgtgatggcaaaggagatctgccagaagtacctggagaagggcgcagggaggcttccggaggactgcgccgaggccctggccacggctgcctgcctgtgcctgcggaggcgtaacaccagcctgcaggaggtgtgtggctctgtggctgctgtggaagagcggctccgaggtcgggagacgttgctcccttggagtgggctttctgagggtacaggctcttcttccaacaccccagaggaaacagacgacgttgacaagttccagccttgatgcctcctcctccatgagtgtggcaccctgggcaggggctgccaccccacttctccccacagagaatggggaaggaaggctgcgggtcatcgtgggaagggaggctgactcctcctctgaggcctgtgttggcctggagcctcccccaaggactgttacaagaacacttcgtggcaaattgagatcaatgagcgcccaaaaaggaaactgatggagcaatatttctgctctaccaaagagggacaaactgtggacaagcattgacactcttgggcccctgattgaccgggaccacagctgaggacccgtggtctcacgtgggacagatgaccatcgcatcagaacaaggtcttgagagcagaatca

SEQ ID NO: 264889 - DNA, 1300 bp, Homo Sapiens
  misc_feature (50)..(98): n is a, c, g, or t
  misc_feature (142)..(175): n is a, c, g, or t
  misc_feature (220)..(510): n is a, c, g, or t
  misc_feature (1072)..(1072): n is a, c, g, or t
  misc_feature (1089)..(1089): n is a, c, g, or t
gctggtaacaggccggaatttcgggatatcgtcgacccacgcgtcgaacnnnnnnnnnnnnnnnnnnnnnnnnnnnnnnnnnnnnnnnnnnnnnnnnncaccgagacattggcaagaatgtttctaaccacacgctgactgnnnnnnnnnnnnnnnnnnnnnnnnnnnnnnnnnncaccaacccaaatgtccatccacagttgaagctacagtgaagtcnnnnnnnnnnnnnnnnnnnnnnnnnnnnnnnnnnnnnnnnnnnnnnnnnnnnnnnnnnnnnnnnnnnnnnnnnnnnnnnnnnnnnnnnnnnnnnnnnnnnnnnnnnnnnnnnnnnnnnnnnnnnnnnnnnnnnnnnnnnnnnnnnnnnnnnnnnnnnnnnnnnnnnnnnnnnnnnnnnnnnnnnnnnnnnnnnnnnnnnnnnnnnnnnnnnnnnnnnnnnnnnnnnnnnnnnnnnnnnnnnnnnnnnnnnnnnnnnnnnnnnnnnnnnnnnnnnnnnnnnnnnnnnnnnnnttccagactccctgttggagatgtggaaataaaaaccacctaaacaagagcagagaggccatttggtcaaagtttgcaaaaggagtcagccatgattgcttgtatttggcaggggtcaaaggcaggcagggactgtgaaatgttatagtggaaaaaaagggaaggctctgggtgtgctgtgattggagattgttggcatggggacagagcggactaactgcaggggcatctttggtttggttgggggggtatatttggcttctctggttggtctggagttggaagagggggtgtggtggctggggattgggaagaagctggcagccactaagttcagactgttctgggtccgattgctgctgaggctgtggtttggcttccttggcttcccaggctggttatgggtttctggccagagtctattgtcacatgtggcctggccattgtccagttgtatgttcagtctcttggaaggaagggtattgactctgagaggggccaccatcgctggaatgggggacacacagtacttcctccagctgcctacaccccccttagggtncagtgggcgcctgcctngttgagggtgagcccaatggcttaggagggctctgctccaagttcattgctttacttacacccacaaacattcttcgttctttaaggcctaacttaaagcccagatcctacaggaaaccttgattagacccctctctttattaagcttcctaagatcaaaccctgcttttgtgtaaatgctgacctccttgcctacattttaaaaacctag

SEQ ID NO: 264890 - DNA, 1004 bp, Homo Sapiens
aggctggtccggccggaattccgggatatcgtcgacccacgcgtccgagataatctgctgctgtcatccgtctttcagttctctaagaagataagacaatctatagataagacagctggaaagatcagaatattatttaaagacaaagatcggaatcgggatgacatagaaagcaaattaagagccgaaagtgaagtccctattgtgaaaacctcaagcatggagatttcttctatcttacaggaactgaaaagagtagaaaagcagctgcaagcaatcaatgctatgattgatcctgatggaactttggaggctctgaacaacatgggatttcccagtgctatgttgccatctccaccgaaacagaagtccagccctgtgaataaccaccacagcccgggtcagacaccaacacttggccaaccagaagctagggctcttcatcctgctgctgtttcagccgcagctgaatttgagaatgctgaatctgaggctgatttcagtatacatttcaatagattcaaccccgatggggaagaggaagatgttcacagtacaagaatgactttctcttgattgttgaaaaatcattacctgtggaatggctaggaatatcggaaagcagcatagtgttgatgtacgcaaaacaagacagcttggtcagctacaatcttggaatccctgtcttcttgaatttaatttatttaatcttttggaccgtataatggtaagtctatcccaaaacacgaaaacacaacagaaaaacaagggcgggcgccgacatgataacccgcgcagagaccgagctatcagtttacacggttttgtgtacaaaagtgggccactagagggagcagatatataaaaacaggcaggcgagtataaaacgagagagagagaccaagacgtggttgtggaaggaaccacacgcggggcacaggaaacaacagaaatgacgcaggaatacatagggtaataaacgaaccagcaattgaagataaatg

SEQ ID NO: 264891 - DNA, 970 bp, Homo Sapiens
  misc_feature (16)..(16): n is a, c, g, or t
  misc_feature (356)..(365): n is a, c, g, or t
tgaacaaccgcttggntctgaaaaaatgcaggctggtacggccggaattccgggatatcgtcgaccacgcgtcggattttgaaaaggctcagcaggatttgttcttaaaccgactcagtgtgtcatccccggttatttagaattacagttaagaaggagaaacttctataagactgtatgaacaaggtgatatcttcatagtgggctattacaggcaggaaaatgttttaactggtttacaaaatccatcaatacttgtgtcattccctgtaaaaggcaggagacatgtgattatgatcaggaaactgcacaaaattattgttttcagcccccgtgttattgtccttttgaactgnnnnnnnnnnattaaagccaaatttgtgttgtatatattcgtattccatgtgttagatggaagcatttcctatccagtgtgaataaaaagaacagttgtagtaaattattataaagccgatgatatttcatggcaggttattctaccaagctgtgcttgttggtttttcccatgactgtattgcttttataaatgtacaaatagttactgaaatgacgagacccttgtttgcacagcattaataagaaccttgataagaaccatattctgttgacagccagctcacagtttcttgcctgaagcttggtgcaccctccagtgagacacaagatctctcttttccagttgagacgaagtgtggattaatatagtcttggatattggcatggtacctcattgtactatcatcgaatggcgaatgatctgagcgtcattactaagtcaaccttgttgtggtatctttagaggaaattttgatgtgttggcagtttttgccggtacgtaaaaatgggtaagggtattggcaataactgaagttggctgggagtaaagtgtgtggcttataacaaaagattaaaatctctaagggttataaaagataatattaagtgagtt

SEQ ID NO: 264892 - DNA, 461 bp, Homo Sapiens
tcctgccttcagctgctcctggctgcagagaagtcatcatattgacctgttgctcagtaatgccctgttctgtggtcagctgctcccaagtcacctatggcccatggcagagcctcccctgcctgtcagaatcccctgtttgattcttcatttccccagtaccaatttcctgagctcctctggtatacctgatatttggtggcattcccagaaacatggggtacagacccatccctctggaagctgagcctctgatgtatgtctctgatgtatgtgcatgtagggggatggggggaagcaggatgatcacatgtgcaccacccaggagcttgcaggggcactccccaaactcaatgaatcagaatctacaccttacaactttcccaggtgatgtacaagcaaattaccgttggtaagacaatgccctggaacacttgtttaataaaaatttgttaactgat

SEQ ID NO: 264893 - DNA, 1016 bp, Homo Sapiens
  misc_feature (937)..(937): n is a, c, g, or t
  misc_feature (989)..(989): n is a, c, g, or t
ggctggtaccggtccggaatctcgggatatcgtcgacccacgcgtcgggggtctaattccagaccaactttcagaagcacttctttgtctctgttctcacctctgctgtccctctcttccctcatcccctaagagagacaaagataaaagcccacctgcatccctaagtcttactgagatcagccaccccagggagagaaactggatctacttacagccaccccctgtttccatccatatacttacttcccccaatttgcatgtgattatggaaacaagtcatgctcatgaaagcaactgtaaaataaaaggttatggagtagttcagcaacttcttcacagccagctttgtggagctggggaggacttagggcccattggagtctcttatgtgtacagcttcagggctgtccctttcagtttgattttaagcaatgcctcacttcatagcttagggggtaaggattccattcaggtaggttgtctaaaggaactaatgggacctctcagtgaattagctgaccagattttaggaaatctttttaatttctatgattttccttctcacattttgaaatggtaaaattgactggaaataatttttcttggtgccttattggttttccttgcaaacctttctcatattttctcatgaccattgccagtgaccaaggcccatgtgtgtgttgtgtgtaattgtgggcatgtacaagcttaaataacgtgccgacagcactgtttcaaagttggtattcattaggctgttgctcctggggctggagctgcgctaatcctgacaccggctgccaggagaaaacctcatgggatccacacacccaaaccttaaataacagccatcccgtggacctggcactcttccagttacaggatgggggaaccccagaggttggggaattgtaggttgttattatttttnaatggaactggttacccccagcccaaggaggtttcttttccacttttgtggntctaccaggaaggccccagggggggtt

SEQ ID NO: 264894 - DNA, 968 bp, Homo Sapiens
  misc_feature (494)..(505): n is a, c, g, or t
  misc_feature (947)..(947): n is a, c, g, or t
taaaaagcggcggtacggtccggaattcccgggatatcgtcgacccacgcgttcggaattttttatatattgttttttaagatgtatatgttaaaaaaagagaaggtcgcattatggacagacttcgtgaatgggaattgcttagaatgtgagtagttctgaattagaaaagtatgtgaaggaaaggcagctgtaaacgtattgtgccctggagagttgtacacatgtggaaatgtaatctgggcttacctgatccatttggagtggatgtcactgccgagtctgttctcacatggaaccatgtgtgtggggttgccagcctcacagatacaatcaatcctattcccctctgacataaggaactcctctggagtggcagagtcttatcacagaaggcagccaccatttcaccaaaacaaaagttcacggcattcaattcctttttcctttagctatttatatatgcagtactctcagtcatatgcagaaatacnnnnnnnnnnnnaattaatagttacaggcttgttggtccagtgggattgggtagggggagaaagataccttctaaaatggatcaatagaaccaaaataatacagcatgttctataaccacaaggaaatcaaatgatcctgtcatgattccagttagtcataactatgttagcagtgctaaatgcattttagaaatggtgacttctgtggttttcctagcatttgtctctaacaaatggtgaaataattactcatggccctctctgccattgtctttcattttttcacagtgaaattagacccctttacttcaccattctgccactgcaaattaaggtataaagaaaataggcaagagtgtccacaccagtaggacagtaaggcttctctacctgtaagtgatggaaatcataggctaatgcacttgccatgggagttttcaaggtggattgggngtccagacagtttttcacttt

SEQ ID NO: 264895 - DNA, 731 bp, Homo Sapiens
  misc_feature (567)..(593): n is a, c, g, or t
accgacctctccccttctcctgtacctttaacctttagtctgtcaagaataacccttagaccctctgaatcaagagaactgagtttgtggtgaccctgaaggtgctctttctgctacaaggaccctgcgagatagcatggacgtgcattgagaagccagcctcagaccttagcttgatgcagcttgaggccagacctacggtagcctcagcatcttgctaggaggcatggaagtgatctatcctgccaggaggcctcagagtgatctgtcctgccaggaggtgtgagagtgatctgtcctgtgaggcatttaggggctttcaggaatttagtaaaaggtggagtatgcctttccagtatcttccatcttcctttgtatacttgtccttcctcccatttcctccctttggcccgaggtaggaggatggagggaggctgctactctaccacttcctgtgtgcctctactgtggcctcaaccctggcaattatagctactcccatcccttacctgggcatgtgtgagcccttctcactggattttatacccttgtgtctgtgtacataannnnnnnnnnnnnnnnnnnnnnnnnnnaaaactttgtacaaaaagcaagcctcctccttgtggcagctgttgcccatttgtgtgtggtctttgttgtgtgtctgacaacttctcattagcccaacttatgatgtttctagggatataaaacattagtaacatcaa

SEQ ID NO: 264896 - DNA, 1021 bp, Homo Sapiens
atggtacggccggaagctcgggatatcgtcgaccacgcgtcggcacattctaaaattcaaatacggtgcttaaggtttcatggccatgcttagtctggtaagtatcctatttagggaagaagattaaactctcttttcaaaaaaacaaagtgaaatgcctggattcacattaaaacaatgggctctcgtttgctagggaatattttaacagctgtttaatcaacagtggagtctgctcctataaatatagattattgttcaataaactggctgagcttagagagaggtgcagaattcctggttctgagcaggtgcccagaaggtaccattaggtgccatgatccaggctgaaccaatatacagtggggctgaagtctgcaaggaggttgctggcttgggctgacctcactaatgccatcagcagcggtaggtaaattttttctccttgggtattacaagtttttgtctggagccaaccaagcttgccaccaacatattgagagtaatacactattgaaagttatcttggatggggagaaaaaaacatagtggttttccttgtttgcaaaaacttccttcctattctcattttttcttaattttctttaatttagtccaagttccagttcttttaggccttctctttgatttattttcccctgcatgtgagaagcagttcagaaaaaggtctatatctccacctcctagtgagttagagtgttttctcagagcacctctgggtggcaaagggaagcatgttcctgccaaggtttgctgtggattcagaagcaccaggagcaagagaccagaaggatgatctgctcctttgtaacgttgttgagggccctcttgtttccaatgagcagcttataggttactcacagtccactttctcactggacacacaaagtggctctttatctacctttgcgggagattttcactctcctgcaaatgatcgttctcacactcatattagctcatgttggaatttcccatcctgccatgtccttttaaaaaa

SEQ ID NO: 264897 - DNA, 1555 bp, Homo Sapiens
ggggctgctaacacttgaagatcatccaaacatcaaacgggtcacgccccaacgaaaagtctttcgttccctcaagtatgctgaatctgaccccacagtaccctgcaatgaaacccggtggagccagaagtggcaatcatcacgtcccctgcgaagagccagcctctccctgggctctggcttctggcatgctacgggaaggcattcgagcagacggctgctgagagccatcccgcgccaggttgcccagacactgcaggcagatgtgctctggcagatgggatatacaggtgctaatgtaagagttgctgtttttgacactgggctgagcgagaagcatccccacttcaaaaatgtgaaggagagaaccaactggaccaacgagcgaacgctggacgatgggttgggccatggcacattcgtggcaggtgtgatagccagcatgagggagtgccaaggatttgctccagatgcagaacttcacattttcagggtctttaccaataatcaggtatcttacacatcttggtttttggacgccttcaactatgccattttaaagaagatcgacgtgttaaacctcagcatcggcggcccggacttcatggatcatccgtttgttgacaaggtgtgggaattaacagctaacaatgtaatcatggtttctgctattggcaatgacggacctctttatggcactctgaataaccctgctgatcaaatggattgtgattggagtacgcggcattgactttgaagataacatcgcccgcttttcttcaaggggaatgactacctgggagctaccaggaggctacggtcgcatgaaacctgacattgtcacctatggtgctggcgtgcggggttctggcgtgaaaggggggtgccgggccctctcagggaccagtgttgcttctccagtggttgcaggtgctgtcaacttgttaagtgagcacagtccagaagcgtgagctggtgaatcctgccagtatgaagcaggcctagatcggcgtcagcccggaggctccccggggtcaaccatgttttgaggccaagggccacggccaaggctcgatctggtcagaggcttatcaggattcttcaaacaggtacacagcccaccaggccagttttgagccccccgttacattgatcttgacttgagtgtcccctactattgtgggccctacttgctccccaggcccatcttactatgcgaggggaatgccgcaccgtgtttatgtctcccaatcctcacgggttgggggagtccccgggaacacaactgctgattaagctgacttggcaggccctttttttggcccagaaagggaaccacctctgcactttggccttcttccctaaatcctcgggatattaggccttggggcaggcgtcatggggcacatcccattcctgtcgccacaagacgggtttctggggaaggattggtcaaggcacacgactcgaacattgggtgtccccacacgagacatcaccacaagggcggaaccagcttcatggcagacccccaaaggaaaatatcactcatcac

SEQ ID NO: 264898 - DNA, 759 bp, Homo Sapiens
  misc_feature (124)..(136): n is a, c, g, or t
tccggtccggaatgccgggatatcgtcgacccacgcgtcgcattaccccataaaactttttgagacgaggtgagatctgagtataaagataggtcagaagtattttaaagggcttaatgtgccnnnnnnnnnnnnngctagagaccctttttgcaaacatttggtgaccacacatttgagggaagacgtggcgttaggtgaagcagaagcaaaccctgctcttaggggctcacctaagtgagtgcacagcctgtgacgctacagggagaggctgagtaaaccgagatccagcgttctgtatggcaggggtattgcttatcacagaggttctgaagagtaggaagtacataatgaagagggctttaaaaattgccaacaaagtgagtcaccagggctggcagtagtgtgacggggctgtcctgagctgttaggagagtagatgcggggagggctggtgacctccgtgggtttatatgtcggaaactcttctctccaaatcccaggcctggcttccagcaccatccagctgtgcccaagaagccaccctggtctgttctccaactcttttaaatggtgcccaacttttctaagtgagcttagcaatgagaagacaaaaaaaccttgattcttttctggaaacattcgggaaacctgggtcatatataggtactattaaatattcataatgcacttcatgagcaattaatacctcacaaaagttcggagcatggttaatgacacggatttatacgaaaataa

SEQ ID NO: 264899 - DNA, 938 bp, Homo Sapiens
  misc_feature (312)..(312): n is a, c, g, or t
cacattgtcctgcgtggctcctctggccctgagtggcacctgtccctctggtctcccagcacctggcccaggtaacagccttctgaaagcagagccaaggagctgcttctctcttctcccagttctacctccccagaagccttcctccccaggtggggctgatggagcaagggtccagactaggagccttccaccccagctgtgtctgggcgcccctagatctctgcaagggaggtgttacagctggttctgagccgcttgccttgtgatggtaagacaccaacctttacattcttccctgaggttgtggcntgacagagcctgcttgggccccactgttaagtccagcgagctcctatatcaaaatgccgtaggccgggtggcttacaaacaacagaaacgtattgctcacagtcctggggggctgggacgtccaagatcaagaggccagcagattcggactccgctgagggctgtttcccgatccatagatggtgccttctcgctgtatcctcaatggtagaagcacaaacaagcaagctccttcctgcctcttttataaggactccaaccctgttcatgagggctccgccccatgaccaatcagctccaaaggccccacctcctaatactgtcaccttgggggtgagaattccaatgtgaatttgcagggggagtgggggacacacacaaatttcggggcaataccacccttcaccaaaccctcctgcgctcagggtggcttgcagtccctggcccttctggtgggcatttggtatgtcctttctcttggggtgatttctgatgtttttactctatatagtgaaaagctagggagagcgggtcttctcccccctccctctccagtcccctcacagatcccagatgggttctaaatgcagctgctgggcctgatgccctgagttgtttgtgattca

SEQ ID NO: 264900 - DNA, 1072 bp, Homo Sapiens
  misc_feature (970)..(1025): n is a, c, g, or t
ggctggtacggtccggaatccctggatatcgtcgaccacgcgtcgtttcgtgctggagtggagcagcctctagaacgagctggaggattctgcctaccgatacagagccttcgagtcgtccggggccgccattacaatccacctccatccgcttggaaatggccttcgtcccggcctatgactggtcccagcgggcagtacagaccccctagaagcccctggagctcccctttttcgggccccgcccaatcctcggagtctgtccaccccctctactccgccctcaagaggatttcaaagatggaggcggcggctccctaaaccacttttcgtgttcatccgcctccatccgagatcgaaacgggacctcgtcggccccgtaggggcccgacaagaagaggaaatccctgcaagaccaacagccgggctatattgacgacggtgtctgagatcggggaccgtcttttgaagagtcagtccctccttagttgcccgcctcagctgaggccgccgccattttccttgctgtccgccgtctgcagagcgcgccaagctgcccggagctctccgagaggccccaacagagactggctttcgtgccggccaggcagggggttttgtcgccctggaggcccaagacggaacggcctccccccaacttagcgggttatgctggaccgggcggtgaggggaaccgaggccacccggactttccgcggtgcagggagcgcgttccttgcggccaaaggctgcaaaacgtgtatcccacaaataagcccccggggacaggcaatgccggggcatgagggggggccacaaacaaacagccacggcaacgcaatcaaaccccccatggatcaaggcatgaagacccccacggttacgtgccgtgacataccctgtaaccccgaccgggggtgtcggcgaaagccgggaagcaaacgcaccacacacagagacgccggaacannnnnnnnnnnnnnnnnnnnnnnnnnnnnnnnnnnnnnnnnnnnnnnnnnnnnnnntccgaacacccacactggtaccacgatcacgtctcccacctcgagca

SEQ ID NO: 264901 - DNA, 646 bp, Homo Sapiens
gtacggtccggaattcccgggatatcgtcgacccacgcgtccgccctgctcacccacctgctcagcgacatctccccgccagctgatgcccttaagctgcgtagcccgcgggggagccctgatgggagtttgcagactgggaagcctagcgcccccaagaagctaaagctggatgtgggggaagctatggccccgccaagccaccggaaaggggatagcaatgccaacagcgacgtgtgtgcggctgcactcagaggcctcagccggaccatcctcatgtgtgggcctctcatcaaggaggagactcacaggagactgcatgacctggtcctccccctggtcatgggtgtacagcagggtgaggtcctaggcagctccccgtacacgagctcccgctgccgccgtgaactctactgcctgctgctggcgctgctgctggccccgtctcctcgctgcccacctcctcttgcctgtgccctgcaagccttctccctcggccagcgagaagatagccttgaggtctcctctttctgctcagaagcactggtgacctgtgctgctctgaacccacccccgggttcctcccctgcagcccatgggccccacttgccccgaactgggccagtgcccctcctggggcccccct

SEQ ID NO: 264902 - DNA, 949 bp, Homo Sapiens
  misc_feature (125)..(125): n is a, c, g, or t
gatgggggaagaggatataaaatataaaggatcccaaaccgggaaaccccttgcaaagccccctccagagggataaccgggccccagtcctgatgggcaaagatggaccccaattgaagtatccnaaagacagtatatttggtgaaggatcctacagaaaccttttaaaagatgggcattccagcctcagtgagtaccttacccggaggtgaaagaccctgcctacaagcggatcagcttggaagcttaaagtcccaatccttacttcgagtttgttttgaaagcaaattatgaatattatgttcagggacaaatataactttttctaaaaatggccattgtttatgaaatctgtataagtgtgtccttatacaaattttaggccataaacaagtgtaagtttgtacaatttcataacatgtatagctgagtttttatactttatatgtaggaagctaatataaaatagttatgtaactgtgatttggttttcagttatgtgacttgttttttccacctgaaatgtgtcagttgttgttcctgtactcggtgccctttctttttactctcacgtggtcccaggttctggagttcttgtcctggttctagctgctcacatgtacaaatcacttctaggcctcagtttctgcgactatgaaaattactagattgcactagcttgtctctaaacattgctgtggactcccagattactttgcactgaagagaaatcctaggggtggttggtatcttgttcagttaggggccttaatgggggaaatggtcttagtcaagatcaaattgtccactttttgctgaccttattatcccgatcgaaaaacccaaggacaagtggggcctaactcatgtgcagcttggattacctgatgacctcattgggaaccatttaaacttttcctaataattattacatgagccctctgcgaac

SEQ ID NO: 264903 - DNA, 883 bp, Homo Sapiens
agggtaaacctgaggcaccaccttcccagagtcctaatccatctacacatgtatgcagcccttctccgatgctttctgaaaggcctcagaataattgtgtgaacaggaatgacatacagactgcagggacaatgactgttccattgtgttctgagaaaacaagaccaatgtcagaacacctcaagcataacccaccaatttttggtagcagtggagagctacaggacaactgccagcagttgatgagaaacaaagagcaagagattctgaagggtcgagacaaggagcaaacacgagatcttgtgcccccaacacagcactatctgaaaccaggatggattgaattgaaggcccctcgttttcaccaagcggaatcccatctaaaacgtaatgaggcatcactgccatcaattcttcagtatcaacccaatctctccaatcaaatgacctccaaacaatacactggaaattccaacatgcctggggggctcccaaggcaagcttacacccagaaaacaacacagctggagcacaagtcacaaatgtaccaagttgaaatgaatcaagggcagtcccaaggtacagtggaccaacatctccagttccaaaaaccctcacaccaggtgcacttctccaaaacagaccatttaccaaaagctcatgtgcagtcactgtgtggcactagatttcattttcaacaaagagcagattcccaaactgaaaaacttatgtccccagtgttgaaacagcacttgaatcaacaggcttcagagactgagccattttcaaactcacaccttttgcaacataagcctcataaacaggcagcacaaacacaaccatcccagagttcacatctccctcaaaaccagcaacagcagca

SEQ ID NO: 264904 - DNA, 942 bp, Homo Sapiens
ttaacactgagtataagcaggtggacggtacggaatctcgggatatcgtcgaccacgcgtcggggagctggaggtcgacgcttcctctcgtgcttggtccactgacgcgcggccccgccgcgaggagcatcagatccatgctgctgctgactcggagccccacagcttggcacaggctctctcagctcaagcctcgggtcctccctgggaccctgggaggccaggccctgcatctgaggtcctggcttttgtcaaggcagggccctgcagagacaggtgggcagggccagccccaggccctgggcttcgaacccggctgctgatcacaggcctgttcggggctggactcggtggggcctggctggccctgaaggctgaagaaggagaggctgcagcagcaaaagcgaacagaagccctgcgccaggcagctgtgggccagggcgacttccacctgctggatcacagaggccgggctcgctgcaaggctgacttccgggggccagtggggtgctgatgtactttggcttcactcactgccctgacaatctgcccagacgagcttggagaagctggtgcaggtggtgcggcagctggaaacagagcctgggttttgcctccagtgcagcctgtcttcatcactgtgcacccccgagcgggacgaacgtttgaagccatggcccgctacgtccaggacttccacccaagactgtgggtctgaacggtccaccaacaggttgcgccagctagtcacagtaccgcgtgtactacatgcaggccaagatgaggacccgaatcatcgtggacactccatgcatttacctgtcaactgacggctttagatatacggcggcaatgggagccatcacacagggcgggcatggtggtccccgctgttgtaccgtgggccccaaaagcggggttacaaaaccacaaaagaaccg

SEQ ID NO: 264905 - DNA, 1259 bp, Homo Sapiens
  misc_feature (1166)..(1166): n is a, c, g, or t
gtgtaatgtaatttggagcagtgataatacagacatattttctgttccatcagaaaatcagcaggcaccagtccaaaggtaccacacctgtacatgaagaaggaaagttctaatacaagaaaactgaaaagcaccaagctttaaattcaagattaattacaatccttaactataagtgatgataaaaactaacttgaaatgtgactaaataactgatccaaactgggcattaagtggcaggattatgagaaaggataaaaaaagagatttgagaaaacacatttcttgaattttcagaaaaaaatctagactattgctttgacacttagaaattctgaggtttttcaattggaattgagcatctctgtatgtggggatgtgggcccttatcaagggataaaaatccaaacactctaacatgcctccttgactgtaaagtaatgacactggttccaaaattcacaaataatagacactactgtccccccagcccacacccataggctaagaataattctgtaccagaataaaaggagctggtccagggaactgatatttactgaacatacaaagttagtgctagaaggggcctttgagaatgcttcccgccacctgtttccagctcaagacaggtgcacagcagaagctgggagttgcctatggctgcacagctcactgaaggtagaacaatgattggtgctcagtccaattctgtctcccccatgcctagctgttaagtaattactggttcaaaactacgtgttattagtaaaaccaagccaacagacaaaaggacacgcctttcagaaccgtgtcgtcggcccgacattagacgaaacacccatcccacaaatggcggactcccttacagcgccaccggcaagcgtcacgtggccggaaagcgccaaacacaaacacccaataccaacgacaccgcgacccgcacagcgcgcgcacggcgacacattccaactagccgactgacccgcacctcctcattcacccctggcacacccgacacaagatagctcccaaacacactagtcccaatgcagacactcacatctccacacgaacagccccgtcaccaccacacacgtcggagccaaaccacccagcctcgcacccacatgcatagatcgagtgctaccgcaccttaagctagncacagctacatcactcacgcaacacggagcactactcctctctttccgtctttttccatctatatctttctgtcattcttaccctccccccgc

SEQ ID NO: 264906 - DNA, 732 bp, Homo Sapiens
tggtaccggtccggaatgtcgggatatcgtcgaccacgcgtccggtaattctcttattgtctaagaaaaaaggactacttgacaggaactggccaagattcttcacatttggtccttgtgacctttaagaaggcagttaccatgacgagaaaagtcactattccaggcattctggttcctgatctgatagcatttaatcttaaagcccacgtagtggcagtggcttccaacacttgtaatataattttgatctactctgtcattccatcttcagtcccaaacatcccagcaaattcgattagagaacacctgaaagacccaaaagggatatgtttcttgacagacccaacctattacctaattttggtaggaaaacaaaaactcactgatacaacatttcttccttcttcaaagtctgatcagtatgccattagcttgattgttagagaaataatgtcggaagaagaaccttcaataacatcaggtgaaagccagactacctactctactttcagtgctccgttaaataaagcaaatagaaaaaagttaattgaaagtctttccccagattttgtcaccaaaacaaagggctgttgctgacagttaataccagtagtcagaatggaaggcctggaagaacacttattaaagaaatccagagtcctctgtctagtatctgtgatggctccatagctctagatgctgagcctgttacccagcagcatcgctgca

SEQ ID NO: 264907 - DNA, 1642 bp, Homo Sapiens
gtggtacggtccggaatttgggatatcgtcgacccacgcgtcgggccagcccagagccgcctcagagctcacctacacctgctttccccctggctgcctcctatgacaccaatggccttagccagcccccacttcctgagaaacgccacctgcccgggccggggcaacagccaggaccctggggcccagagcaggcatcatcgccagccagaggcatcagtcaccatgtcaccttcgcacctctgctctcagataatgtcccccaaaccccagagcctcctacacaagagagccaaagcaatgtcaagtttgtccaggatacatccaagttctggtacaagccacacctgtcccgtgaccaagccattgccctgctgaaggacaaggaccctggggccttcctgatcagggacagtcattcattccaaggagcttatgggctggccctcaaggtggccacaccgccacccagtgcccagccctggaaaggggaccccgtggaacagctggtccgccatttcctcatcgagactgggcccaaaggggtgaagatcaagggctgccccagtgagccctactttggcagcctgtccgccttggtctcccagcactccatctcccccatctccctgccctgctgcctgcgcattcccagcaaagatcctctggaagagaccccagaggctccagtgcccaccaacatgagcacagcggcagacctcctgcgtcagggtgctgcctgcagcgtgctctacttgacctcagtggagacagagtcactgacgggcccccaagctgtggcccgggccagctctgcagctctgagctgtagcccccgcccgacaccagctgttgtccacttcaaggtgtcagcccagggcattacactgacggacaaccaaaggaagctcttctttcgccgccattatccagtgaacagcatcaccttctccagcactgaccctcaagaccggagatggaccaacccagacgggaccacctccaagatctttggtttcgtggccaagaagccgggaagcccctgggagaatgtgtgtcacctctttgcagagcttgacccagatcagcctgctggcgccattgtcaccttcatcaccaaagttctactgggccagagaaaatgaaggaaggccacaagctcagagcccacatcaacactgcccccctcccagcaccccacagccctcacatcccctggcctggacccaggaagacccaggagaaagcaccctcccttaggaatgaggagtgggcatcaggcctgggacactgctctccttccccgcccccagcctgctaagttaagtggacaggcccacaagatgaccttgcatgtgagcagatggcagagatgggtgtgtgaggggtgaggaggcatcagcagttgagccccgaaggagatcaggcagccccacctgcaggagaacgtcagccctccaggggatcagcccctgccagttccacccagctgcaggtgccagcacggcagggatgggagaggggtggggagcgagtcactgcctcctctgagcagagattcagagtaggatcacatgaataggggaaaaaagagagtctatttttgtctaataataaagaatttctataaactttagccgaa

SEQ ID NO: 264908 - DNA, 444 bp, Homo Sapiens
  misc_feature (34)..(34): n is a, c, g, or t
  misc_feature (50)..(50): n is a, c, g, or t
ttgttcccacttaaactttaacaagcctgggganccgggggaaagaaaancattgtcccaagcctgaagccccaatccctcaatccctaagggagggtgctttctccctgggtctccctgggtcccaggcccagggatgtgagggctgtggggtgctgggaggggggcagtgttgatgtgggctctgagcttgtggccttccttcattttctctggcccagtagaactttggtgatgaaggtgacaatggcgccagcaggctgatctgggtcaagctctgcaaagaggtgacacacattctcccaggggcttcccggcttcttggccacgaaaccaaagatcttggaggtggtcccgtctgggttggtccatctccggtcttgagggtcagtgctggagaaggtgatgctgttcactggataatggcggcgaaagaagagcttc

SEQ ID NO: 264909 - DNA, 1408 bp, Homo Sapiens
  misc_feature (1150)..(1150): n is a, c, g, or t
ggtaccggtccggaatgtagggatatcgtcgaccacgcgtcgaagccatcaaaaaggctattacctgtggggaaaaggaaaagcaagatctcattaagagccttgccatgttgaaggacggcttccgcactgacagggggtctcactcagacctgtggtccagcagcagctctctggagagttcgagtttcccgctaccgaaacagtacctggatgtgagctcccagacagacatctcgggaagcttcggcatcaacagcaacaatcagttggcagagaaggtcagattgcgccttcgatatgaagaggctaagagaagactttcctgtcaatgtggccaggcaactcccagcaattcggagcttacacactaccagctcccccaggcgtccagcaaaacagcaagacatctgtatttggacagccacttcttgtgctctctgaagaggaccactctgaagccttggatctgttccatcctgcaggaatgcctgtcttagatggatcgccaacctgaagatccagctggccaagcttgacagtgaggcctggcctggggtgctggactcagagagggaccggctgatccttatcaacgagaaggaggagctgctgaaggagatgcgcttcatcagcccccgcaagtggacccagggggaggtggagcagctggagatggcccggaagcggctggaaaaggacctgcaggcagcccgggacacccagagcaaggcgctgacggagaggttaaagttaaacagtaagaggaaccagcttgtgagagaactggaggaagccacccggcaggtggcaactctgcactcccagctgaaaagtctctcaagcagcatgcagtccctgtcctcaggcagcagccccggatccctcacgtccagccggggctccctggttgcatccagcctggactcctccacttcagccagcttcactgacctctactatgacccctttgagcagctggactcagagctgcagagcaaggtggagttcctgctcctggagggggccaccggcttccggcctcaggctgatcacacatccacgagatgaggtggcaagacccagaaggcagagggaggtggcgcctgcaggctctgcgttccctgtctggaaccccaaagtccagganctccgtattcaccagttctctcgtctgcactcccacgtgaccaacacggtaacacatctcaggatgaacccgagccgggaggggagccctgacgtcgaagcagagaggtagaagacccggaaggatcaacatgggaacggaccgtatacacggcggaagaaacgagggaacagagcaggagggaggcggaccgcgggaaaacgccgggacgcgcaaagaggcggaacccaccggaggggaggaagaggaagagacgac

SEQ ID NO: 264910 - DNA, 1143 bp, Homo Sapiens
  misc_feature (1093)..(1093): n is a, c, g, or t
tggtaccggtccggaattctcgggatatcgtcgacccacgcgtccgcatggagttgacataatactttgtaaattgaattttttaaaggaaataggcatttgataaccagcttggcaagtaactctactaacagatgttggtatagctatttaaagactacttcgtaagtagtatgattatttgaataaattacacattgtttagttttttaatacaactgctatatgactcttctgcttcctgataagaaaaggtatatgcaatgctaaaactgtagaagcccaatcaccagcagtttttaaaaaggtgataacttttattagctcttgtgggctatcaagagaattagaacaaaaccttgtgacttttaggtaagaaataggcatgatgataagctatgcagattattaaaaagcttgatacatttgatttttcattagatatgccattcatatcaagtaatgttcaagtatgataaaattattttggttgctttaaagcactgtttcccaaatctacctgatcataataatttaccaggaagcagaggagagctacttgtttaaaaatccacattcttggacccaatcctcagatgcacggattcagtcttcaggggaaactctgttttaaggggtatgttgtaatctaaagtaattggttcaggaggtgtcaataggttgaacttgtgagaaggcactgaatctgccatccacatcacatatagcagctattatgaaatcagctttcataggcctatttttaaaaggaatctgaaatttaattctattttgataaaactaagactggaaaataaccacttgtaaacattcctatgattgttactaaaatgtattttcatgtttaaaatgtttttggatatttttgggttaataactactacattgaattgcatgttaaggtgcagaaataatacattaaaagattttcactttaaattaattagtaatattgagcgctcaccctgtgcgtggccttgtgctaaccattagcactgcatcatttcaattcttttataagggcattcaatactacaaaatcaacatgatttcataaggtgcaaataaaagntggtgacagatttaatataattttgatcacaatttacaaatgatctttgc

SEQ ID NO: 264911 - DNA, 446 bp, Homo Sapiens
taaaacaaaaacaacatatttgttcacttttgaaccctgtggtgtcttttaactttgttaagggcccttggttagcaaaattatgaaagtttaggaaatttggctattgagtatattaagtacaactacaaaatcctctgagttctccaggaagcctaaaccttgagcagtatcttattcaagtggagtatatatcttcaagaatacagatttttaaggtaagtagtttttcgtctttgcatctcctaagaccattgttaacaaccttgatattaaacgaagaagtgaatgtaaacctccttttgaacatattttttataaagaaatattttgttaattggagtaagtagtattgttatgaaatcactgtgtaattgttaattgtaaactgcaatgtctattttgtgttgtaacaatgttgccataaaatagctttgctaaatgtg

SEQ ID NO: 264912 - DNA, 1331 bp, Homo Sapiens
  misc_feature (381)..(381): n is a, c, g, or t
tacaatttgaaaggatcattctacaatcttagaactaaaaagcaatttaaggcaaagaggtacatcaaagaagctattccatagctagttacagctcaacaaaagctctgtctgtattgtctactggtaagcttgtgccctggtggctaaggatcatatgtaccgctatatccgccagttgatgactgtccatctctagcccctctaaccatgctatgcacccagtgagtgcagaatgattactagtaattgatgttgactttacaattctatgacatgtaatacaggatgccgaggcacttttaaaatcccacctaacatgttctggcactggaaaaccttacttgagattttaaatactggttaatataggaaaaattnatgcttaagcaccactaacttaaaaagtgtaatttcattttcttgaatttaggtaaaagccaaaattctcaaaattctattatggcacatggtttcacagtttcaaatgaaatcacagctgtctcattacgcagcacagtccttggttttgcagaaagtatatttttcctttgttcaccaacccctcaagtatgtaatactatgtgctttgctaatttagactatatctcagacacacacacatgtgtgactgattcctgaataacccaggatgatgttcctgtgttctagataatataaaatttttaacattcctctaatagctgaacatctttttaaaatctagaaaacttgaaaaatcctaaaatgtttttcaatttttttaagctatttgagagacagttgtggtttgggggggacttgtttgtgtgatttttatgtcagcaagaaaattgtatctttggcaaatactttaatatgtttaaatgcattttacctctggatgtatcacatcagtcatcaaaatgactttccagtttcacggctgccttatgtataccagtcccaagaatggtgatattaagaatcccacttacaacatctctgcccatgggaaagataaaatgatagagggcagcctcaagaaatatcagacaggattgggcagctcccttacttaatttgttccaaaacaaagttgactcaagtcaaaatgaaattgtgcacttgaaagaaaggaagttatctactaattttttcaaatgtaaacatactttttatatagggatgtaactatctgagtacatgtattgccatttctctgctatatagtaatatttcttgacaccaatggtaatgtgtcttgtttctttctcagcaccacgatgtgcccatatgcggacgctgggtcgacgatatcccgagaattccggaccgctaccccctgcttc

SEQ ID NO: 264913 - DNA, 1002 bp, Homo Sapiens
  misc_feature (493)..(493): n is a, c, g, or t
  misc_feature (535)..(535): n is a, c, g, or t
  misc_feature (561)..(561): n is a, c, g, or t
tggtacggtccggaatgctgggatatcgtcgacccacgcgtccgccagcacttagggagctctttcacttttggaaactctgcagccccggccccggctactgcacccacacctgcacctgcgtccacgatcaagatcgtgcctgcgcacgtgcctacgcccatccagcctacctttggcggtgccacgcactcggcgttggattgaaagccacggcttccgccttcggcgctcccgccagctcacagcccgcctttggcggctccactgctgtcttctccttcggtgcagccaccagctccggctttggagccaccacccagaccgccagcagcggaagcagcagctcggtgtttggcagcacaacaccatcacccttcacgtttgggggttcggcagcccccgctggcagtgggagctttgggatcaacgtggccaccccaggctccagcgccaccaccggagctttcagctttgggagcaggacagagtngggagcacagccacctccacccccttcacagggggcttaggntcagaacgcccggggcaaccaccggncagagcacaacgttgccttcaacgtgggcagcacaactgagagcaaacctgtgtaggaggcaccgcaaccccaacttggtcagaacacccctgcgcctggagtgggcacatcgggcagcaacctctccttggggcatcttcagcaccgcccaagcttggtgggtggacagctcggatcgggggccccttcatttcaatggtgcgggatcacgacccagggctcaacaggactgcagccgaggcagacaccgaaaagagctggccatcagtaccacaccctctaattgacaggacgtgaaagacggcctccagcgagacaaacacgaatcaagacgacagaaagcacgagacacgcggaaaaccagagcagagggaacgacaaaagaggaaaaagagacaacacaaaaaaagaagacgcacagattacgacctcgcctgggc

SEQ ID NO: 264914 - DNA, 1000 bp, Homo Sapiens
aaggggctgtcctgttcctcatgggcgctgccagcgccacgcactcctctttctgcctggccggccactcccgtctgctgtgacgcgcggacagagagctaccggtggacccacggtgcctccctccctgggatctacacagaccatggccttgccaacggctcgacccctgttggggtcctgtgggacccccgccctcggcagcctcctgttcctgctcttcagcctcggatgggtgcagccctcgaggaccctggctggagagacagggcaggaggctgcgcccctggacggagtcctggccaacccacctaacatttccagcctctcccctcgccaactccttggcttcccgtgtgcggaggtgtccggcctgagcacggagcgtgtccgggagctggctgtggccttggcacagaagaatgtcaagctctcaacagagcagctgcgctgtctggctcaccggctctctgagccccccgaggacctggacgccctcccattggacctgctgctattcctcaaaccagatgcgttctcggggccccaggccttgcacccgttttcttctcccgcatcacgaaggccaatgtggacctgctcccgagggggggctcccgagcgacatgcggctgctgcctgcggctctggcctgctggggtgtgcgggggtctctgctgagcgaggctgatgtgcgggctctgggaggcctggcttgcgacctgcctgggcgctttgtggccgagtcggccgaagtgctgctaccccggctggtgagctgcccgggacccccggaccaggaccagccaggaggcaagccaggtcggctctgcagggcggggggaccccccctaaggccccccgtcgaacaaggtctagtctccacgatggacgctcctgaggggcctggaggaccgagcctgggacagacccatcaaaccgcaaacaccccgcaaaggcaaacagggccaagaaggagggaaagacacaatcgggaaca

SEQ ID NO: 264915 - DNA, 835 bp, Homo Sapiens
  misc_feature (276)..(302): n is a, c, g, or t
  misc_feature (599)..(599): n is a, c, g, or t
aagaaagttcctaaaggtgttcccctgcagtttgacataaacagtgtcggaaaacagacagggatgacgttgaatgagcggtttgggatcctgaaggaacaaagagccactctcacatacaacaaagggggaagccgctttgtcaccgtgggataggtcccatgtcaaaggaacttttgagtgatgactctgagaagttgaattgcttgaagagttcatcacggaaattcaagaaactttacttcaaaatatttcacaaggctaaataactcttannnnnnnnnnnnnnnnnnnnnnnnnnnaaaaaaaaaaacgtataaaataatgccctgaaagaataatagggattatacctgtctgttcttaaagatttcatggttggctcagacagaacaatcatctgtttgacttctttggttcctcatgcagcagaaggaagacagaaagatagaaattgattatttttatgatagcagtattcaggatctcatcacctttgcccgtgttttagactttgtcatggtagacctggcttcataacatgagtaggtcccttggtgctgtcactgctttaatagtgtgatgagtcatgcgtgctntctcataggcacgacatgtatgattcagcgtggttagctagggcacagaagcgtccttcgacggatcctgataccgctagcgcttacagattgctggtgcttgtaggtggtgacagacaccaagtctgagctgggaggcgtaaaattttaagggggatcttcgtggatcagtggctggctgccgagctgtgaactgcgtgacccctgcttgtggactactaacgcggtcattgcag

SEQ ID NO: 264916 - DNA, 1318 bp, Homo Sapiens
  misc_feature (193)..(231): n is a, c, g, or t
ctggtacggttccggaattcccgggatatcgtcgacccacgcgtcgccacgcgtcgagcaaaatcccgatagaagtgacttctgaaagggagagcactagtgggagttcagtgagcagtagtgtcagcacactgagtcactatacagagagtgtgggaagtggagagatgggagcccctactgtggtggtgcnnnnnnnnnnnnnnnnnnnnnnnnnnnnnnnnnnnnnnncagctctccaaggtgtgaccctccaacagatggatttggtagcactggtccacagagtattccagcagttagtataccacagagtatttctcagtcacagatctcacaagtacaattacagtctcaagaactgagctatcagcaaaagcaaggtcttcagccagtacctctgcaagccactatgagtgctgcaactggtatcaagccatcgcctgtaaatgtggtaggtagtaacgttcagcttaaggtcagcacgccttccatttccagtttggctcaaccccagctaccatatactcaggcggctcctccagtgcaaactccccttccaggggcaccaccaacccaacagttacagtatggacaaaagcaaccaatggtttctacacagatggccccaggccatgttcaaatcagatgactcaaaatcctgcttcagaagtatgtacaacatgcagccaattcttcaaacagcaatgtcctccggacagccagttctgcaggagtaggagcaggacaacaacagtgattcctgtggactcagccacagggtatccagctgccagtgcagccaaagcagtcccagacacaactgaaggggcatctgtaccagcctgtatggccaggctaccggcaccacagtgtctgcatgtacctacctgcagtcagattgcaaatattggtctggaaagacaaacatactatttgcagtgagccagccctctacaccagggttccaacctttacagatctattcagcagggtgctcctccaatttacgcaaggtgatccaactgcttcaaactgggataattcatcaggagtcaaatagtgattcacggcttctcaaaattggtatgatccaagtcttgtaatgtggatcccagcaaagagtagaccgtagtatgaatgtaacagagaggatgagtaagttagcacggaatccatgaaagaaagttgaggcttggaagtttcaaaagtcacaacaaagacctgacaatgaagagagaaccgaaaaatatgagaaaacatatacaaaaatccaaccgggcagtaatagaaacaaaaagagtaccactctcagaga

SEQ ID NO: 264917 - DNA, 1023 bp, Homo Sapiens
atcatacgttcacatgcgtgtcctcgatgtccaatgttgtggtggcagtgctcacttggggggtgcgggctctctaccttcatgttcgttggggccgcaacacgttctacccatttgggggcgcctggcccaccgaaaggggggggatcttcaacagctttcctactcgggtgggccccctaattgatttggacaacgtcgaacagctagggtaaattcatctgggcagttctctttcagattgagagccttttcggtcgccgggcctcccaggcagcttcagctcttctactgaagcactgcggatgtgtaactacatccctgagtgtcgctgacgccgctggtgaaggcaagcctgaaaagccggccccctgaagcatctgggcagaggggcaggggggcatggctggatcgccctgggaccaccgagaggggcaacacaaatcacacgtgagtgggcttcgcgcggacccaaagtagaacagtcgggaagcttttaccatttgctttgccatgttgagttctttggggtggttcaaaaggaccaaacaaaccatcgtagaaactgaaggttctaggagtgcagtgccaccgacagggaggcctgtttggaaaaagtgaaccggagctctggaaaggtctgcgacactcacacaaccgatgacaaggcggcaaacccacacgcaggtagaagtggaaaagcagagacggaggccaggatgggaacgcgtgtgtccaccggggtcacctgtggaggacccgggacccagccctctggctctgggctgaagcaacacccggcacgagaggcagggcagcaccaaccagcatggggatggcggtgcagctgctaaggctcgcccccgactcctcccaacagcaaaaaggtagttttaaaggcgtcaaatgcaacattcctgcttcaaagtcttttaaaccatgagacctggtttccttcctagttactgaagattttgcgacgcgtgggtcgacgatatcccaaagcattccggaccggtacca

SEQ ID NO: 264918 - DNA, 942 bp, Homo Sapiens
  misc_feature (176)..(189): n is a, c, g, or t
  misc_feature (584)..(653): n is a, c, g, or t
gtacggtcggaagtagggatatcgtcgacccacgcgtcgcaatttccttagtgtggaattgtatcttacaattatcttattaattttttatataccaaacctagaataatactgtatacatagttggtgtccaataattaattaattttttttcctgcaaatatggaggcagtagnnnnnnnnnnnnnntacttttatttttctgaacacaggacagagaaacttggaaaaggaaagggcttaatggagaacttcctttttcctaactacactattgggagttttagagacagccaaatagagaaagttctctccagaggagctgatcctttcatcccaaagaatgcaacagaattgtttacattttggcattgagccttctacgtcagtttgttttcctgtaactaactatactacacatgtatatgatatattaatataaatgagaatatatgatttggcacctttcccaaagtactatccttcaagcatattttatgtttatttttttgacgttagttttaatagctgcacagtatttcattatgcataaaccatttttgtcttttttcttctcttaagannnnnnnnnnnnnnnnnnnnnnnnnnnnnnnnnnnnnnnnnnnnnnnnnnnnnnnnnnnnnnnnnnnnnntggctaaagtgatcctcctggtctcagtctcttgagtagctgggactacaggtgccaccaacacaccgggtattttgatctctgttgagatcgggttaccctgttccccggggctttactctgggcccaggactgcctaccaaggggccccagtggggtataggctgggaacgggagcggcgtaacctttttggagcctgctctcaaattcctcttggccaacacatttctacacccacggggggtttcacttcacaaagggcgccggcaagcactttcggcagtaagg

SEQ ID NO: 264919 - DNA, 1015 bp, Homo Sapiens
tggtacggtccggatgtcgggatatcgtcgaccacgcgtcgcattgtataagacatgccttagaacctcttggaactgaaattcagtaaatgtccaagtaatgtttttataataaactaagccatatttagacaataaacattgataaaatgttctaaagtacattttcaaaagaatggaccttgaaaggctagcctccttagctgttgtacagtatcttatcttttagatgcctcccagacaaaaatctgagatggacaaagctacatcaagttcatgctattaccaggaccaagaatatctcctaggttagcatatacttatttcaaaaaattagccctggttttctcagttttccatagggaatcccgaccatctgatatatttactgtgtcagtataagtaagttggggttcccctggaactataatttaacatttaaacaaatctaatgctcttagaagaagctcacagaggtggtgatgaacccaaacaacaaaagaaaccattttaaacactaggtatctacatcagttataggtaggtgttcacaatttttgatggatcaaaaacttgctgtaatacaaatagagagtggaggtactaaaggccttgcttgtggaaactgagagaggatacactgctttatgtattactaaagttaggggagaatgaaggaaatctgacagatgaaaaattctacaggaacctcatcatcgtggaactgactgattatacttggaacactccagtaaatccgttgtgtcatgtgccttgggcgcaggactcatccgcacatattttctgttcatcgaaatatcacggagcaccgtcaaagtaccacactgttattaagaggaagtcactctagaacgagagcccagtatattagatatcactacatgtgggtttacaaatgaaggacaaaccttcatgcgaggggccctaaaaatacaatatggccatgtttgtcaacataaactacccactaagaatagattaggggcagtgaaaa

SEQ ID NO: 264920 - DNA, 336 bp, Homo Sapiens
ccagggctggtacggtccggaattctcgggatatcgtcgaccacgcgtcgctcaggagagagaaaacttagtgcttccagcccttcttggaggccttcatggtccaggggtaggggccccactggcctgagcatgccattttgaggggagggtagttgtgcctacttatcccctggcagaggggatgccaggaccatggacatgaggcttgcccatccctgccaacttacacagcctgtaccactgtccccccttccttggctactttgacatgtgcctgctcctggcatttcaataaaacccggcttgggtctgtgtcttgagtgttttttaaaa

SEQ ID NO: 264921 - DNA, 712 bp, Homo Sapiens
  misc_feature (464)..(504): n is a, c, g, or t
tgtaccggtccggaatgttgggatatcgtcgaccacgcgtcgtgctgctctacgagatgctggttggcgagtccccattcccagggatgatgaggaggaggtcttcgacagcatcgtcaacgacgaggttcgctacccccgcttcctgtcggccgaagccatcggcatcatgagaaggctgcttcggaggaacccagagcggaggctgggatctagcgagagagatgcagaagatgtgaagaaacagcccttcttcaggactctgggctgggaagccctgttggcccggcgcctgccaccgccctttgtgcccacgctgtccggccgcaccgacatcagcaacttcgacgaggagttcaccgtggaggcccccacactgagcccggcccgctgacgcgcggcccctcacagccgcggagcaggcagccttcctggacttcgacttcgtggccgggggctgctannnnnnnnnnnnnnnnnnnnnnnnnnnnnnnnnnnnnnnnngagagcctcttagggttgttgacaaaaagggccctttggggaataggccgggacaagagaagaaaacacagaacacaagaaaccaagaacgagccaaagaggaagggcacaaaaggaagcaaagaaagacaaaagcagaagacaacacaggcagagacaaacgaacaaaagggggcaggagagaaccagaaagcaaagaaggggagag

SEQ ID NO: 264922 - DNA, 910 bp, Homo Sapiens
agcaggctggtaccggtccggaatcttcgggatatcgtcgacccacgcgtccggcaacatctcacttattcaacaactctaaaggtaggtacttttatctccattttaaaacaatgaaatacacttacagttacagacaaacttgctcgagtcacatatctattaagtgtcagtcaagattcagattcaagtctgatgttaaagagtgtctgttcccaatcaatacctctgctgcctctttttacaaactgaactgttggagggcatgtacatatgcataagctgtgggccactgggccatgggccagtgtctgatgagacctctttattgacttgtttgtcctggtgggctgtttctctaccaggcaactgtgaatgggctcatcccttctctgtgcgtacatgattgaaaggagatagccggtttctgtgacatcctcttataacaacctagttttgttcttgagagtgacccagagcaagagaaaagtcaatgaaattttgcagatcttgcaaacctgtggcaataagaaggtattatcctttctgtaccaaggcacaactgattcctaagcgagggggatatgtgttctgagatgttaatgttagtgatagactgttttcaacaccttggtaaacatttcttttgactgttagcaaaagctgccttaacagtcttggcttttagaaatgccccttcattcattagatgtgtatggaacacatcttatgccaagcactctgctaggagctgggtatacagagaagaaaggcattcctgctctcatgatgttcatggtcttctgcggaagagaccagaaaaaaagtattacaatgtagaatgaaataagaatgacagggtattttggcagcaaaggaggagggcactttaactcaaactgggcagtgg

SEQ ID NO: 264923 - DNA, 821 bp, Homo Sapiens
  misc_feature (656)..(656): n is a, c, g, or t
  misc_feature (751)..(751): n is a, c, g, or t
  misc_feature (780)..(780): n is a, c, g, or t
tataaacctcgtagttaaaagcaggctgtacggtccggaatcctcgggatatcgtcgacccacgcgtccgcctgccctcaggacaggtctgccacgaccagcagaggctggaggtgatctttgcagacctggctcgccggaaggacgacgcccagcagcgcagttgggcactatatgaggatgagggtgtcatccgctgctacctagaggagctgctgcatattctgactgatgcagaccctgaagtttgcaagaaaatgtgcaagagaaacgagttcgagtctgtcctggccttggtggcctattaccaaatggaacaccgagcatcactgcggctgctgctcctcaagtgctttggcgccatgtgcagcctggatgcagccatcatctccacgcttgtgtcatccgtgctgcctgtagagctggcgagggacatgcagacagacacgcaggaccaccagaaactctgttactctgccctcatcctggccatggtcttctccatgggagaggcagtgccctatgcacactatgagcacctgggcacgcctttcgcccagttcctactgaacatcgtcgaggatgggctgcccttggacaccacagagcagctgccggacctctgcgtgaacctgcttctggctctcaacctgcanctgccagctgctgaccagaatgtcatcatgggctgccctgagcaaacacgccaatgtcaagatcttcttccgaggaagctgttgttggttcctgnaacagaggggggatggaccctgtggcggnatttttcaaaacatggaggcccacaggccaccaaaattttg

SEQ ID NO: 264924 - DNA, 1123 bp, Homo Sapiens
gtgactgtcaccagaggccatgggacggcaggcgggctggcaaccctgtacagagtgtagcagtagggagtctctcaccgtcgcatggtcctccccagagcatgccgaacccaggagtctgtctcactgtttatccaaacaccaggaaaggtcctccctcaaaaaagcatatctccacttctctctagctgtatctaacccaccgtgtgaatgaactgggagaggggcatgctccccagctgtgtgtagtcgtgacttctcaacaatctagcaccatgtcggacacgttccccatccaccctcctagctctgctctcagagctagggcacatgggcacaggttcccctcccgtctgtcctctcccagcaactgtgccctggagggctccacatggcccccgtgtctctcgggcaccacccatatagcagtcccagagggcccatctgtaaagatcgagcttgtgtgtggtgtcgtggtcacatctcccgcttccccccatcctgtgtctgggcacagttcacatcaggacagcgtccattgtgctctcagtctgcctcaggtgtgtgcctggagggggcctggactggcatggatccagtgtgcagaagagccagcagggaaccggaagctctgatgtcaaggccagagcagttgagaatgggacccagagtagatgctgacctgggcactccaccattccggggccacccacagagatgccagcaggatgcccactttgcccagcccgacacacggacctttgtaaagaacagcaacaggcaggagaggcagcgtgtgacccagattgtgtcccgtcattgggtggcatatgttaactagctgccaaacaacttcaacccgtgtaattcatgtacatttgcaacagccagcccggtacagcctgtgtgacttctctgtatgtgtgtgtgtgtcgtgaccagcctaagtagttagcataactcaagatgctgatgtgcagtcacccatcagagaaaataaaaatggaaaccacgttcacagcattttaaaagtttttactttttttcttgattatggaagtaatccatgtacatagtaaatcattttaaaagtacaaaaagtatgaagaagtttgtcttaata

SEQ ID NO: 264925 - DNA, 1030 bp, Homo Sapiens
ggtaccggtccgaatgttgggatatcgtcgaccacgcgtcgggtcatacggcatggcagggtccctcggccagacccgtagaatcctgagataaggagtgtttctgacctttggtgtcatctagtcgagtcctctcattagtaaaggagcaaagtgaaacctgggggaggagaaggacttccctcaggttgcacagctgtttaggctatagaatattgatgtgtgaaaccattattgataatgcctagtagatcacatgtcaatgaacttgaaccccaaagatggtcgtgatgctttgccaaacccgcacactgccaacccctctactctccacctcagcccccacccacatctcccagagtattgcaattcagaacatttgggtcaaggtggagcaaggcactgacagtggccccacagggcatgtgtcactaatcactgtcccatggtctacgcacggcatctggctgctctgtctactgtgacttcttcctgtgtaatctcagtggggcccgtgtccacccacacatcgtgacccacataggggagaggttgcttttcttttgtgggctgagagtaggacaatgcaaatgaatgatctctagtagacagaaaagaacttggtctcttttttgaaaatttcaaagagccagaagttctatgcctcccttcaaagtaggcagaacaacgcagccaagatctacttgtctgccatgctctgtgcaatgaagtctgcaggcctgaggaccatgtacttgctgtccttcctcagagctctggacaaaacactgccaagtccttgaagacgcattcctttcctgccaacctctttccagataagcccttgagggtctcgggctgacctacacacaagacaacaaaagcacacagacaagagaacccacgaacacaaaacgagagagagagcgggcataagacatgcgtgacccgatggggaaagccaatccatattcggaaacagtgccaaaagagggacacaccaagggggaaacagacataagaggacacg

SEQ ID NO: 264926 - DNA, 1028 bp, Homo Sapiens
  misc_feature (79)..(87): n is a, c, g, or t
  misc_feature (505)..(505): n is a, c, g, or t
  misc_feature (521)..(521): n is a, c, g, or t
tggtaccggtccccgaagtcgcgggatatcgtcgacccacgcgtccggaacttatgaagcagttttttcacctcaactnnnnnnnnnttatggttggtttttcttaatacatccccagagggagaaatgaaacattacctaaaattgtggggggaacattaccttgaatggggatatttacccctgtcacaagagcccactggtattttagtacttgattattttttctttagtcacaaatcagaactgcttacccatactttttgatgcccaaacattataccttagaacattgaagaaaatattccctaagctgatgctggctaaaccgctttaaagttttatttggaagtagaactagctttaaaacggggttcaagaggttgccattagctttgtcatgctgttcaaagtttttaattgttatcatggtttttaaaagactgacagtgtttattattattaaaataaacagggttggttatattgcaatagaataatgagnaattgaatttttaagnttctatgaaacagccagcattgacattttatttttgttatctctcttctcacaattatgctccactgggataatagggaaaaacacttctttccttcattttttaaataaaattaatggttggtatttaaaaagtagccatgtagagacacaaaaataaatgaagaagctggacatggtgggatgggcatgttggtccccgctactctggaagctgaggtgagaggatcccttgagccctggaattccatgcaagctattcaacattctttgaaaacgcccattttattaaatgcgttgaaaccgagcttaaagtcctggcgcccaatgtgtgttactgacggaagcaacagagaggacctacacatgtggttcttcacacacgggccgggggcgtgtgtccccccacgggcacgagactatcaacatccggacaatcactgggcctcacacaaacaaaataaccacccacaaaacaaggggggcgcgccaaaatatcacaccaaag

SEQ ID NO: 264927 - DNA, 686 bp, Homo Sapiens
  misc_feature (189)..(313): n is a, c, g, or t
  misc_feature (447)..(455): n is a, c, g, or t
ggttatattgcaatagaataatgagaattgaatttttaagttctatgaaacagccagcattgacattttatttttgttatctctcttctcacaattatgctccactggataataggaaaaacacttctttccttcattttttaaataaaattaatgttgtatttaaaaagtagccatgtagagacacannnnnnnnnnnnnnnnnnnnnnnnnnnnnnnnnnnnnnnnnnnnnnnnnnnnnnnnnnnnnnnnnnnnnnnnnnnnnnnnnnnnnnnnnnnnnnnnnnnnnnnnnnnnnnnnnnnnnnnnnnnnnacttaataaatgaatgaacgactaagtcttgctcaaatgttattatgaggtactatgagtgacttacatgtgttttaaaatgtcagtgtgtttcccagaggcagaaataaaaatactgaatatctttgctcttnnnnnnnnngtaacactatagatttgtttttgttagatgatttgctctatagtagaatatttaagtagactgtgaaatatttattaatatagatgtgaatatcaaaaaatgtttctaaggtattatgatgcatcaactagttcttccatgtaaaataattttagtgcaatatgaagacgtagaaatgtaaaatatgatttgaattgttatcctttatattaagaaaatgttttaaaatgt

SEQ ID NO: 264928 - DNA, 276 bp, Homo Sapiens
acatttctactccctgggtgaaacaaagagaatctctgggggccaagaagcatgactttgccatcatccgagtagaggaactctgccccttcccgttggattctttacagcaagagatgagcaaatacaaacatgttaaagatcatatttggagtcaggaggaacctcagaacatgggtccgtggtcgtttgtttctccaaggtttgaaaagcagctggcctgcaaggtaatcacacgttttctctggtagtgttttgtgttttgtgtgcatgttg

SEQ ID NO: 264929 - DNA, 427 bp, Homo Sapiens
  misc_feature (319)..(319): n is a, c, g, or t
  misc_feature (340)..(340): n is a, c, g, or t
  misc_feature (382)..(382): n is a, c, g, or t
  misc_feature (406)..(406): n is a, c, g, or t
ttcacttagcaacaaaactaaatatatgtcaagcagccttcttgtagccttaaacagtatagctacataggccaggcaactttctattttgtttaaaatgctaccattttttcgtaagataagagatatgtttcaacctaatttccaaattactttgtgaattccatgaagattttctatacttgatacttaggaggttaaaaaatgcttttaaagtctcattaagtcttaagtaaatggaaattatagaataattttcctagatttcaatgtcaattctattttcttctgttatttctaagcagactgacatggattngattcctaaaagaaaacctgntttgagcaatctattgagcaaaacatttgtaaaataaatagntgccccaatttaaatcagacttanttttaaaaaatatatggtccc

SEQ ID NO: 264930 - DNA, 1155 bp, Homo Sapiens
tttcaagtattgccagcatgagcataacccacccatgccgggacctggcttgggagagaatggaggggcagctgggatcccttaaagagctctccatgggcaggggaaggaccaggctcccacttccactgtgctgcccaggaactgcacaggagctgaggctgtgggtgcctggctggctgatttacctttgtctgatacaggctgcccccacccaccaccaaccctgccttctctactggagccccaactcaatcctattggccaactccataaaaaaggggggaaaaccccaccaaaatcccacagaataaagggaaattatcaccaagggaatgaaggagcccacagaccaaagcagcccatggaggcttcctctccacagccagctatccagagctggccactcctcagtccggcttcaccctgaggacctggctcagcaaggcccaagcagttcccccacctgggaggcctcacgctcagttcacagcctcactcacacagggctcgcccgggacacaggcaaggacttggtgtggtccctgggtagcctccagaggctctggtctctcctggcactgatcagctggggtacctagggcccaaggctgtgggaacctgggtttggggagcagagggcacagccacggaacagttcagggaaagccacgcaggatgggaaataaatatgaaaagacttgagtctttggcagttctgcttcccttggatggaatagggagggtcccggcaggtgagtgcggagggtcagacaggccagcaggtggcaagtactgagccgtggtcaggggtggcctcctaccatgctggcatcaggcttggctctgcaggctggctcatcgcttctgatgggtgagggcaacacggtgtcggactgcacaaatcccctccggtcaattaggctgggaggtagggggccacagagcacagcacagcagttggtgataatacttttatggctgtaggggttgacagaggcctcaccgcccctcttgctggaccacgagcctttgatgtcttcattagtagtcaggttggaggcgacgaggtacgtgtgaaaccctgagaggcccagaatggaccagatggagaagaagcagatcaccaactccagcacgcttgctggtgtctcc

SEQ ID NO: 264931 - DNA, 425 bp, Homo Sapiens
  misc_feature (32)..(32): n is a, c, g, or t
  misc_feature (39)..(39): n is a, c, g, or t
  misc_feature (67)..(67): n is a, c, g, or t
  misc_feature (91)..(91): n is a, c, g, or t
gactggcacctacgggatttcgggacctatcnattttantggaatcctaagcttgtattaaaaactnggcaatatccatcatggatacatnggagaagacacatttacaatcattcattgggccttttatctgtctatccatccatcatcatttgaaggccctaatatatgccaagtactcacatggtatgcattgagacataaaaaagactgtctataacctcaataagtattaaaaatcccattattacccataaggttcatcttatttcatttttagggaataaaattacatgtctatgaaatttcaattttaagcactattgtttttcatgaccataatttatttttaaaaataaattaaaggttaattatatgcatgtatgtatttctaataattaaaaatgtgttcaatccttttaaaa

SEQ ID NO: 264932 - DNA, 882 bp, Homo Sapiens
ctctggtggctctggcccagacagtatttgcagttcttgtgctatgggtgggagtcttcttcctcaagtttcggcagctgtgctgctgctggatgggctgctcctcccagggctcaagggctgtggtccgctcagggtctcatttccccaggccaagttcaaggcagcagccctttgtgaggcgctcttggccctgggcctggagggagaactttaagcttttttgctcacagggacgtggtatgggccctgggtgcaggtgcccacattctgctaatgagagctttgtctgatcagtcctgggtccatcagtttgtccatgtgtccggctgccagcccgtcccttgggatccttcccctggggtgtagccttgttcattagtatatactcattccttcatgctttcctcagcagaacacttccacttctgaggtgagcttttgccccatgcccttcctccacaggtgttgcctttttataaagacctgatagcagaataaattggtgtttccctgttgacccagcaccatttctgtgggcctagaatatggccctcaacccttagagtggggcagtgagggcttgaggagtgacccttcctttatcatggttttagtcattttggctgccagcccttaatggcacagatctgctgcttctaacagatggccagggaggtgacaccgatttcagccatttgccaaggttaagcaccctctcctttgaggcctagggccacactgttcattgtcactttaggcaagtgctgtttggctttaaaggtaagcctgcagctggagagaagcttggtaactgatgactcatttctggtcttaagatgcggctcctaagggccttgatggatgcaactctctagcccg

SEQ ID NO: 264933 - DNA, 970 bp, Homo Sapiens
gtatttcactttacactgtaatgcaaacagcttttatgttttctttgacgaagaatcataattgagtcactttaggtcttttagctggaagaatttcaccctaaatgaaaagttaatgcattttttacaaggattaacatgctaactacaacttgccctttcagcagatgacaataagggattctgaaaagtttgggactgtctttttctttttgtatacaaataaagcagcagatcctttctctgtgaaggttgttgcagagctcccgtaccagcttataaaatgcggctgtttaagcaggacttgggtgggcagcagaattctgcacatgacgagtggctgcagcttagaaagcaaatttcacctgattccagtactgtgattttaaggaaacggtaaaactcaaagtgccagtaatgccatcaaggctcagtaacatgccatttcctcagcagcttaaagacaaaaagaattattttggtgaggggatagaaatcctttcgctttgcagtgacacccactttttcttagcttggcttgggagtaaggagattggagtgtggggggacattagaaactcatttaaggcaaactgaaatctccttcatcagcagtcttcctgctggtgtagccacagcagaactccgaggcttgcaggctgggctgtctccttgctgcctggcctgggtgtttatttgggcaatgcaagctgacattgtgaggtgttgccgatgcccaggccagctagcaggggccctcccagggctggtagaaacctatgtgtatatatattctcaaatttaaatagattgtacatagtgaaatgtaaatgacatgtaaaacagcaatctctatttttcttaactattatatagcagtatatatttgttgaacatgcttgtatactcttcattaaccattttaatattttgtacagataagttgattaaatattttattcataaaacc

SEQ ID NO: 264934 - DNA, 502 bp, Homo Sapiens
aggcaggactatttttaattatttttaatacctgcaaaagggaatctgcacatgcacatccgtgtttctacagaaatctgcgatcgatggcagatctgtttgcctttgtgtgtccacatgaaccatttggcaaaggcatccaatgctaacggggcccaccaactacaacggaggcaacaactctgtggattttctttcacagaaagagtaaaatttcattcaaccgttccattttttgcctcctgtgattctaacgatgaaatttaaataggaaaatgtttcaatcgttggagtaaaacactctttaaaaaaataatgcttcgaaaagtaaagcaaaatcttttaccaaaataattctttcacttttcaaattgttctgtccacgagccagtgtaataaacaagtgaaagaatcacattctgtaggcttaaagaatgccaaattattactttttcgcttgcccttaatttgagtggaaaaagctaaggaaaataaatgactc

SEQ ID NO: 264935 - DNA, 1045 bp, Homo Sapiens
  misc_feature (993)..(993): n is a, c, g, or t
ggtgcagttgtgtgtgtgagggttagattggagttgtaagtttttttagtttgtatttatctgtgtagggttttggtgtttttatagtggtttatcatgattgtgcgtttttatgtttgtattagataggttgatccctgatgagtagagctttgtgtaggcttattggatttgtcggagctagggagcacactttatcctacgggcctctcatatgacatcttggtgcatggcagtcgagggctataccatcaccggttaagttctacgttggggtggttttattctggagactttaaatatttaacatgtagctcatgtaacttcagcatccactagtgactctgctggtcagcacccaagggctggatgagtctgaggaatctcctttaaccccaaagtatgaatgctaaagagtctcaaggaaattttgattcccagcaagagttcacaaaccatcagaccaatatcaataaggtaaactgtgactctaatgctccacaaaagtaaaaagaaatttccaaattaaatgtcatcttctgcccaaccctagactccagactttgtaacaacatttttatctagtataatagactctgtagtagactgattttgaccgccacaaagagtaggagttgtcaaacttgaggagatagactcctctccctggatattgatggctgccagcatacacctcctcatgacagtcccgtcggtacacaggcacaatctcatccagcaaaggcttgttggcattctttttggctttctcttcacaaccgatgttttcttcttcctcctcgtcgtcatcgctggactcactgacatgcacgctgacagcagtgtttggagagtctgtccattcaaaatacaccccaaacccaatgtcataattgtctgtggcaaattcccaaaagagatatgatccttcttcatgggtgggtactcgaacagtgaccacttctcctcggcccactgtaatcacggaaatcntgcatcctgctgaatcttctctttgaagtctttgatctgaggtcgtgtccaa

SEQ ID NO: 264936 - DNA, 783 bp, Homo Sapiens
aattcggcacgagcggcacgaggcgagctctgactgaagatgggcctttgaaatataggtatgcacctgaggttgggggagggtctgcactcccaaaccccagcgcagtgtcctttccctgctgccgacaggaacctggggctgagcaggttatccctgtcaggagccctggactgggctgcatctcagccccacctgcatggtatccagctcccatccacttctcacccttctttcctcctgaccttggtcagcagtgatgacctccaactctcacccaccccctctaccatcacctctaaccaggcaagccagggtgggagagcaatcaggagagccaggcctcagcttccaatgcctggagggcctccacttttgtggccagcctgtggtggtggctctgaggcctaggcaacgagcgacagggctgccagttgcccctgggttcctttgtgctgctgtgtgcctcctctcctgccgccctttgtccctccgctaagagaccctgccctacctggccgctgggccccgtgactttcccttcctgcccaggaaagtgagggtcggctggccccaccttccctgtcctgatgccgacagcttagggaagggcagtgaacttgcatatggggcttagccttctagtcacagcctctatatttgatgctagaaaacacatatttttaaatggaagaaaaataaaaaggcattcccccttcatccccctaccttaaacatataatattttaaaggtcaaaaaagcaatccaacccactgcagaag

SEQ ID NO: 264937 - DNA, 554 bp, Homo Sapiens
ggcagcggctgtgccatcgccctgtggttcaccctggaccctcgacacagcgagcgggtgagagcagctcgagcgggacaggctgcaggcagatgacctggtgaagatgctcttcagcccagaagagatggacctctcccaggagcagcccctggatgcccagcagggcccccccgaacctgcacaagagtctctctcaggcagtgaatcgaagcccaaggatgagctatgacagcgtccaggtcagacggatgggtgactagacccatggagaggaactcttctgcactctgagctggccagcccctcggggctgcagagcagtgagcctacatctgccactcagccgaggggaccctgctcacagccttctacatggtgctactgctcttggagtggacatgaccagacaccgcaccccctggatctggctgagggctcaggacacaggcccagccacccccaggggcctccacaggccgctgcataacagcgatacagtacttaagtgtctgtgtagacaaccaaagaataaatgattcatggtttttttt

SEQ ID NO: 264938 - DNA, 879 bp, Homo Sapiens
ctgtatgtacgggtacaagttgggaatgagctggtcttgcttcatggctcattcctgaacgaaagtgtgtgatacctacatctgtctgtttggaccacctgaggtcggattgggggatgagcacatggcccattgagagcatgccgagtccacccaactcccttaggggtgtagtacacaaccggggggaaccgacttggcatcttggagttgagtccaatcttgatacgtgtctggattttgttctcacacttcaccagtaagtccaagagctcttgggtgttcaccacagcctcccgaaagtatgtcataaggccaatgagagctgtattccacttattcacaatcttggtgaaggtggtggacccagaggccatgagaatctgacgcacgcggttgtggaagcgctgcattgactcatcgtccacacgcaggaaacactgagctgtgcgctccttagtaacctcattctgcaggttccagaccccgtccttgtgggtgaactcctcatagctggtgcggcacttaggcaggatgcggcactcgaagccacacatgttgaacagcaggttggggttgtccttaactgtacacaggacacgaagctgttctccccactgaactgtagtcactgaccgtggcaagcggttcttgatgtcccagaataccgcccggcctctgcccacagagaacacatggtcacagcagtttcttggaaggaacttcccttcaaaggccaactgatgacatcctgacacagccacgcctctcccacccaggacgcagcctcaggtatgccctctctgggcccttagcttatgtccttccagctcacacagccccaacctagactcacaagttaacatcatgtttcatgag

SEQ ID NO: 264939 - DNA, 1019 bp, Homo Sapiens
  misc_feature (895)..(895): n is a, c, g, or t
ttgagaccccaagttcaaaatatccccctaaatttccatgcaaatcaggaaagaccctagctattgccccagggaagggcagaccatgagacaggtctcttttagctccaaactaaaagttgttcagcagctaaaatcctgaagacaaaaatattgcaattaattaacttggaaagctacagatatgcctgtccaaatcttttgttaccaagacacaattttaagatcaaacaattgtcaaggtaggccatggcttgttggcagtagtaggggccctatggcctatttccaggtatgggtggccccttttccttggttatctggggaatctgccacagcagacagcaaaaggtaaaaagcatccctttaataactacaccccactccagcaattgaggtttattcaggggtgggtcaaagtagtacaagacaaaaatagcttagtgaaatggttagaatccagactgaggtgccagactgcctgcatctgagtctcagtcccaccatgtatgagccgtgtgaccttggggtgagttactagcctccccaggcttcaaatctctcacctgtaaaatgggaacagtaacaatacctacttcatcccgtctgtctggggactgaatgagctaatatgtgtaaagtgcttagaggagtgtttggagcatagtaagtgctgtgtgagtactttcaaaaataaaaacaagaacttggggaaaagtgctctctgaggtttgtagggcagtgtatgctacttaagtgttgaagcatattttcattctaagaagtttagcatctggatcataaagtacatcaaccctagggaagtcttggggctaacttcagttttggaaattcttccaagtctgaccagagaagatctcttcaaccacctgcntctaatctatcaataccctaacataaaccctagtctccagggacaatttgagcccaaaccagctggggagggagcagaaggcaggcatggggagaaaggaaccaggtgctttcctaaatttctt

SEQ ID NO: 264940 - DNA, 690 bp, Homo Sapiens
gacatgtcctttcccatgaggccttggttcagagccccaggaatggaccccccaatcactccccactctgctgggataatggggtcctgtcccaaggagctgggaacttggtgttgccccctcaatttccagcaccagaaagagagattgtgtgggggtagaagctgtctggaggcccggccagagaatttgtggggttgtggaggttgtgggggcggtggggaggtcccagaggtgggaggctggcatccaggtcttggctctgccctgagaccttggacaaacccttccccctctctgggcacccttctgcccacaccagtttccagtgcggagtctgagaccctttccacctcccctacaagtgccctcgggtctgtcctccccgtctggaccctcccagccactatcccttgctggaaggctcagctctttggggggtctggggctgacctccccacctcctgggaaaactttagggtatctctgcgcaaactccttcagggtcgggggactctgaaggaaacggggacaaaaccttaagctgtatacttaggcccctcagccagctgccattagcttggctcttacagggccaggcctccttttctgccctctagcagggaggtttccaactgcttggaggcgcctttgcggctgcccttcgtctggagtcactgggggcttccg

SEQ ID NO: 264941 - DNA, 832 bp, Homo Sapiens
gtccttcagacaccaacagcagaatctccagcagagaaagtgccagaggagagtgtcctgcctctggttcagaaaagcacactggctgactactcagcccagaaggatcttgaacctgagtcagacagatctgctcagcccctccctctaaaaatggaggaattagcactggccaaaggaatcactgaagaatgtctgaaacagccatctttggaacagaaggaaggcagaagagcttctcatacccttctcccaagccacagattgaaacagtcagctgattcatcctctagccggtcctcctcatcttcctcctccagttctagatcaagatctcgctctcctgacagttcaggttctcggtctcattcaccgctcagatccaagcagagagatgtagcccaggcacgtactcatgccaaccctcgtggtagacccaagatgggctccagatcaacatcagagtccagatcaaggtcacgtgcacgtactcgttcagcatcaagcaacagcagaaaatctctgagccctggagtctccagggacagcagcaccagcctatactgaaaccaaagatccctcttctggtcaggaggtagcaactccaccagtgccacaactgcaggtctgtgagccaaaggagaggacttccacctcctgcatcctctgtccaacgcaaggcgtctgagtcagcctgaatcagcggaaaagcatgtgaccccagaaggaacagcctgagcggggaagccaaaagaagagtgaagcatgagagagcacacccaccagcaggcacgagaccaaaccaagaacacaaaccagcagcggcacaaca

SEQ ID NO: 264942 - DNA, 827 bp, Homo Sapiens
  misc_feature (628)..(628): n is a, c, g, or t
  misc_feature (795)..(795): n is a, c, g, or t
gtcagagattggttggtttgccttgcaaaacagaaaaatggaattttagctcaaaaagtagaatctaaaatcaacacagatgtacaactagattctcaagagaaaattggagttaaaggtgagctgtttcaagaggatgaccatgaagaatcgcattctgattttccatatggatcatttccctatgttgctagaccagtacactggcaacctggtcatacagcttttcttgtcaagttgaggaaggtcaaaccacaacttaactgagtactccagatgacagtaactgacttgaagatggaaaaatatcaaaatagaactttatattgaaaatcactgcttccatagattggcatttttagctattactatgacttatataacttatacatataattttgacaaataacaactaaaagatgtataaccatagcaaaactgcttaaacatcccattttggacacttggtctttgcagttagtttggacaatttgtagttaatgattccaaattgggtttagttggggcccatctcaattcttcactttcctggtaaaccaattcccataagatttggtcttttcttccaagaaaatttagttttctttcccttttaattggatcgaantggctcacttggacttacttggagatttacaacatttggccttttttcaacgaaatctccacaaacaataacaacaacaaaaagagggcgcggggaacgggccttaagaggtatatcccccttcggaagggggggcgccaaaaggtatacggagtatcccccacagngtttcttggggccaccacggtggtgcccctag

SEQ ID NO: 264943 - DNA, 685 bp, Homo Sapiens
tgttatcttcatactgcgtgtggagataaaacacagcttctcctgcacctcttccccaagactggtgcactccagcgacctgagggggctcgcctcagtccccagcactgaggttacaaagggagaattttttaatgactcttaggcctgtggctctagagttgccaaaacatcttaggcaacgagaaacgaacggcagctagtaccatgtgggcacgtgtgtgtggttgtccacaaggactcacccaagtaatagactggaatggttaagagctggccacacatacgccccgcaaagctggctgctaccattcgttccttgttgcataaaacattgttttcaaagccaaccccactacttagccatcatttagagactagactatccaatgttatgaacatttttaacaggtttcaagcaacagctgataaggtattcatctcttaagatattttataaaacaattccatggaaactttaagacaggcctctctgcccaccgtcatgtatgaagataaaaaacacagtttcccctgcacctccctcaagactggtgagctccagcaacccaaggtggctcgcctcaggagagagtggatgcttccacgcctggggcttcatcactgagagaccagcctcagcgacccattaggagcacaacgaaatgattctgacccacggtcc

SEQ ID NO: 264944 - DNA, 752 bp, Homo Sapiens
gcacgctggatcgtctatctgattccaaagctgtcctttgccatctcatcccttggcctgccccccaaccctgaggatgcccctgccatccccccaacctcctcatattgcctctgaacccagatggcaatccatcccggttctctctgagggccacgggcttgggtagtggaaagggtgtttgggaaattgttaaatcagttacccgtagtagagctatttcttgtacttctaagttttctagaagtggaaggattgtagtcatcctgaaaatgggtttacttcaaaatccctcagccttgttcttcacgactgtctatactgagagtgtccatgtttccacaaagggctgaaacctgagcccggattttcactcatcccctgagaagcccctttcccagtagggtgggcaattccccaacttccttgcccacaagcttccccaggctttctcccctggaaaactccagcttgagtcccagatacacctcaatggggccctgggcagccagcattcattgtaagttccctctttgaaaactggtgtgtgggtgttcagttctgtgtctggtgggtatggacagacagtaatctcctgtgatctgtgctagctgtgaggcagctctggaacgtgaagagctgtttggtttgaaccgtgaacaaaactgtgttttgagtttagctgacattaaagaaaaaaagttcatcacgtgactgttaatgtaaacctggttattaaaataactatgaaa

SEQ ID NO: 264945 - DNA, 858 bp, Homo Sapiens
  misc_feature (58)..(200): n is a, c, g, or t
  misc_feature (204)..(218): n is a, c, g, or t
  misc_feature (238)..(368): n is a, c, g, or t
  misc_feature (421)..(506): n is a, c, g, or t
accagttgggtaacataggaagagcttgtctctacaaacaaaaatttaaaaacaatgnnnnnnnnnnnnnnnnnnnnnnnnnnnnnnnnnnnnnnnnnnnnnnnnnnnnnnnnnnnnnnnnnnnnnnnnnnnnnnnnnnnnnnnnnnnnnnnnnnnnnnnnnnnnnnnnnnnnnnnnnnnnnnnnnnnnnnnnnnnnnnntttnnnnnnnnnnnnnnntccatgatgaacaaaacaannnnnnnnnnnnnnnnnnnnnnnnnnnnnnnnnnnnnnnnnnnnnnnnnnnnnnnnnnnnnnnnnnnnnnnnnnnnnnnnnnnnnnnnnnnnnnnnnnnnnnnnnnnnnnnnnnnnnnnnnnnnnnnnnnnttacaggagcctggcactatgcctggctaattttggtatttttattgggagannnnnnnnnnnnnnnnnnnnnnnnnnnnnnnnnnnnnnnnnnnnnnnnnnnnnnnnnnnnnnnnnnnnnnnnnnnnnnnnnnnnnntgagccaccgtgccggcctaaataaaattttgaagaggctagaaccccgcactcgtgccttgagcttactgacctcaacaccctggtcccactaaaactttatttacaaaattatgctgccggtctgcaggatgtagtttaacaatttgattattttggatattaaaatattttttaagtcttgaaaatattgtttactattaccaaagtttttgaaccttcttaaattctgtaccagaggtgagtgccacaccctaacctagtctgagtttttatgcgtaaagatcataaaacgttgtaagttttctaaaacacataagctctcaataaacgttagcttatcaggggtcaa

SEQ ID NO: 264946 - DNA, 1383 bp, Homo Sapiens
ctcgctgaagccgaagctgctagaggcactggacgagatgctgacgcacgacatcgccaagctcatgcccctgctgcggcaggaggagctggagagcaccgaggtgggcgtgcaggggggcgcttttgagggcacccacatgggcccgtttgtggagcggggacctgacgaggccatggaggacggcgaggagggctcggacgacgaggccgagtgggtggtgaccaaagacaagtccaaatacgacgagatcttctacaacctggcgcctgccgacggcaagctgagcggctccaaggccaaagaccttggatggtgggggaccaagttccccaattcaggtgctggggcgcatctggaagctcagcgatgtggaccgcgacggcatgctggatgatgaggagttcgcgctggccagccacctcatcgaggccaagctggaaggccacgggctgcccgccaacctgccccgatcgcctggtgccaccctccaagcgacgccacaagggctcctgccagagtgagccggtgccacgcctctccacatggcacctgctgtggctccccagactccagtcggcatgcacgcacacccctgtctccggctcacacacgccctgacctgccctccctgcccagcttgtaaggacacggtgtggtctccccatcctcacatacctgccagaacaccccgtgtgggcagcattatagaggcggaccactggtgagaggacaaaggctttactctgtcctgcccattcacaccgtccagacctcacgttacacattaggacacatccagcacaccaccacctggacacaagcagggcatccattccatccgtcagttcattcaagatatgcgcatagcggcacacttactagtgtggccccagaccctgtacctagagccacctggtggcatttacccatacgagcaacaatcacatacgcaccacactaccctctgcccatcactggcaccggctgaccgttcccatcgcacgagggcacactaacacacggtctccgcacaaagcagcacacctagtgtccttggcatgtgggccgcctgcgccccttccccttgcgcttgagcagctccatgttcgcgtaggacactgacgtagcaagatcacacatgaccccctttctcgctagcggatagtccatacaatgtgccgccaaggccagggtcccagcaacacccttcacacggtgtctatcaatgcaacacttccctacacggttcgtgccgggcaaccactggaggacgacttaaaccaaggcgcacatagcaaccacctcactggcttaccgcacgtattgcgccccattacgaagagaaccactatccacagacttcgcagtgaaaagaccatc

SEQ ID NO: 264947 - DNA, 831 bp, Homo Sapiens
tttgtctgtgttataaatattggatttggtatttatacagtaataagtccatgtagacctgaaaaagaaacccttaatagaaaagtaaaagacaatgtaaaattagattttgttgaagggtgttataagtgcaacttaatccatatgcattccttttaaggcattttcacttgtccaaatatctcaacatgtacatcaaggtttatattataaaatgggctccttttgtattcattcaagacttaaagaaaaaatacatctcaggactaagtgtagcacttggcccacatgtcatgtagtgggtaatagaattaggagctttgttgctccctagacctgctttttgaatttctgctttcttgtactttgtccacattagatgctgcagtggtgttgctgtcagcagcagctggtggtgaatcaactgatataggcagtctactgtccttggtcaaaaaatcatggatgcttgtccttcgtgtagttccttcggcagttgagatcacgctgcttgcacgaggtaaagttgcataagggttactatcttttgattgtcgtgacagagaagattcttttactaattttatttttccttgagtgcctggtgtaggttttcccgcagaactaatgaagtaggtatcttcagtttttcgaggaccaggtctcaaaaactcaggcttagttgtccgtctatcatagaagtcccctggggtttttccacttactgacctggccagaccacagctaactggtttgtcttttcccaaaaagtcagaagagacagacaaacttttcattacttcatctaaaagattctcttgacttgaggac

SEQ ID NO: 264948 - DNA, 597 bp, Homo Sapiens
agtggggacagggcttgggcagacaccagcaggaataatttgaaatgtgtgaggtgactccccggagggccttgggcttgggcatttgggaaaagaatgatgtctggaagggcttaagggacacagtggacgaggggagagtcctcatctgctggcattttgtggggtgttagtgccaaacttgaataggggctggggtgctgtcttccactgacacccaaatccagaatccctggtcttgagtccccagaactttgcctcttgactgtcccttctcttcctacctccatccatggaaaattagttattttctgatcctttcccctgcctggtctagctcctctccaaacagccatgccctccaaatgctagagacctgggccctgaaccctgtagacagatgccctcagaattggggcatgggaggggggctgggggaccccatgattcagccacggactccaatgcccagctcctctccccaaaacaatcccgacaatcccttatccctaccccaaccctttgcggctctgtacacatttttaaacctggcaaaagatgaagagaatattgtaaatataaaagtttaactgttaa

SEQ ID NO: 264949 - DNA, 679 bp, Homo Sapiens
caaagtgcaaagcaatataaattagaggccaagacttctcttgacggtcgatttacttctgtaaaacagattctatgttccttttctatgaacagtttacatttgaaacattagattttttcactaatgagggaaggaaacgggcttctgtgctactttcaagtcagtgaagctaaggtctccttctcaaagtagagctggaatcagaggtgagaaatgtcgggacttgaagagttaggctgctttgcatctacccagcgtctagaaccaattccagcttcataactcagctgtgaacgaactcccttaggcattggtagccacgtagccagtagttcaagactagaaaacccggaaacgagtgaaagtgcagactgttatctagagatgtaagtgtatgttctggagggggaatgggtctcattctgggcactgggaggcacatttaagaaatcacaaatcaaaatagtgtcatcatgggagctgctgacgatttgaaactcatcaaactgtaggcaaaacacatgtccagaatgttccaccaatgtgcgcaaacacaatgtgcttgctggggctcgagggtcaagagcggcttgcaagtcctaaactttaattttcccatcataggcccggctgaccatcctcttgttatcaaactggatgcatcggaccaattctt

SEQ ID NO: 264950 - DNA, 509 bp, Homo Sapiens
  misc_feature (255)..(263): n is a, c, g, or t
gaacattttaatgggtttcccttgccctttccatatttaacctatttccacattctctctcactcacattttctcagtgtgcccttctcttatctgccatgtccatagccataattccaccatcatacagatcaggcagtgtttaaaatgatggtaggtagcacagtggacagtcttgatcatcatgtagaatatggctatgaatcaggaaagagattagaacatttaataatgtatgtacagctggtgcttagnnnnnnnnnaatctaaatttaattaccttatggatatttgatatttggttatttaatcacagtcatctttaacagcttacactgattggtgttttatctcctgtgatcctttgatggctttttttgcctaccatttcacagaggtttagacagcagtagtagctccctaggagagtttactgatgaaacagcctctgcaagattttaaaagttttgttcttttatagactgatttagaaaaacaaatgattagtt

SEQ ID NO: 264951 - DNA, 998 bp, Homo Sapiens
gtttccttaagaaaataaatatttccacgaggtcaagccaaagtacaggggctggagacggggtgggaagtggggcaaacactttagatgagcacagtagctcctgctagctgggacatcagggcactcaccatgtccctgcacaagatgctcacccactccaccttcccatcctggagctgcacaaattgtccctttcttgaagttgatgcaatgtgtctctgtgttagatatgagctcccaactgggcccaaggacttggggtgatggaggctgcaggctcttgccaaagccaggtttaaatccctgtttctattttaccagcagggaagaaatgagagtcgagttgagaaaatgctcagttaagacagtcagtcacgggacagctgtatcctcaggaccagcctgtcatcgataagtccaagccctggctactgctgctggagaggccaaagggaccattcttgcctttcagcgccgtcggaaagctcgagatattctccaggcattgggttcctcatagcggttgtacaaggggttcaagacgctgttgcttcttctgtttgcttagcttagttgggtctgagaccttgaagaaggctggggcaaactccacaagccaccgagggtcgatggtggtaacttcacgcatgtattccttggtggtgagcaccagctcatggtacaccacccattctggctgtctgttgaagagggcactggaaggatggatatagaccacctgctggtcgatcagtgtccggtaaccctcctgcgggtctttcttggcagcattacggaagaacccactgcagatggccttctgcactcggactgtggacttgccacaggaaacaacatccagcttgtgtctgtccattatgcctaacatctgcttgcgaatgtcctgggcccggcgcagggaacgagcctggataaagttctcatagcaccatgggttggagaacttgttgttcttccaggagcgaacgcgtggg

SEQ ID NO: 264952 - DNA, 642 bp, Homo Sapiens
  misc_feature (37)..(37): n is a, c, g, or t
aaatcctcccttcactgggagagaacttctctcccanggcggtgcgacccggagctccagcgccctgggagaaatcctcccttcactgggagagaacttctctcccagggcggtgcgacccggagctccagcgcccgagtctccacttcgtttgctgaaacttgctttctaccagctaagaaccatgctgcgagtgattgtggaatctgccagcaatatccctaaaacgaaatttggcaagccggatcctactgtttctgtcatttttaaggatgagaaaaagaaaacaaagaaagttgataatgaattgaaccctgtctggaatgagattttggagtttgacttgaggggtataccactggacttttcatcttcccttgggattatggtgaaagattttgagacaactggacaaaaataaacttaattggcacggcgactgtagccctgaaggacctgactggtgaccagagacagatccctgcacgtacaagctgatctccctgctaaatgaaaaagggcaagatactggggccaccattgacttggtgatcggcctatgatccgacttactgatccaacatacaaatgacctgagcgggcccagcgtgccaggcatgggaggagatggggaagaagatg

SEQ ID NO: 264953 - DNA, 1241 bp, Homo Sapiens
  misc_feature (432)..(432): n is a, c, g, or t
  misc_feature (983)..(1070): n is a, c, g, or t
  misc_feature (1077)..(1091): n is a, c, g, or t
ggtttttcttagaggaatttggcctcccaagtaagttattgtggggggtcacaagggaatatcttcttttgaggaccatcgcaaacgcccctttgtggggtggacaccgttgtcgacaacatgcacagggaactctgggtattgggggttctcaagaccaccaagttgaagaaatattgttttacccaggagttctgttgcttgactcaatccctaagaaaatgtgccacaagttgcaccccttgcaattcgataatgtgtcctgtgtgcttttaaaaagggtttcctgaatcgcctaccaggggaaccttggtttttcaagcctaaatacgtggaattgtccaagattaacaagcttggttaccccgaggataccctggaatgacccagttaaatgaatcctaccacaagggttcaaaactataggctaanaggttttcaatcaattgtttaaaatgggtctggtcccaaagaatatcttttggttttgtttcccccttgtgacctgtaatcttgaaattgagtgtatattagcgtttgcattgtctttttcttaagagacagggttttattgtcacccagtatagtggcatgatgatagctccctgcaacctcaaactacagggctcatgcaatcttcccacttcagtctcccaagtatatgggactactgtggtgtgccactgcgcctggcagcagttgtatgttttatacagataactttctaaaaacataagcagaaatcaaattaaaggataaaatttgcccacagtcctgctatctgcaaattaaattgttcatgtaaaattttttagtgtttttgtttctatgaatttaaaatatgaacatgtcttatatctgaaggtcagatacagaagttatttttctagggtaattgtcctctgaatatatgaagaaataatgttatttgatgtttcctttaaaaaggaagtctgaagctgggcgtggtggctcctcacacnnnnnnnnnnnnnnnnnnnnnnnnnnnnnnnnnnnnnnnnnnnnnnnnnnnnnnnnnnnnnnnnnnnnnnnnnnnnnnnnnnnnnnnncttctcnnnnnnnnnnnnnnntagggcagggggagtctttgctaacaatttagagaaagaggtgcaggaattaaaataactataggaagtaagataaccatagggtgtgaaggcaccttggcacatagtgaagctgttagtccttccaaaaaggagaagactccatttctg

SEQ ID NO: 264954 - DNA, 704 bp, Homo Sapiens
  misc_feature (37)..(37): n is a, c, g, or t
  misc_feature (42)..(42): n is a, c, g, or t
  misc_feature (74)..(74): n is a, c, g, or t
  misc_feature (90)..(90): n is a, c, g, or t
aaagtcaaaccctctccatacgggaaattaacccttnaactnaacccctgtgccaaagaacatcagaccccaangcaaagaggccccggncatcaacctgtgcccattcaattttggcatacacagtctcacctgaacaacctaccggactaatttaaaattcttcaaaggaaagccttgcacttctcttccaaagacagccaagtcacattttattgaaatgctctcttaatttccatcacttctaaaactcagcaagtctaaactcttcaacttaggtcgtgtctcaagttactttttcactcaccaatcagaaagccgtacacttctctctactgaataacagagttggcggtgagggggtgcaaaaaatggaggactcttggaaaaataagacataaaagaaaaattacagagtgttagtttggaacgacatgcattcaggacttatttcttaggacctgaggggtaatgcccatgcatacagcttttattccaagtcatctatgctacagatataggactaagaaagaaccaagtcatcttcctccttcgatctcccttccaggacttcaacagtgctcctacgtttactgtcgtccaaaccagggatgcaaatacattcagttcaaagacttaatgcttcttagctcacattaagtccaaccccgagaatccactgataacaagtaagtaaagggatg

SEQ ID NO: 264955 - DNA, 411 bp, Homo Sapiens
attgcaccactgcactccagcttgccctcataggtcagcttattacttaaggacataattttactaagggaattacaaaagataactttagttttggtagatggaaacaaacatgaaaaccactcctagctaacactgttacaaatacctgttcattctgtactgcacggttaactgtacaacagcactcttattctgctccagcctcttgaataagctttcactcatgccaagagctctgtcaataaatcagattcatgtttatcagtgtactaaatctgttccttgaaaataatctagtttaaaattaacacttaagtgtctgcctaccttgcttcacggtttagcaccaggggaggaagctgctgatgggtcccccactaacacaaatctccgtgaaaaaagaagggg

SEQ ID NO: 264956 - DNA, 547 bp, Homo Sapiens
caaggccctgagccccatgcccagccctgccttggtccctgagcctcagagcgtggaattgctgccctgtggacactggctgggaaggcaggtcttcccctagcacatggggaccccggcctcgagggtgacctccctaccttgcccctgccagccaccaagcgcaggtgcagcgggggccagactcctgccggcctcagaggacacctggcccagcacaggcagctagaagggccggtgggcaccggggccgggaagcccccacctcaccacctgatgggcccctgggaggctcctctggcctggctgggctgggtctggggccgccacaggcccctcacggggcggcagaggcaacttcagtgtccctgttagagcaacacgggtccctccgtggggggctgggtgcggccccctgccgtgtatttcctccccagggatgtggggcctccccgggagctgacgccaccaccctgcttagccctcacagggccccaaggtgtccgagtgtgttgggtctgaacgcgaaataaagaaatcctctcag

SEQ ID NO: 264957 - DNA, 356 bp, Homo Sapiens
  misc_feature (161)..(161): n is a, c, g, or t
ataaatgtaaagtatactatctactttaaagcacactaaaagatatattttaacaaaacagccaatttccaacccccttttctaattctggcacaggtaacattcaatccattcgaatcttctggtttgtcatcctataaatgatgctatcatatccaggnatccatgttccaaatattgtaagaggtgataatcacagccaaggccaaggcgatcattatccaaagtaccatgttgaaaaccacgggaatattcaaaattatacttatatgcaaggttatagggacttgctgggttcttcgcttgttttgcctcaaggatagtccttgtcttcctaatgagggaggtgtcaaatg

SEQ ID NO: 264958 - DNA, 876 bp, Homo Sapiens
  misc_feature (48)..(48): n is a, c, g, or t
  misc_feature (53)..(53): n is a, c, g, or t
  misc_feature (55)..(55): n is a, c, g, or t
  misc_feature (257)..(257): n is a, c, g, or t
  misc_feature (585)..(585): n is a, c, g, or t
ccagagcctcctcagcctcctggttcactgctgcagtgccccagggcngagantngtggggaatgctggggggcaccatcttgagtccagaggcagccaaagcagtggcagtgaccttggtggagagtgtgtgtcccgatgcagctggtgcagagctggcctggccccccgaggaacacgcccgggccaccgtgggagcgggatctccgcatttggccggcgcttccgcgaacagcccctgctcttttgagctgttnaaagctggtagcagctgcacccccagccctgtgctactgttccgtgctgcttcgggggctgctggccgccctcttgggccattgggaagcctctcgccaccctgacacgacccactccccctggcacctggaggcatcctgcaccttagtggctgtcatggctgagggaagcctcctgcctccggccctgggtaatatgcatgaagtatttagccaactggcacctttcgaggtgcgtctgctgctgctcagtgtctggggttttctccgggagcatgggcccttgcctcagaagttcatcttccaatcagagcggggtcgcttcaantcgggacttctcccagggagggtggaggtgagggtggaccccatctggctgtgctgcaaagtgtcctccaccgcaacatcgaccgcctaggtcttttctctggccgtttcccaggcaccttcaccgtccactctccttcgacaggggacgtagccttttcttgctctggaagcccagggaggttgagcagtgagagaggggaagggactaacgtgctccggaagggtggaggtttctcttctaagtccttggtctaaaggagcgctgtcacttttttctctcccacttttt

SEQ ID NO: 264959 - DNA, 650 bp, Homo Sapiens
  misc_feature (295)..(307): n is a, c, g, or t
tgcccccaccccagtcttcccagtgagaatcctgccagctgggtggtggcctggcgcagagtgggagaggctgccactgacaggatggctatgacctgggacatggaaacagtgacctccgcgttctggtcccgagatcctcgcatcagcgtcatcgtgtgcaccggcttggggggctggagttccggttttctttgttttttctctttattcgtcctttctcaaagatgggatactgatcagaattgctctgtatatgcttgggactggatggaaagactttggagcagctgtnnnnnnnnnnnnnacaccgacaaccaaacagacgtgctggctccagtcctgtttttactttcaaaaaccaacaagcccgacagtggagcctgacccctcccgggagggtgctcatggccccactcacctcatcaccccacggaaacctttgtgtcttgccctggaagacacccgaattctttgtacattgacatgcccttctccttcctccctcacctgtagctggtctttgttttactccctccctttctgatccatgtatatcatattatgtgagatatcatctgcctgaaaaaaagactttgtgcggattattgccgacaacaacatacgcctccaacgcgcgacacaaaggc

SEQ ID NO: 264960 - DNA, 600 bp, Homo Sapiens
cgtccttctcaaagatggatactatcagactgctctgtatatgcttggactgatggaaagactttgagcagctgtggggggtgggggacaccgacaaccaaacagacgtgctggctccagtcctgtttttactttcaaaaaccaacaagcccgacagtggagcctgtcccctcccgggagggtgctcatggccccactcacctcatcaccccacggaaacctttgtgtcttgccctggaagacacccgaattctttgtacattgacatgcccttctccttcctcccctcgcctgtagctggtctttgttttactccctccctttctgatcccatgtatatcatattatgtgagatatcatctgcctgaaaaaagactttgtgcggattattgggaacattgtagctgtttctgtgttttttcttaccttgtagtctggttctgaattaagagaggaaaaaaaagtaattatgatacattgtagtttgtgtacgatatatgttgataacgttttattaaagggacatcttttttccgcagcccttcctgacatgtttggggaatgtgggttggagtttattacactgattacaaaatgcaa

SEQ ID NO: 264961 - DNA, 582 bp, Homo Sapiens
ttccatatttgtcttatatatgtttagcaaaataatgagttaaatatgagcttttatgcttaagcgatggctgtgttttcgctcttaataaaatgcaccataaaattgatttttagtgccaaaattataaaaaggggttgggcttgtttcctcaacctgaacaacttcttaccttcaagatggatgattcaaagaggaataatagggaatttcttagtatgaagttacttggttgttttcttaggaaaacaaaaggtagaatttaacagcatggggcctgatttaaatagaaaataaatgtacagatataatcaactctgctgtcatggggatttcaagttataaatgcaataagtaacatcccctgacttattctatgtacttttgccctaatctactacctattagtctgaaacttgagtttttaaatttaatctctatgtaaaagaggaataaattgaatgcataattaaaatatatgttgtcaattatcacacctttttgcctagactataagcttcatttttcctgttatatccactaaattaatttatgcttgtttttccattaaaacaagttact

SEQ ID NO: 264962 - DNA, 1193 bp, Homo Sapiens
  misc_feature (13)..(13): n is a, c, g, or t
ttaaaaagattanccttgggaaaagtaaaaagaatttccttaaaccagttttatgaattctaaaacctccctctactgaagttttgattcaaatgtcttaaattcatttatactcatgggaagatgttaaattcctatattgaaagcgttcctcttgctaacaacgatagtgataaacattctgtcatcaccaagaatggcacctggagtaacaaagtgatacatacctggtaaaggagcaaaggtgctgcccgaattaaacagtatgtcaaacttggcatcaaaatgaccaaaatgtgctgaagaaacacatccctaaatctgttggttgacttatctttctctattgttatattcaggatgcttagagtgacaaacatatctagaggcaagtatgttctccaagtgaagaatcatttccaaggcatgcagtcctttaaaactacctaccacacagagtcattacagtcttggtgccacagtggcatctgttccattgactttctgtgcccactgcatgtcctctcctcgtcctgcacaagataatgcaatctcttccacttagaccgctacacaattattagaaaattgtatgtttgatagtgaccaatatagcaatgtttaggttttcaaagaaattttgctttttctatttagactgaccatgatataattccacaacagaacattctcatgctataaaaacaatcccatgcaataaatgtaattttaaaagtcccatgataatagcaacatttgttattatagaaggcatggttactttagatttgaaaaaaatggttgctatagaataaaagttcaatttcccaaatagaacttgtgttgtggtataaaatgttaaaatttggattcctagttttgtccaacacaaacaattttcaagatatacaccatgttctccctagttgggattttgaaacaataagcataattcttaaacagattactacaacatttgttcaaagaatcagctcctttttgccaagaactttctctttttcagtccagttggagggattgccgtagtaaattctggaacaacagttctgaacatgatttaaaatctgtctctcacttccctccctgccttttactttttctttatgttgtaaaagacacacgagcgtagaaaaatgctcaattttttaatagatgttaatatttttagtttc

SEQ ID NO: 264963 - DNA, 907 bp, Homo Sapiens
  misc_feature (296)..(296): n is a, c, g, or t
cagaaattactgccagccaagaggtccctggatgccgacctagctgtgctccaaattcagttttcacagtgtacagacagaattaaagacctggagaaacagttcgtaaagcctgatggtgagaatagagctcgcttccttccagggaaagatctgaccgaaaaagaaatgatccaaaaattagacaagctggaactacaactggccaagaaggaggagaagctgctggagaaggatttcatctatgagcaggtctccaggctcacagacaggctctgcagcaaaactcagggctngcaagcaggacacactgctctttagccaagaagatgaatggctatcaaagaaggatcaaaaatgcaactgagaaaatgatggctcttggttgctgagctgtccatgaaacaagccctaaccattgaactccaaaaggaagtcagggagaaagaagacttcatcttcacttgcaattccaggatagaaaaaggtctgccactcaataaggaaattgagaaagaatggttgaaagtccttcgagatgaagaaatgcacgccttggccatcgctgaaaagtctcaggagttcttggaagcagataatcgccagctgcccaatggtgtttacacaactgcagagcagcgtccgaatgcctacatcccagaagcagatgccactcttccctttgccaaaaccttatggtgctttggctccttttaaacccagtgaacctggagccaatatgaggcacataaggaaacctgttataaagcccagtcgacatctgaatatgtgaacaaatccaggctctcaggaccagacttcaccaggcttccttgtacccacaggtgaaacatgtgagcataatacttctagtatctcgataggttaggttacacaataagtcagc

SEQ ID NO: 264964 - DNA, 466 bp, Homo Sapiens
actctgtgctgtcatactgaactcactgctagctaagagacctatcagagatttagatatattttctccaggttttttgtgggttttctttgttgttgttgttgttctagccatgtgacagaggctctttctaaaagtatgtagttcgctgtgtgtcggctccagcagtaaccgtcctcactgcgccacgcactcctctgtagatgtgtgcccagtgggagttccttccagccccaggaccgcagcagcagccaggtgccgagtggattgagtgccaggtgcatccaagactttccctcccttccagaaggcactgactgaagacaggatggatcatgcggagccggctgaaatgctccaactttttcaaagtgtgggtggtccagtttggactgatgggaatcttcttgtcattctttttaaacggatgataccgatggaaataaaaggtgggaaatatattcaa

SEQ ID NO: 264965 - DNA, 961 bp, Homo Sapiens
agaacatcaagtttaaaagccagttatgaagcatttaagaataatgactttcagttgggaaaagaattttcaatggccaggaaacagtggctattcatcatcttcggcacttatgacaacattaacacagaatgccagttcatcagcagccgactcacggagtggtcgaaagagcaaaaacaacaacaagtcttcaagccagcagtcatcatcttcctcctcctcttcttccttatcatcgtgttcttcatcatcaactgttgtacaagaaatctctcaacaaacaactgtagtgccagaatatgattcaaatagtcaggttgattggacttacgacccaaatgaacctcgatactgcatttgtaatcaggtatcttatggtgagatggtgggatgtgataaccaagattgccctatagaatggttccattatggctgcgttggattgacagaggcaccaaaaggcaaatggtactgtccacagtgcactgctgcaatgaagagaagaggcagcagacacaaataaaggtggtccttttgtttgatgaagaaataaacttcagctgaagattttatataggactttaaaaagaagagaagagaaagaagaaacaatgcatttccaggcaaccacttaaaggatttacatagacaatcctataagatcttgaacttgaattttatgggttgtattttaataatgtaagtaaattatttatgcactcctggtgtgctatgaatattattccagttagccttggattatttcagtggccaacatatgcagacatttgtactcctcaacccattttctcaaagtaatgggcattctatgatttagacttcaaggaattccaatgatgaagattttaaggaaagtattttatattcaacaggtatattctgctgcatgtactgtactccagagctgttatgtaacactgtatataaatggttgcaa

SEQ ID NO: 264966 - DNA, 609 bp, Homo Sapiens
gtagcaccaggctctgtgaccctcacccaagtgggggggtggtcagtggaagctggggaggcttcactcagctcaaccctgcagaccccccatatgagaacccccctcctcccaccagctgggggagatgacatcactgctctctccatggggagggggctcacagggcaccaagttcgggatcctaggactggcaggacctgctggagcctgagatgggccccaggggcctgaggttgcctcctcctgtccagacccagccttggcacctcccaagactgccaagggccctaccatggccccacagcccccagggctggcagttccatctaggagggtgcctctaggccccactctcaggctaggatggagaggcagatctgggcctggtgaggtgacctgcttctggaggggcagggccgcacccgagagcagggacaggtgcccgaacacagggtctccaggacgtagcgcccccccgcatacttgaatgtatgtgcgtatttatggctcacgtctgtgccatgttgtcaatgggtcctttccaacccaagaggtacatttgtttttctgtttttcctgaaaaataaagtcggccaagtgagaaac

SEQ ID NO: 264967 - DNA, 679 bp, Homo Sapiens
cccacgcgtccggctttccccacctaggtgggctgcaagggcctgcattcccaacatcccattgtttcccactccagaaagtctctgggtttattccagctttttatcttgacgtgtcccattcacccccatggttaggtttggtttggttttgttttttaaatcaagaaagtttcagggaatcaaaagaggtcggacattttttaacctagcagaagtacagagtagggttcatttttgaaaggttaaaccacactgtttcaggaacttgctccaaatactacttggttatcccttcctttaccagttagaactaaagagtgtgatgtatgaacacactgggttgggattttctgttgaggatatgcagggcattttggcatgaggcaaatacagaagcaagatttcattctacttggtgatttgaatcatgacagtcctcattccaatctctctttaattctctctggccctgcccacactctgtatttgaaaatcttgtttttgctctttccggagcttcacccctctacttacatattgtaaagttgtataaatctatcattgaaaggtcctctctgccagcagtggtgccaccctttggtttgctgtggtactttgctgtgtactccgtggcatcatgttactgtgtaaataaattcattttaatacacactaa

SEQ ID NO: 264968 - DNA, 1161 bp, Homo Sapiens
  misc_feature (52)..(52): n is a, c, g, or t
  misc_feature (255)..(255): n is a, c, g, or t
  misc_feature (994)..(994): n is a, c, g, or t
  misc_feature (1115)..(1115): n is a, c, g, or t
ggaattacccatcatcattaagcaatgaaacagaccggctggtgcactggtncacggcgccccgggggtcatccacatgctcatgcaggcgtacaaggtctttaaggaggagaagtacttgaaagaggccatggagtgtagcgatgtgatttggcagcgaggtttgctgcggaagggctacgggatatgccatgggactgctggcaacggctattccttcctgtccctttaccgtctcacgcaggataagaagtnacctctaccgagcttgcaagtttgcagagtggtgtctagattacggagcacacgggtgccgtattcctgacagaccctattcgctctttgaaggcatggctggcgctattcactttctctctgatgtcctgggaccagagacatcacggtttccagcatttgaacttgactcttcgaagagggattaaaaggtgcaaaaagacaactaaaatacccatttggaccaaaagccgccagattgcttagtgcctgacacagaaacaactgggaatcctgaaagagaagcagacaccgtcacaggcccctctggttagactagcatgagtgaccgaagccatccatcaacattttctaacagcaccctcatcaatataaaatatgacttcttcacatacagattctctgtagtgtttgcatgtttcttggtgttgttgtctccaggtgtaagctgttttaaatggaaggcccttctattcctgagggctcagagctgaccatgcatgaatgtatggcagtgtccactttctgtataaaatgtataaagtggggtttcttccatattgacaaatgagggaacaggtggtgtctatcttgtatatcagaaagattatctagggtctatcctagtgataatacattgtcagccttttctgtggcaccttccagatgagaatgagggagcgaccactccaaggacggacaggaccagcagttctgcaggggcgtgctggggtggttngggagtgcacagctgaacgcttcccgttgggattttacactcaccttcgtgtgttaaagaagcctcagagtgcattgcagctctgtcagggccccattcccagcagaggcttcaggtgctntgtgtagagtccagggcagctggagctttggtggggagacttctga

SEQ ID NO: 264969 - DNA, 726 bp, Homo Sapiens
  misc_feature (220)..(220): n is a, c, g, or t
  misc_feature (275)..(275): n is a, c, g, or t
  misc_feature (502)..(502): n is a, c, g, or t
  misc_feature (505)..(505): n is a, c, g, or t
  misc_feature (596)..(596): n is a, c, g, or t
  misc_feature (617)..(617): n is a, c, g, or t
  misc_feature (652)..(652): n is a, c, g, or t
  misc_feature (657)..(657): n is a, c, g, or t
gattgttgggaccatgctgcccccactcccgcttttgttggggctctaagttctggaaggtgtgtgcacagagggtgctcatgggactcgcatgcagctctcagcactgggtgggagggcgttggcttgtccagaatggggacgtggggcagccacccctgcccagcgatgagcgcagacacccgtgtgatggggacagcagcccttggtgcaaagccangagacttgatccttggctcttgaccggctggacagacgggaatgaccccaagggnctggggcgttggccgtggggcctccgtggaaatccccaacttagacattctttgggcttggtgtcgcatactgggtgtcacggcacacatttactctgcattgtccccgtctttcccatcgcctagcgtttggggaggaacagggagagagcttcggggcgtctgtctccgtgctctcctgcctccaccgccttggttttgcttcctgctggaggcaggtcacctgntgngacccagattcttctgcaggatgtgtctgtctttgtcacggtggacagagggtgacatcataggagcagctcgctggccagaaggggatgngggcatccctgtgcctcactncagctcctggctggcttcttaggggaaaggtaggncctgnggttcaagccagcatccccttggttaaagacccccgcaggccaccaggcatttctgggacacacacatt

SEQ ID NO: 264970 - DNA, 849 bp, Homo Sapiens
gtttcagatggcgaatgatgaagatgattctttgaaatgatacctcaacgcataagatccattcaacacatctctctttcaattctcatctgtgaaacaatatgatgcttcaactcccgaaaaatgacatcagtccaccaggaaggttcttttgcatctcaaatacccagtagtgtaaataagtctatgaactctagaagatctctggcgttctaggaggtctcttattaagtatggtatttagaccacgtggaggacatggaggaagagacttgacgacagcagcgaagcaaagggtcctgacacgattatccagaagaaggggtggaggaaagcagtggcgaagcctccaagtatacagaagaggatccttcctggagaaacactgtctgtacagaacaacaagtccagctggtgtaatgacgtctaagcctagtgctctagctcaagagacctctcttggtgcccctgagcctttgtctggtgaacagcttggttggatctacaccaggataaggcggcagaggctacgaaattgactatgagactcttgtaaagcgtggaacaagaactaataagagtgtggaaaaatccaggaggccctaaactgcttagtgaaagcgcttgacataaaaagtgcagatcctgaagttatgctcttgactttaagtttgtataagcaacttaataacaattgcagaatgtaaccgtgtttatcgtattttcaaagtgaaactgaatatgagggacttttgttcccatacatggattcttgggaacatgtaagcattcaggcttcaggcgaggacagatctcaaaaagcaacttcttgccctgcaacggccccca

SEQ ID NO: 264971 - DNA, 1455 bp, Homo Sapiens
gctaagagcaaggccaagaggaagtcatgtggggattccagccctgataccttctctgatggactcagcagctccactctgcctgatgaccacagcagctacacagttccaggctacatgcaggacttggaggtggagcaggccctgactccagcactgtcgccatgtgctgtcagcagcactctccccgactggcacatcccagtggaagttgtgccggacagcaccagtgatctgtacaacttccaggtgtcacccatgccctccacctctgaagctacaacagatgaggatgaggaagggaaattacctgaggacatcatgaagctcttggagcagtcggagtggcagccaacaaacgtggatgggaaggggtacctactcaatgaacctggagtccagcccacctctgtctatggagactttagctgtaacggaggagccagaaattgacagcccaggggggatattgggctgagtctacagcgtgtcttcacagatctgaagaacatggatgccacctggctggacagcctgctgaccccagtccggttgccctccatccaggccattccctgtgcaccgtagcagggcccctgggcccctcttattcctctaggcaagcaggacctggcatcatggtggatatggtgcagagaagctggacttctgtgggcccctcaacagccaaagtgtgaccccactgccaagtggggatggggcctccctccttgggtcattgacctctcagggcctggcaggccagtgtctgggtttttcttgtggtgtaaagctggccctgcctcctgggaagatgaggttctgagaccagtgtatcaggtcagggacttggacaggagtcagtgtctggctttttcctctgagcccagctgcctggagagggtctcgctgtcactggctggctcctaggggaacagaccagtgaccccagaaaaagcataacaccaatcccaggctggctctgcactaagagaaacattgcactaaatgaatctcgttcccaaagaactacccccttttcagctgagccctggggactgttccaaagccagtgaaatgtgaaggaaagtggggtccttcggggcagatgctccctcagcctcagaggagctctaccctgctccctgctttggctgaggggcttgggaaaaaaacttggcactttttcgtgtggatcttgccacatttctgatcagaggtgtacactaacatttcccccgagctcttggcctttgcatttatttatacagtgccttgctcggcgcccaccaccccctcaagccccagcagccctcaacaggcccagggagggaagtgtgagcgccttggtatgacttaaaattggaaatgtcatctaaccattaagtcatgtgtgaacacataaggacgtgtgtaaatatgtacatttgtctttttataaaaagtaaattgtta

SEQ ID NO: 264972 - DNA, 911 bp, Homo Sapiens
cagtttcccgtgtggggaggcccagcgtgcttgccagtactggggtcagggcttacactccttatctagcagaagtgcacagagacttctggacttgagtaacaaagtcataaggaaagaggttttaaaatgggctccatgtaatgcagctcatcttagttcagggctgggccagagagacgggggattggagtgcccaattcattccctgttgtgctcaccagacatgggctacggcaaagtctgctctgagcgcccctctgtctagattggatggggagccttaggcattggcaaggcctacctgctgggagactgcagtggttgtgatcccggccaaaggcggcaaatggccctgctgcgtctgtggttttgacctctgctcacccctgctctggcttttccttaatgatacctgagatgcccacataaatgtaaccagtctttctcagaaattagacgtggcccactaagtaaccaaaaatgacataattctaaccctatggaaggagagagaaggctgagagctagccaggaatgatagattgttgctgtaaacatgacaggaatttcagattctcccctgaaatgtgagtacaataattggctggaaaaccaaatagatgggctccttttagttgtatctcatagccttaaagctgtgctccctaggaaataacagaaatcactaagtgtgttggggatgtgtataaatacatacataataacaaaaaatgtaagatctactttagcaatcatttgacaagaagcaagacttttgtttttggcaaaaagaatatatatgtatgtaattttaaatacccaaagcacaaacatgattagtcagaatttgagggtagataacttggctggacatagatagcaccaaatactaacacagatagactatc

SEQ ID NO: 264973 - DNA, 1247 bp, Homo Sapiens
  misc_feature (993)..(993): n is a, c, g, or t
atgtgtgcactaacaatctagtgcttcgtcttgacgtgcctccctttatgatacagatcgatgaatcatgatgatcgatcgattttaagcctgtgcgtctcgtttcatacgaggctaccgggccattggacattaggcattgacgttggtgccaggatattgtcatttgtggtacatccataggggaatatacaagggaatgttttaatgggtggctatggttctactcatcggacctgcgtatcaggcaatggcccggcgtgcttctgtcgggtcaggcttgctgctgctccttggcctcgggcgtgctttccgtcgctcctcattgtcctccttcttcctctgagtcaagctagatcgccgtcaatgctgtcacctttggccctggtcgggctcctcctcctcgctcctcctcttcgtccgtcctccacggcagcctggctcagggctcggtgccttcttggcccgggcctcagctttccaggatgtttgaccaggactctgtggtactcctcgggcaacagccttgttcaccagctcaaatccaaacttgcggatgaacttggtgaacaggttccgaagcttcatgcaggaagtgccgccgcatgtcatctgaaagcttcccaatggcttccatcaccagctgcacatgtttggccaggttgcgccacgtccatgacagtcactgccaccttgatgaagcccagtgcagacttgaccacgtcacgggtgcgggaggccagaagcaggcacacattctccagcagctgctccactgtactggtccccatcagacctttaaactcgaaaaggaggtgggtcagggccaggatgctgcagctgaccatggtcaccgcagcccaccaggccagggtagatcaggacgaggtagcactgcagggcctcttcctggttcgagccaaaccttaggaaagcatggcccatctccacgagcagtgcaaaagcgttcttccgtgcgcccaccgacacctnccttggtgcacaggatcacctctgggatgagggcagtgatgaactccttgtgttcagctgagagcttcctcacgatgtgtaggaggcacttcaaacggggcctcttggcgggtgaggaggtgctccgcagcgagtccagcagtgtcttcttcaggtcctccaggtggctctgcacgaagagggccccggggccctgagaactcgacgcgtgggtcgacgatatcccgggaattccggaccggtacggcctgctt

SEQ ID NO: 264974 - DNA, 873 bp, Homo Sapiens
  misc_feature (105)..(113): n is a, c, g, or t
  misc_feature (598)..(638): n is a, c, g, or t
  misc_feature (645)..(645): n is a, c, g, or t
gccacagcccggactccatcgactcccccggctcttagactaaaatcatgcccaagttcaaacaacgaagacgaaagctaaaagccaaagccgaaagattattcnnnnnnnnngaagcctctcactttcagtccaagctaattacacctcctcctccaccaccctcaccagaaagagtcggtatttcttcaatagatatatctcaaagcagaagctggctaacatcatcctggaacttcaattttcctaacatcagagatgcaataaaactttggacaaatagagtatggtctatatacagctggtgccagaactgcataacccagagtttagaagtattgaaagacaccatctttccatctcgtatctgccaccgagaactttacagtgtaaaacaacagttttgcatttgggaaagtaaattatgcaagctccaggaagcactgaagaccatctcagaaagttcttcctgtccaagctgtggtcaaacatgtcacatgagtggtaaacttacaaatgtgcctgcctgcgttctgatcacccctggagactccaaagctgtgcttcctcccacactgccacagccagccagccattnnnnnnnnnnnnnnnnnnnnnnnnnnnnnnnnnnnnnnnnnacacagntagcacctgtgttgctcagaaaacccagtctcgctaaagcacttcaggctggaccattaaaaaaagatggacccatgcagataacagttaaagatctgctgactgtaaaattaaagaagacacagagtttagatgaacaagaggaagcttataccatcgccgaaaagcacggaatccactagttaccgtctctgacttgcagcatgttaccctgaaacgcttgagagg

SEQ ID NO: 264975 - DNA, 437 bp, Homo Sapiens
  misc_feature (80)..(80): n is a, c, g, or t
  misc_feature (164)..(211): n is a, c, g, or t
taagcactgaagaccatctcagaaagttcttcctgtccaagctgtggtcaaacatgtcacatgaagtggtaaacttacanaatgtgcctgcctgcgttctgatcacccctggagactccaaagctgtgcttcctcccacactgccacagccagccagccatttnnnnnnnnnnnnnnnnnnnnnnnnnnnnnnnnnnnnnnnnnnnnnnnntagcacctgtgttgctcagaaaacccagtctcgctaaagcacttcaggctggaccattaaaaaaagatggacccatgcagataacagttaaagatctgctgactgtaaaattaaagaagacacagagtttagatgaaaagaggaagcttataccatcgccgaaagcacggaatccactagttaccgtctctgacttgcagcatgttaccctgaaacgcttgagagg

SEQ ID NO: 264976 - DNA, 1037 bp, Homo Sapiens
tggccaagaatggttccgaatccagccaattcccagatttcactggacaatgcccttttgccacaggctccctgcttgatgaagaatttccccagcagcagaaagtttgacatcactgctccccggatgggagaatcaagagcttctgcccttcaatttgggtcagggtgcttggctcacgaggtttggtccaaccagcagtaccagctccttggatcctggaaaatgcaggctacgaaaggaacaagaaaaagccagaatgtttccaatttcctcatgggcaacctgtaaagaatgttctgcaaggtgaactcctcgaatgagattcagggcagcacacatgatgttgagaatgagcggagaggatacccagggctgtcactggttccagttcggaaattaggagcaggctccaagtgcatcggtgtgtgaccattcagtcaccccatttgccacagtctgtgtcctcacagagtgagaaccgctggaggctgcaacttgagctcctcctgaattttttccaagctgcactccatctgagaggaacttacatagttaaaatgccacttcactttctgaatgatgctgtcaaactcaagaaaagcgtatggcctggaggctaggccaatgcaggtagtgtcataggaagctgtgaattcccaccacagggtctcccaggaagcagaaggccatggctgctggacactggcaggagcagatagccatgcaggccacgtccccgaaagaagaaaaatgtatactaaagtcacaaccttctgcagaacctcgacctggatactgggccagtcgcaaggctaaactcttgagccgtctcctccattccaaaaaatcttgggtgtggtaaaaatcagtagaggctgagaggggcagtccatcccttacccgtaccacgcaggcaaaaaagatcacggacatggtccacaagagaagtcatgaggacaccgcggcggtttgagatccaagcctgtaattctcacgtccggaggtgagaaggagccttcgtgatctaagctcga

SEQ ID NO: 264977 - DNA, 896 bp, Homo Sapiens
  misc_feature (877)..(877): n is a, c, g, or t
agaagggcttctccaaatagaattctcggagcatggggaggtgcccaacgccaggctaccgctgcatgtcgcactaagtgtgtctcctgttgcagttgggctcatcatcatcatagctggcatgtacctggctctggccaggtgctaggcactcctcacagcttgacctgggtttgcttccacaccctcagaagaggagagccggcacagcagaggcaccggcgatgaagtggcacagccccagtcggaatccagcggcttctgaaagtgccttggtgtgagaaggaggaaggggccgcttggagagctgggctctcgcatgtcatgtttagcccactgagaatataccctcaggtgactccctcccgatcctgaaagggaaagcagctgtcacctgacttctggcgggtccaacatagccctcagcttacctctgcaggaggccaagtgacagccagccctggaaccccccgacccccgcagctgctgcagccagtgtgccagtgtgcgttcgacaaatggaaaagcagattggggccagggagtcagcaaggcaccccagctctgtgatgtgactttgggcgagtctcagtgccacttggtcccccagccatggactctatacagttgagggccactcaccagacctgagtcagtgtcctctgtctcacagggcccctctcccttctgttcagtaaacaaactgaagccaaaaatgaagccgtggccaagtgtgacccagagatggggtgtcctggcccttagtgacacagctcctctctgggggcaccctatctgcttgtttcgtccaggaagcgttagggctgatgggtgactcagcaaggcagtgtcagagctgggactgggcgtaggcttntgtcctcatccccagcact

SEQ ID NO: 264978 - DNA, 958 bp, Homo Sapiens
  misc_feature (249)..(249): n is a, c, g, or t
  misc_feature (308)..(308): n is a, c, g, or t
agggatctgtgctgtccttcaaatgcagccagtctactccatgtcctgttaacagaaagctatggattccctggatgaaatccaaggagggccatcttcagaatggaaaaatgcaaactaaacccaatgccaactttgtgcaacctggagatctagtcctaagccacacacctgggcagccacttcatataaaggttactccagaccatgtacaaaacacagccactcttgaaatcacaagtccaaccnacagagagtcctcactccttacacgagtactgcagtgataccgaacttgtggcacgccnaaagcaaaaggataacccatccctcccaaaacgccctcccataacacccagtaaagtcccaaaacctctaccgaagaccctcatgaatttagaacaaggcatgtcccccaattacccatggcaaccctttgcccagagcacagacccccagagtcttgtggttctctaactcccagaaaggacaatgtcccctattcaggttttggctgtgactggttcagctagctctcctgagcagggacgctccccagaaccaacagaaatcagtgccaagcatgcgatattcagagtctccccagaccggcagtcatcatggcagtttcagcgttcaaacagcaatagctcaagtgtgataactactgaggataataaaatccacatttcacttaggaagtccttacagtgcaaagcgtgtagccagccctgtgagacctgccagcccttcagcaaccactgcaggataaaccgaactcaaggttaattaacggggcaactaaacaaaaaaccaataaagtcaccagcagtattaatatcacaccaacaggcacacttttctcgacatccaaattacacgtaggtatatttaatgacagccacaccttaatccagtcataggtatttggaggactcatctttaatcatctccaatc

SEQ ID NO: 264979 - DNA, 1121 bp, Homo Sapiens
ggacttccagtacctgagacagaagctgtcacctacctacccagctgcacaccacttccggagcggaatcattggcagtggcctctgtgtcttctccaaacatccaatccaggagcttacccagcacatctacactctcaatggctacccctacatgatccatcatggtgactggttcagtgggaaggctgtggggctgctggtgctccatctaagtggcatggtgctcaacgcctatgtgacccatctccatgccgaatacaatcgacagaaggacatctacctagcacatcgtgtggcccaagcttgggaattggcccagttcatccaccacacatccaagaaggcagacgtggttctgttgtgtggagacctcaacatgcacccagaagacctgggctgctgcctgctgaaggagtggacagggcttcatgatgcctatcttgaaactcgggacttcaagggctctgaggaaggcaacacaatggtacccaagaactgctacgtcagccagcaggagctgaagccatttccctttggtgtccgcattgactacgtgctttacaaggcagtttctgggttttacatctcctgtaagagtttgaaaccactacaggctttgaccctcacagtggcacccccctctctgatcatgaagccctgatggctactctgtttgtgaggcacagccccccacagcagaaccccagctctacccacggaccagcagagaggtcgccgttgatgtgtgtgctaaaggaggcctggacggagctgggtctgggcatggctcaggctcgctggtgggccaccttcgctagctatgtgattggcctggggctgcttctcctggcactgctgtgtgtctggcggctggaggaggggccggggaagctgccatactgctctggacccccagtgtagggctggtgctgtgggcaggtgcattctacctcttccacgtacaggagatcaatgacttatatagggcccaggctgaaaaccagaatgtgctaggaagggcaaggcgacgcaggatctgggcccagagcctcagccagccctactcctggggcagcaggagggggacagaactaaagaacaataaagcttggcccttt

SEQ ID NO: 264980 - DNA, 790 bp, Homo Sapiens
gatcttagggggaaagcacttcgtgagtacatacagtaacactggcaacaggagtaataattaaggttaacagaaagtattaaggaaaaacaagtaaccacttaaagacaataaacattgttaaaacctacagttgcattccaattgttaaaagaaagtttaactatttaagtggatgatgatgttcatgctgtttaaatgttcttatgaaaatgattactgatgcaacacccggtataaagcactgtgaataaacatgctcagcagcgtgtacttccaacgaattcaaaattacatatgatcatatgaagaatatcattcaccaaggacagtcccaaggcatctaaaaatcctaaagatctggacagacaaagcagagatacattttatttctcataaagagttacattgtaacatgccactcacattatagctacaattatactagtcacaatttttaatcttacagaataaagctatagcatgtgaaattacaatatatttatcttctttaaaatcatttttaaagaatggcagatatgttatttattagaagccaaaaccaatggaaaaatgtaactggtaaatgcagccaaatgtatctgtggctaattaaatgctgcaacagattttttttggtctatgagacttttaaaaaacaaaggttggtaagggattcccatttatcaacagaaatgaaaagtttatgaaagaaattcaatacatattaaaacattttaacagagtgcttttttttgtggttaaacacaagaaatatctctaataaatt

SEQ ID NO: 264981 - DNA, 859 bp, Homo Sapiens
gccgggccacaggcgccgccgcccccgggcactccaagccggcacgaaaagagcctgggactgctcaccaccaagttcgtgtcccttctgcaggaggccaaggacggcgtgcttgacctcaagctggcagctgacaccctagctgtacgccagaagcggcggatttacgacattaccaatgttttggaaggtatcgggctaatcgagaaaaagtccaagaacagcatccagtggaagggtgtggggcctggctgcaatacccgggagattgctgacaaactgattgagctcaaggcagagatcgaggagctgcagcagcgggagcaagaactagaccagcacaaggtgtgggtgcagcagagcatccggaacgtcacagaggacgtgcagaacagctgtttggcctacgtcactcatgaggacatctgcagatgctttgctggagataccctcttggccatccgggccccatcaggcaccagcctggaggtgcccatcccagagggtctcaatgggcagaagaagtaccagattcacctgaagagtgtgagtggtcccattgaggttctgctggtgaacaaggaggcatggagctcaccccctgtggctgtgcctgtgccaccaactgaagatttgctccagagcccatctgctgtttctacacctccacctctgcccaagcctgccctagcccagtcccaggaagcctcacgtccaaatagtcctcaagctcaactcccacttgctgtccctggcagttgccagaagtccacgggaatgggttgggcccaaagctgagatcacagtgaagttggggcctgggactgatagcaggacagtggtgagctcagttcatcca

SEQ ID NO: 264982 - DNA, 503 bp, Homo Sapiens
  misc_feature (105)..(105): n is a, c, g, or t
  misc_feature (354)..(354): n is a, c, g, or t
  misc_feature (441)..(441): n is a, c, g, or t
tgagccccctggacagcaccaccccccacaccctggtccacgacaaggcccaccacaccctggctgacctgaagcgccagcgacctgctgccaagctgcagcgancccccacctgaggggcccgagagccctgagacagctgagcctggcctgcctggtgacacggtgaccccccagcctgactgtggcttcagggcaggcggggacccacccctgctcaagctcacagccccggcggtgggaggctcccgtggagaggaggccgtgctgcctgctcatgtgaggctgttgctcagcatgcaggggccctgtcgcgggcaaagcccaaggctgcctccccacggtgcgtgcccntggtgctgcgggtgcagcacggaaaccccggcttctactgtacaggacactggcccctctcaggtcagaagacatgcctggagggantgtctggctgcaaagactatttttatcctgcaactcttgataaacgggctgttttgccatgg

SEQ ID NO: 264983 - DNA, 735 bp, Homo Sapiens
  misc_feature (504)..(532): n is a, c, g, or t
atatctattatatacttactcagatattatctttataacatctatatacaattttcgatttttccttagttattattccaacagatataaacaatgctgggatcaacatacttgcaaatgtgccaacaaatatgccagaatatataggacatggcatttcaaaattcccactccaattcttaacttaagtcaactttagtcatttctccactttgttatttctatcattagaatagctgggtgaatctcaaacacaagtgaataaatagtagaaattcagtcaagtaatattaaggctaatgtaattaaattttcatgttgtacttttttaaagaaacagagcagctgccaacttttcagctgagaacaaatttctatagttcttattttataaattatttctcagcattctatatggactttaaccagacaaaccaataatttctttattaagaatctttttttaaaaagtatgtgtatatgaagggctttaataaacttccnnnnnnnnnnnnnnnnnnnnnnnnnnnnngacttatcttactcataatttctgcagtttaaacaagcaatttcaaaacacaaagtttacagctactttctaagccattaatttgactagcttttataaataattgttgtatttgtaatattatacaaatatactgctagtctcaaaaaattttatatactcttagttcaataaataattgttgtatttgtaatattataaaa

SEQ ID NO: 264984 - DNA, 786 bp, Homo Sapiens
taccttcagtctggtctttctgtaggtggtagaattttcttccggcttcagccttcttgcttccgcatgtagcgtgcttcccatctctggtcatgtgtatggccgctcaagcccgtgtgtgcggtccctggtggaagcagtgtgtataagccaagaatgggcatgggcttgaggccgatgaagttggagagggagatggcatagggtgttgcccagcaggtccatgtgtgggacctgtgggcaggtccgtcaggggtggtcgagaagggggcagtgcaggtctgcgggggccgagctgggcgtccccccagaggtagacttggccgtctctagacaggcagtgatgaggtactgggccagggcgatggagaccggagagccagtgatggtgacatgccgctccccagcgccctctgcttggttcccgatcttgatatgtgcacctgacatctgccggatctcgctgatcttgctgcactggcgcccgatcacacagccaatcaaatcgttgggaaccaagaactcctgtgagctggtctgtgtgccgggatccagtcctggcaccacgctgggtgtggcaaaggggaccgcatggcttgagagctgctggagcttggtgacctcagctggggtcacagccccatactgacctggacagagaagcctggttggcagagagaagaacagtacctagggagaggctcggatggtaggggatagtggctcctttgggtggggactccaggataacagcgcagatctggcgcacacacaggatgatggcat

SEQ ID NO: 264985 - DNA, 921 bp, Homo Sapiens
ggcctgtggcctcgtggagaccatccatatcagtgctgctggcttccccatccgggtctctcaccgaaactttgtagaacgatacaagttactaagaaggcttcatccttgcacatcctctggccccgacagcccatatcctgccaaagggctccctgaatggtgtccacacagcgaggaagccacgcttgaacctctcatccaggacattctccacatctctgccggtcctaactcaggcagcagccataactggtgactcggctgaggccatgccagcccccatgcactgtggcaggaccaaggtgttcatgactgactctatgctggagcttctggaatgtgggcgtgcccgggtgctggagcagtgtgcccgctgcatccagggtggctggaggcgacaccggcaccgagagcaggagcggcagtggcgggccgtcatgctcatccaggcagccattcgttcctggttaactcggaaacacatccagaggctgcatgcagctgccacagtcatcaagcgtgcatggcagaagtggagaatcagaatggcctgccttgctgctaaagagctggatggtgtggaagaaaaacacttctctcaagctccctgttccctgagcacctcgccgctgcagaccaggctcctggaggcaataatccgcctctggcccctgggactggtcctggccaatacggctatgggtgtaggcagctttcagaggaaattagtggtctgggcttgcctccagctcccaggggcagccccagtagctacactgtccagacagcacaagaccaggctggtgtcacgtcatccgagccgctgctcagggatcgataaagttcactgcagaaagtctcactgcggtatgctgacatctgcctgaaccttcacctacagcattacagggttatcag

SEQ ID NO: 264986 - DNA, 1408 bp, Homo Sapiens
  misc_feature (565)..(612): n is a, c, g, or t
  misc_feature (753)..(863): n is a, c, g, or t
ctttttaagaaaaaaactttattttacagttttataaagcggctttacattaagcacaaacaatccatttactttgtatagaaacaaaatacctttccatctgcaaaaaatcaagttttgctgtatataaaactaacatgtgcacattgtgcttaaactgcaaagtctgtacagctttacaaaggactacccttcagaagggcatcctgtaaacactttattgcatatttaacatatggtatataacccacatgtacaatggaagagaaacaagaaaagcaaccacaaggaggatgaaaatagcagctttcagtgagagtctgcactgagaaaggagaaggagccacgtctggagagttgtgcttgtgtcatttttgcacttgcttctgtgcgctggatggttcgtggatgaagcctttatgtacaataactcctaaaaggtcaaacttgaccttcatccagaaacttttgggctgggttttacaactgaagtagcaatagatttaacatcaaagtgaactcaagataagtggaaaaacaaaactaacctaatacctataatctnnnnnnnnnnnnnnnnnnnnnnnnnnnnnnnnnnnnnnnnnnnnnnnnccctccccattctctctaagctcagaataagtaaacattttacataatttaaaaccctagaaaattctgtagttgtttagaggcaaaaatgcaatggatagtccagggcagtgttcctccctgtatgcccccagctcaccnnnnnnnnnnnnnnnnnnnnnnnnnnnnnnnnnnnnnnnnnnnnnnnnnnnnnnnnnnnnnnnnnnnnnnnnnnnnnnnnnnnnnnnnnnnnnnnnnnnnnnnnnnnnnnnattttaaagtttgagaaccactggtctgtactgacaatgctgctatagattcaactcatcctcttagaaaattctgggatcacaagaaatcaacttgctgttgcaatgtggaaggcagtgtaaaaccaacagcaaggaaatcacaacgctatttctagatcaaaacgtctttccttcttcagtggaaaaggacagcccacattgttaaggcacgatatttgtcacagaagcgagtaccatactgttatcatcgagtctcataatctgaagaccagtatgcaaacaaagcagacgtatgaaccattctaaataataacaaatatggggaagtaaaaaaggttcccagactggagaaagtttattttgaacatcggcactgggaataaaaattaggggagaccagatattcttgctgagacatctaacatatatgaaatgcaaaggttaaaagctaggggtaagcctaataactcaaaaaagtgtttttactgtgaacaaaattaagaagagtgtggtcacatcaattgggagttcaagcttacttt

SEQ ID NO: 264987 - DNA, 943 bp, Homo Sapiens
ggtacggtccggaattccgggatatcgtcgacccacgcgtccggtcggcaaggagagacgtcgctgaggggcttgccgtgaagcgaggggattctaacattttcagagaaccttgtggaaagaacaagcctacttcaataaatgaaggagaataaagaaaattcaagcccttcagtaacttcagcaaacctggaccacacaaagccatgtggtactgggataagaaagacttggctcatacaccctcacaacttgaaggacttgatccagccaccgaggcccggtaccgccgagagggcgctcggttcatctttgatgtgggcacacgtttggggctacactatgataccctggcaactggaataatttattttcatcgcttctatatgtttcattccttcaagcaattcccaagatatgtgacaggagcctgttgcctctttctggctgggaaagtagaagaaacaccaaaaaaatgtaaagatatcatcaaaacagctcgtagtttattaaatgatgtacaatttggccagtttggagatgacccaaaggaggaagtaatggttctggagagaatcttactgcagaccatcaagtttgatttacaggtagaacatccataccagttcctactaaaatatgcaaagcaactcaaaggtgataaaaacaaaattcaaaagtgggttcaaatggcatggacatttgtaaatgacagtctctgcaccaccttgtcactgcagtgggaaccagagatcatagcagtagcagtgatgtatctcgcaggacgtttgtgcaattgcaattccaagaatggacttcaaaccaattattggagatggtgggcgccgtcggttcagagttccggcacgttggaaacatctggaccaatccggtttctccacggaacaacatggtactaaccccattggagagccttttagcc

SEQ ID NO: 264988 - DNA, 635 bp, Homo Sapiens
tatattttcttaatacagacatgcttaacattttccgacattacttctaactcagatgaagcataactctccccaaactgctctaaaagttaagtggttgagttggtagcaaaagctatcatggtttaacattttccaccacagagtagatacaagtaaaggtcactgcagtttaaacatctaacaggtaagaaattaacatgaaccaactaactgaaattagaatactgccattccatgtttgaatattttcaatactcaagtttcatattttcaaaatggacagtaatacagtttccctatgttttgatacaatttcactataaattatgggcccagattacacttttaatgttggaattgggtggtcactcatacattatttaaatactctagaagataaatcatgatcagttaaatttatcatagttaactatcacaaaacatcagtggtaataaaagaatcacagaaatggaatcaaatagaataaagaataggaagagctaccagaactacttaaacattaggtggacagacatgcaagaaaaaacaaacctgtaatgttcttatatgaaataataaacttcatggtttgtctacattaatattgtactcagccaggcgcagtggctca

SEQ ID NO: 264989 - DNA, 844 bp, Homo Sapiens
gatcgatgctgccatgttgacctccactgcagacaccccactctgtctacagtgtaagcccctgaagtataaggtggtccgggaccctcctctccagatggatgtggcctccatcctacatctcaataggaaattcgtagacatggatctaaatcttggcagtgtgtaccagtattgggtcataactatttcaggaactgaagagagtgagccatcacctgctgtcacatacatccatggaagtgggtactgtggcgatggcattatacaaaaagaccaaggtgaacaatgcgacgacatgaataagatcaatggtgatggctgctcccttttctgccgacaagaagtctccttcaattgtattgatgaacccagccggtgctatttccatgatggtgatggggtatgtgaggagtttgaacaaaaaaccagcattaaggactgtggtgtctacacgccccagggattcctggatcagtgggcatccaatgcttcagtatctcatcaagaccagcaatgcccaggctgggtcatcatcggacagccagcagacatcccaggtgtgtcgaaccaaggtgatagatctcagtgaaggcatttcccagcatgcctggtacccttgcaccatcagctacccatattcccaagctggctcagaccactttttggctccgggcgtatttttctcaaccaatggttgccgcagctgtcattgtccacctggtgaccggatgggacatacttatggggaccaaaagccaggagaccatcaacgtgcagctgcttgataccaaagatcacgagccaggatctagccttccatgtctgagtgaagaacaatccc

SEQ ID NO: 264990 - DNA, 1012 bp, Homo Sapiens
  misc_feature (74)..(74): n is a, c, g, or t
  misc_feature (448)..(500): n is a, c, g, or t
  misc_feature (752)..(764): n is a, c, g, or t
ccttgacccaccatttaaaaacaaaaaacctccttaacaatgcaaaggattgtattcactgtatttatgattcncatcaaaggctaaatagcttatctaaaatacatctgagtgatctattcccttaccctctccccgacctaccccacagttatactaatatgcaccaacaataaaaacaagttatctactattaacactagtaatcatttgatttagttccagttacagaaacagaaaaaatctttgaattttgattaaatgttctgggaaccacatctactattaatgttatgctccattgcccttaaataatatattctcagagaaaatgtttctttagatttacgcttcaactaaagttcctgatcaggaggtcaaaaatagctagttattgagttttttcccctggtcaaaagctattgtttcctgattaaccttggagatnnnnnnnnnnnnnnnnnnnnnnnnnnnnnnnnnnnnnnnnnnnnnnnnnnnnnaggaaaataggttggctggaaggttaatcttctagagttacagtgactcatctggaattacacagaaaaccagagaattctcttgaaattcattaaaagaatggcattcacaatgccattcatctaaaagtaaatggaattagatgaaaattgttctatttcacatttcttagaaaaatcttattaaggcttatgattaaaattggccccacctcaatgactaacatttagcagtggagaaactgctttttnnnnnnnnnnnnngtgaggattaggaaagatcaggttcattcaagtaagaagtctgatatgtaagaaacaagagggagcaggaatagtgtccaactcagatactgacaactagagtccagatatggcacagggctgccagcagctacagtgagaaaagggtagaccaataaaatctactctttccaacatacaagtttacttcacaaaaagaactgctgaaggccaggccagtggctcatatctgcaatcccaacactttg

SEQ ID NO: 264991 - DNA, 839 bp, Homo Sapiens
  misc_feature (484)..(539): n is a, c, g, or t
aagttccttaaagaactggctgatggggcaggaggtccaggcctgggctctcgggccctcctagagggccattggagcttgcagctcagacccccactttgagttttatttatttaaaatagtaagttggatgcttggcacgtcgtcctgtaataggaaaccctagcctcatcagttttcctgatttacaagtgcaatattttagccaatgccttgggagaagctgccatgcaaaggtggacaccattctccagcttcagcgggatatgctcgtcccgggcaccggtggcaggcagctggccttctggactaacggcagcctggcggggacactgcagtctggctacacacagagatctggcaccccctgggtggagtgtccctcgggggctttggcgaaagcatggcaccctcagaccacacagtagccaagtcctggagcaaataaaaggcccgtgtcgttggcgacgccagtgctcttccnnnnnnnnnnnnnnnnnnnnnnnnnnnnnnnnnnnnnnnnnnnnnnnnnnnnnnnngtggtggcccttcgctctgcgcgttcccagcgttcgcctggccgacgcggcctccattctctgtcgtcctcgacttctactcccgttcgccttcgcgtcgcctcgtccttttccccgcctccccccctcctgcggctccctggtctcgtaccctgcgccgcctcctctggtctcccgtcgctccctcccccctcttctcccttccgtgcctttgtccttgcctcgcttcttctccgtgtgccttttgtgtgctcctcgtggcgttctctgtcacggtttgtctgggtttcccgcgcgcct

SEQ ID NO: 264992 - DNA, 789 bp, Homo Sapiens
tcaggctgggccttcatcaagtacgtcctgtcggataaggagaagaaggtcttgggatcgtgatccccatgcaggtcctggccaacgtggcctacatcatcatcgagtcccgcgaggaaggcgccagcgactacgtgctgtggaaggagatttgttcctggtggacctcatctgctgtggtgccatcctgttccccgtagtctggtccatccggcatctccaggatgcgtctggcacagacgggaaggtggcagtgaacctggccaagctgaagctgttccggcattactatgtcatggtggctgtgccctttcagtggcagtggctgtaccagctcttggtggagggctcaccctggccttcttcgtgctcacgggctacaagttccagcccacagggaacaacccgtacctgcagctgccccaggaggacgaggaggatgttcaagatggagcaagtaatgacggactctgggttccgggaaggcctctccaaagtcaacaaaacagccagcgggcgggaactgttatgatcacctccacatctcagaccaaagggtcgtcctcccccagcatttctcactcctgcccttcttccacagcgtatgtggggaggtggaggggtccatgtggaccaggcgcccagctccccgggaccccggttcccggacaagcccatttggaagaagagtcccttcctccccccaaatattgggcagccctgtccttaccccgggaccacccctcccttccagctatgtgtacaataatgaccaatctgtttaactaa

SEQ ID NO: 264993 - DNA, 424 bp, Homo Sapiens
  misc_feature (365)..(365): n is a, c, g, or t
gctggtttgcagatcccttgcagtgactctacagctcccaggaatctgaggttcacaaggtgaaacctaccaggccaaacaatttaaaattggttttgttttgaaaatccagtaagtatgatggcaatgtcttgcagaaattcctcttttagtattccagtctgtgggctctggcagaagtaatagtctgctgcaaacagatcactcttttttgtttgcaaagtcttcgtaccagctgaatcacagcttgcttttcacttttcgtaacaccttgcaacatcgcaaaatatttgctgggagtttgtgaagggcggctgcaggaattaggtaaactggaaagggagggccttccctttacttcccancccctccctttccaggctatggtggtacaattaatggaccaatttggtttgggctaaaa

SEQ ID NO: 264994 - DNA, 474 bp, Homo Sapiens
  misc_feature (22)..(22): n is a, c, g, or t
  misc_feature (210)..(210): n is a, c, g, or t
  misc_feature (337)..(337): n is a, c, g, or t
  misc_feature (431)..(431): n is a, c, g, or t
cccatcagaaggccttgcggcnatgtactacatcgcacacctgctgaagggcgccctcctcttcatcaccatcgccctgattggctcaggctgggcttcatcaagtacgtcctgtcggataaggagaagaaggtctttgggatcgtgatccccatgcaggtcctggccaacgaggctacatcatcatcgagtcccgcaagaaggcgccangagctacgtgctgtggaaggagattttgttcctggtggacctcatctgctgtggtgccatcctgttccccgtagtctggtccatccggcatctccatggatgcgtctggcacagacggcgaatggtnggcagtgaacctggccaagcttgaagctgttccggcattactatgtcatgggtcatctgctacgtctacttcacccgcatcatcgccatcctgntgcaggtggctgtgccttttcagtggcagtggcttgtaccagc

SEQ ID NO: 264995 - DNA, 413 bp, Homo Sapiens
ggcacgagcgctggtttgcagatcccttgcagtgactctacagctcccaggaatctgaggttcacaaggtgaaacctaccaggccaaacaatttaaaattggttttgttttgaaaatccagtaagtatgatggcaatgtcttgcagaaattcctcttttagtattccagtctgtgggctctggcagaagtaatagtctgctgcaaacagatcactcttttttgtttgcaaagtcttcgtaccagctgaatcacagcttgcttttcacttttcgtaacaccttgcaacatcgcaaaatatttgctggagtttgtgaagggcggctgcagaattagtaaactgaaaggaggccttcctttactcccacccctcccttccagctatgtgtacaataatgaccaatctgtttggcta

SEQ ID NO: 264996 - DNA, 731 bp, Homo Sapiens
cctggcgctggcctgcctcggcctcctgctggccgtggtcagtttggggagccgggcatcgctgtccgcccagcaggagcctgcccaggaggagctggtggcagaggaggaccaggacccgtcggaactgaatccccagacagaagaaagccaggatcctgcgcctttcctgaaccgactagttcggcctcgcagaagtgcacctaaaggccggaaaacacgggctcgaagagcgatcgcagcccattatgaagttcatccacgacctggacaggacggagcgcaggcaggtgtggacgggacagtgagtggctgggaggaagccagaatcaacagctccagccctctgcgctacaaccgccagatcggggagtttatagtcacccgggctgggctctactacctgtactgtcaggtgcactttgatgaggggaaggctgtctacctgaagctggacttgctggtggatggtgtgctggccctgcgctgcctggaggaattctcagccactgcggccagttccctcgggccccagctccgcctctgccaggtgtctgggctgttggccctgcggccaggtcctccctgcggatccgcaccctcccctgggcccatctcaaggctgcccccttcctcacctacttcggactcttccaggttcactgaggggccctggtctccccgcagtcgtcccaggctgccggctcccctcgacagctctctgggcaccg

SEQ ID NO: 264997 - DNA, 892 bp, Homo Sapiens
  misc_feature (504)..(504): n is a, c, g, or t
ctccacacgccttcttccaggtgaacacacccgcagccgaggtgctctacacagtcatccaggactgggcccaattggatgcggggagcatggtgctggacgtgtgctgtggcaccggcaccattggcctggccctggcccggaaggtaaagagggtcattggggtcgagctatgcccagaggctgtggaggacgcccgggtgaacgcccaggacaatgagttgagtaatgtggagttccactgcgggagggccgaggacctggtgcccaccctggtgagcagactggcctcccagcacctcgtggccatcctggacccaccccgtgctggcttgcattccaatggtgatcctggccatccggagagctaagaacctcaggcggctgctgtacgtctcatgcaacccccgggcagccatgggcaaactttgtgggacctctgcagagccccatctaaccgggtgaagggcattcccttccggccggtcaaggctgtgggcagtnggacctgtttcccgcagaccccgcactgtgagatgctcatcctgtttgagagggtggagcaccccaatggcacaggggtcttggggcccccacagccctccagctcaagccacaccaggacccccagataacagcctacaagaaactgggaccttcccctcatcctaggcccaggacccattatggggacaggagctgaagggctccccagggccccaggggcggggaaaggcatggcttgctggcccaggatattcagagcgtaggccagcccaaagggcaccagaacccctgtgcccccaccaggattgggctggctgcttagggggcccagggccctgagccagggaagaacacgtgtgttcctggtagcctgtttgccaatccc

SEQ ID NO: 264998 - DNA, 340 bp, Homo Sapiens
ggccgcttaccagctcaacccacaccaggacccccagataacaccctacaagaaactgggaccttcccctcatcctaggcccaggacccattatggggacaggagctgaagggctcccagggccccaggggcggggaaggcatggcttgctggccaggatattcagaggtaggcagccaaagggcacagaaccctgtgccccaccaggattggcctgctgctaggggccaggggccctgaccaggaagacaggtgggttcctgtagcctgttgcccatccccagggcctttgtggactagccaaggctgtgagggccagaataaacaactgctcaacaaa

SEQ ID NO: 264999 - DNA, 1298 bp, Homo Sapiens
  misc_feature (989)..(989): n is a, c, g, or t
  misc_feature (1241)..(1241): n is a, c, g, or t
  misc_feature (1248)..(1248): n is a, c, g, or t
  misc_feature (1258)..(1258): n is a, c, g, or t
  misc_feature (1282)..(1282): n is a, c, g, or t
aagaagtcgggcaagaaggagaagaagtaacatggaggccaggccaagagccacagggcggcctctccccaaccagcccagcttctccttacctgcacccaggcctcagagtttcagggctaacccccagaatactggtaggggccaaggccatgctccccttgggaaacagaaacaagtgcccagtcagcacctaccccttcccccccaggggttgaatatgcaaaagcagttccgctgggaacccccatccaatcaactgctgtacccatgggggtagtggggttactgtagacaccaagaaccatttgccacaccccgtttagttacagctgaactcctccatcttccaaatcaatcaggcccatccatcccatgcctccctcctccccaccccactccaacagttcctctttcccgagtaaggtggttggggtgttgaagtaccaagtaacctacaagcctcctagttctgaaaagttggaagggcatcatgacctcttggcctctcctttgattctcaatcttcccccaaagcatggtttggtgccagccccttcacctccttccagagcccaagatcaatgctcaagttttggaggacatgatcaccatccccatggtactgatgcttgctggatttagggagggcattttgctaccaagcctcttcccaacgccctggggaccagtcttctgttttgtttttcattgtttgacgtttccactgcatgccttgacttcccccacctcctcctcaaacaagagactccactgcatgttccaagacagtatggggtggtaagataaggaagggaagtgtgtggatgtggatggtgggggcatggacaaagcttgacacatcaagttatcaaggccttggaggaggctctgtatgtcctcaggggactgacaacatcctccagattccagccataaaccaataactaggctggacccttcccactacataatagggctcagccagngcagccagctttgggctgagctaacaggaccaatggattaaactggcatttcagtccaaggaagctcgaagcaggtttaggaccaggtccccttgagaggtcagaggggcctctgtgggtgctgggtactccagaggtgccactggtggaagggtcagcggacccccagcaggaagggtgggccagccaggccattcttagtccctgggtttgggaggcagggagctaggggcagggaccaaatgaacaganagttttnagcccagggntgggctttctttcaacagggcccntgccttccttgaaagc

SEQ ID NO: 265000 - DNA, 964 bp, Homo Sapiens
  misc_feature (295)..(379): n is a, c, g, or t
  misc_feature (903)..(903): n is a, c, g, or t
  misc_feature (934)..(934): n is a, c, g, or t
ggaaagagacattgcttctaagaagcccctcctcagtcctattcccgagctgcctgaagtccctgagatgacaccttccattccgagcatccgaagactgggttcaggttatttcagttcaaatggcaaactggaagaagtgaagactcctaaaaatccagtgaaaagaaaggatcttttgcgtcatgacccagatttgcatatgcatcaaggctatgataaatatgatgtctctgaattctgctcttatataaaaagttcctcatcgcttggcaatgctacttctgatgaagannnnnnnnnnnnnnnnnnnnnnnnnnnnnnnnnnnnnnnnnnnnnnnnnnnnnnnnnnnnnnnnnnnnnnnnnnnnnnnnnnnnngctggaactgacagtcctgtttcttgtgcttctgtaactgaagaacgtgtggcatcagatagtcccaaacctgctctgaccctgcagcagggtcaagaattttctgctggtggtcaaaatgcagaaaacctttgtcagttctttaaaatttcaccagatttaaacataaagtgtgaacagaaaggatgacttcttaggagctgcagaaggaaaactgcaatgcaatcgtttaatgcctaattcacaaaaagactgtcattgtttaggagatgtcttaattgaacaatacgaaagaatctaaaagccagagtgaggatctgggaagaaaacccatggaaagtagcagtgttgtgagttgcagagacaggaaagatagaagacgttccatgtgttattctgatggtcgaagtttacatttgggaaaaaaatgggaaatcacacaccatcctccagtgtggggcagctctgtaggaaattagtttaggaaaattcttgaactgttttaaaggtttgtcttgatgccntttgaggcaaaccttttcaggagggagttantaggtggaaacccaaagtgcggacgttagg

SEQ ID NO: 265001 - DNA, 1119 bp, Homo Sapiens
  misc_feature (366)..(422): n is a, c, g, or t
  misc_feature (1087)..(1087): n is a, c, g, or t
atatatatatacagtgtcaacatttttcagagcacttacattaggaaacattgtttctcttcaactgtatgacaatactgtatatgccacaataaaatttacaaaaacaatcgcatcagcagtcataacaaacatcatgattttacatttcaatacacaagaaaaaaaatagacatcttcccggcacttggctcccgcctgacggcaacgtctcctccacactttgagagacctcagcttttaaaacccagcagcggctatttcagaagtcatgtcctttccagatccaaacttaaataatgagaaatttgccatttcaaaataactgagagtttattcatggatgtggtgaagtttactccaccnnnnnnnnnnnnnnnnnnnnnnnnnnnnnnnnnnnnnnnnnnnnnnnnnnnnnnnnngcctcgttgacacggtagcccagaacaaaacacttacgtgtaaaagtgtcattacaattttaaagtaattatttatattcaaattacaactttttgacaaatctaaagaaaacaaactgatttggtaaaaggttcaaagacttccacattcaagctcggtgttgtttcacacgcgtgcgccccggctgcggcggtgacatattgctgtattcggacataaggcactgtgatctgaacataccgtgcactcaccttatgccacatcacctgttccataccagtgaattctttgaaatgaaaaataatgaaaacttcaggacacagtgcactttaatgacatacagcatttaaaatccttcagacaaaggtctgaaaacagtcttttaatgcaagcctgaatcttcaagcacataaaatctttcttttttaagcttaatttcaacatcactggaagaaatacctatcgttaaaccctgatatacattcttaaccacttgcagccagtgttcatgaggcaaaacgtgacccagagactttgttcaagttctcctcctagggcgtctacattcacggcggtcactccgtttctgtctccttttgtttggcacctgctggtgtgaggatcagggcttgcagaatgtccgacagggaaataatacccacantactatctgcttcatttaccaccaccaggccg

SEQ ID NO: 265002 - DNA, 818 bp, Homo Sapiens
  misc_feature (312)..(353): n is a, c, g, or t
cggacgcgtgggattcaaaatcatgcaatgtttcactttagaattgtacactgcatgattaatagtatcagtgaaataagaatcaattcacttacattacaaaatcatgcagtgtacaattcaaaatcatgcaatgtttcactttagaattggatttgaagaactcgactttatgtgatcatggtattggtatacatgtggggtggagaacttattttttcattttgtcacaataggtatatactgacaaggcttcaggaaaaaagttgttagaagattttttaatgtataataaagtccatgatttttgtnnnnnnnnnnnnnnnnnnnnnnnnnnnnnnnnnnnnnnnnnngggggggcgcgccgccaaaaaattccccccggggggccccattccgccccccgtttttttgtaaaaggggcccccaaaagggggagccgcgataataaaagcacagaggcacagcgggcccgccgtcgttttaaacaacagcgtgccgggaagcggggaaacaccgcggtccgtagcgtctgggggatatccttgtgtcgggagagggaacccctatactttcggtgggggcgtggccgcacaatcatggcggcagaaccatcatccctctcccagagagattttaccggcgcccgcagggcgaaattaataacacttctacacggcggcttttatgtggtgttcaaacaccaagccgcgcatatattgcttcggccggctctgaaaaaacttcggctcaacggaactattgtattttcgagcaaacatctttttccgccgggagcattgtggtgatataaccaa

SEQ ID NO: 265003 - DNA, 867 bp, Homo Sapiens
aaggcggctggtaccggtccggaattccgggatatcgtcgaccacgcgtcgccgactccactccaggaaggcatctgaccctgtgacaggcatagctcataaactacccctccctgggatcccgctcctcttcagcctccttccccatgaagctgggctaactttctaagtcatttgcttagaaattcagtgtggcccataccctttgtcctcccagcctggcatccaggcagggacaccctcacaccaccagccccaggagcttccctgctataaacacagacccccttgtctttgcctctgatttttacacagtgtagagtggccagcagtgaacaggttgaggatgtgcgggtagatagataactttgggtctggttgtgtctgtgttcatgttgtttaagggatatgtgtgactgtgggtggggacgtgtgcttgtggggcacaggtggcccctgctggagcccggctgggcgcagcgcctatgtaggacgggtgttctcagtgacctacctcccaggctcctctgcacctgcaaaggaacaggagtgagtcgtgactgacaggggtggttgagactagactaggtagagtagttaccaggagatgtgaatgtgcgtcaggtgatggatgggtttgtccaagggaatcgttaccgttttataccaaaggtattaacatgggcagcctttgaacacatgtattccaaaaaacgagtttatattttcaaaccggttttacagcttagactttgtacttactgccctgcctgtgacagttgtatggccttcaattgtttccacaggcaagctccataaacttaaccatcttgacagaaaagaacaaaagagaaataaacaaaagag

SEQ ID NO: 265004 - DNA, 549 bp, Homo Sapiens
  misc_feature (60)..(60): n is a, c, g, or t
  misc_feature (198)..(198): n is a, c, g, or t
  misc_feature (202)..(202): n is a, c, g, or t
  misc_feature (213)..(213): n is a, c, g, or t
  misc_feature (234)..(234): n is a, c, g, or t
  misc_feature (352)..(352): n is a, c, g, or t
cttgggtataaaagggtacgatcccttgaaaaaccaatcaataacttgacgaaaattaanatctccctggtaactactctaccttagtctagtctcaacaaccccttgtaagtaacgactcactccttgttcctttgaaggtgaagaggacccctgggaggtaggtcacttgagaacacccggtcctacaataggcgnttgncgagccggggntccagcaagggccaccttgtnccccacaagcacacggtccccacccacagtcacacatatccccttaaaacaaacatgaaacacagacacaaacccagaccccaaagttatcctatcctacccgcacatccctcaaccntgttcactgctggcccactcctacactgtgtaaaaatcagaggcaaagacaagggggtctgtgtttatagcagggaagctccctggggctggtggtgtgagggtgtcccctcctggatgccaggctgggaggacaaagggtatgggccacactgaatttctaagcaaaatgacttagaaagttagcccagcttcaat

SEQ ID NO: 265005 - DNA, 822 bp, Homo Sapiens
tacccatcaagggttaatcatctcattttagtggagccttggggtttccctgaacgaccagaccttgctgatcaagacagaccaattccagtttggatcagagccttgggagcagcattgactccctttaaccctttagctggcctaaggattgcaggaccctttggtttaagtctagtgcagcgtttaaggcctgatttcaaacgaaagtattcttcaatgttcgaagacgatactgtgacagaatacatctaccactgtaatgtgcagactccaagtggtgagacagctttcaagaatatgactattccttatggatgggcaaaaaggccaatgctccagcgaattggtaaaatgcaccctgacattccagtttcagtgatctttggcgcccgatcctgcatagatggcaattctggcaccagcatccagtccttacgaccacattcatatgtgaagacaatagctattcttggggcaggacattatgtatatgcagatcaaccagaagaattcaaccagaaagtaaaggagatctgcgacactgtggactgaacacactgaagctctgatgggaaaacctggtgactgatatagttgttcagcaataattcatagtctgtgatgaagagtagtgaatacaacacacaaccaggcagccttcttgactatactttgcacatgttttctttaggaattcactcacacatttaaaccagttagtgccttctagaagaatggctttcctttctcctacacaaaattgaaatatacaagtctctaaatataatacctttaaataaaaggttatttgtccctctg

SEQ ID NO: 265006 - DNA, 1019 bp, Homo Sapiens
  misc_feature (947)..(947): n is a, c, g, or t
  misc_feature (965)..(965): n is a, c, g, or t
  misc_feature (983)..(983): n is a, c, g, or t
  misc_feature (998)..(998): n is a, c, g, or t
ctgaccgcgcggctgctccgctgctccccgctccaagcgccgatctgggcacccgccaccagcatggacgctcgccgcgtgccgcagaaagatctcagagtaaagaagaacttaaagaaattcagatatgtgaagttgatttccatggaaacctcgtcatcctctgatgacagttgtgacagctttgcttctgataattttgcaaacacgaggctgcagtcagttcggggaaggctgtagggacccgcagccagtgcaggcactctggacctctcagggtggcgatgaagtttccagcgcggagtaccaggggagcaaccaacaaaaaagcagagtcccgccagccctcagagaattctgtgactgattccaactccgattcagaagatgaaagtggactgaattttttggagaaaagggctttaacatataaagcaaaacaaagcaatgcttgcaaaactcatgtctgaattagaaagcttccctggctcgttccgtggaagacatcccctcccaggctccgactcagtaagtaccagttcttgtttatatacagtagtgttttgggcacacctaaggtcgatctgtgttgtatttaaaaatctaatttctttatttgtgtggccttctagacaaacgaaggggacccagaggaaaccccctgacagatctctggatgatcctccttgaatcctgggcagtttggtctctccttgctgtgctcctgtggcactaaactccttttgattggttctttctttccttcccagctagactaagcccctcatgggcaggtaatgaagattgaaaacttttttctggttctccagtgtgagcacattcctcctacatgggtagatgtgcaataagatgtttttaaaattgggagaatggaaaataaaagaaggaaaattcacaatttcttattcaagttgttggcttgggtnttccttacaccattgccntctgggggatttagggtnggtacaacttggggnggtttgggtgtgtccgccgtg

SEQ ID NO: 265007 - DNA, 1191 bp, Homo Sapiens
  misc_feature (334)..(361): n is a, c, g, or t
caacagctctcgttctccttccccatttccactgtatattttttaatgtattcccttcagggattccctgtccccaacaggaatttttaaaccaaaacaccccaacttggcagctttttctgtggaggacagacggccggccggacctctgagcacatagtgtcctgcccaccctaccagctcctccagccctgccgggcacatgcccgggggacgcctgccctgcccaggtggcctcctggcccgccctcacctctgatagactttgtgaatctgaactgctctactttgagaagatgaccggtttggagtaatcagaatgaaccctcctccnnnnnnnnnnnnnnnnnnnnnnnnnnnnctaaaaagctatgtatcgctcctattgaaagaccagatcccttaaagaagtttgtggtataaaaagaaagtggggacagatttcgcagcacagagtcgctggcatgtttcactcctgcttctctcagccagctgtttaagcctgcggcgccagcctcacggagggccgtgtgacactctcgtggtatgtatgggagacggcagcagtgaagcagcagccaccagggagtggccatttggggttgggacagggagggtgttttgggtggcatagaggttttgtattgagggccagtgatgatgttttgatatttatttcctgctacttaaatttgaatctgagtgaattgtccctatttctgatgatgtcggtcttgcaaagcgacagattcataaagtaatgatgaaatctttctttcttcccgtgtgtatttctaagaaatagagccaactgattttgtatgtaaataccaagagcaatttacctggtactaaaccaccaccccagtgcggacccttcccagccctcatcccacttcctttcctactgtcctggaacctgtctccattgtgtgatccagccctggttctggctgtggtcagcagatcccagtgaagggttttgtgtgtttaggcctcatttctttgtctttttcctactccgttcctggcatttgctgatttctagtgtatactctgtagtctcagttcgtgtttgattccattccatggaaataaaaagtatgttgtacatactgccgaagaattgtcttgcaagttaaggcttccccctttactataagactataaataaaaacttattttatcctt

SEQ ID NO: 265008 - DNA, 823 bp, Homo Sapiens
tggaaacctaaactccagtgtaatactgccgccggcaatgtctataaaggtgagagtatcttccagtaaatcttgtgaaagtatattataggacatcactgaaaagtcaacttgttctcactgtcttcacatttgggatcaacagtttttggtctcctagggatcttcgttgtgttctttatcatggctacagtatatattgcccaagttccgctgtgtatcacaccttggtggttttcttcgttttgaatgaaggctcatctccctcagcgttcatgacgtaactagagagatgaatcaaagatgtctggctcaggttgtcaggtctccagttacagtactggaactgagttctagactctaacaaacagggtggtctccaatttagtgaaaaatgcctactactgaagtatgggtaaggagctcgagagtaatgtccaggccacctcatacaactagaaatatgtctgttccagcaacacctttgcagattctcccacggtgtagtccagtctctgcccagactcctcgagtgatggggaaacatggggtattgcggagaggcggcctccccgccgacgctcggttcccgggacggtgctgcggagtgtgtggagcaggccagcgctggtctggaggctgggttgggggaagcacggccagggatccaaagccactggcacaagcctggccggcggcccatgaactccgcgccaagaccccagacctcgttggcccagcgtcccgccagctgcgcggcgggtttacctatcccgcttggtctctggaggctcgtcccggatgcaccatcgcccagaccctc

SEQ ID NO: 265009 - DNA, 426 bp, Homo Sapiens
  misc_feature (14)..(14): n is a, c, g, or t
  misc_feature (29)..(29): n is a, c, g, or t
  misc_feature (54)..(54): n is a, c, g, or t
  misc_feature (69)..(69): n is a, c, g, or t
aaaaacaacaaggncaaaaaaaatggtgncctggtcctgcaaagtcccttggtnaatgtaaggcaaaangtaacaaaaggtcctcccgggtcccctgggcccgccaacaaggaaaatgttcccggaatctccgtgctcctgcaaatgaacgttccttgttggaggccatcgaatgaaacttgaacacctttgtaatgtgaatggaacaggatgaatggtggggatcttccttcatgtgctccgtagatttccgcatcttggcacaggcgtcttgcgtggattctgtccctcgcagatctttgatcagcatggagcccagataattggcttcataaccacaggactcgaagatgagtttctctggctggtgttgccaactctgcactggggcgtagggggctgccaggcttgggggccgcagggtca

SEQ ID NO: 265010 - DNA, 955 bp, Homo Sapiens
  misc_feature (935)..(935): n is a, c, g, or t
tctgttaaaaacaatgtgttctgaacaagtcacttcttgaccctctggaatgccagtcccatctgctagcggcctggagtgcttctccacagccaaggcagggctcgttctgcaggacgtggtggtggaaggcccaggccaagtggcaaagaggaggtcctgcaggcggaggtgaggcctgggtcttcagagctgcaggtgaggcgatggcggtggtggcagtgggagcctatgcccccacgtctatgtttccgcagcacagtgtggttcctcagtggctcagttggtgctgaggctccgcttagagtctggtttggggtccacaacccaggagacactggcatgggattgggcatcttggtccatatcaggtggttccagtgcggatttcctcacgccgacccgaggcttaggcaccggtttggaagattttgtttcaatcatctcagctgcagaggcgcccgtcgccctggacttctgggcctgcagggccaactgataggccacttcgaaggcctgccccagcgtcaggatgatctcgtaggtcaggttcacatccacggtgctgaacacatggcaatagtggtggctggtctgcaggtccttggtgatgtaggcaaaggtacagaggtcctccgggtcctgggccgcacaggaaatgttccggatctcgtgctctgcaatgacgttcttgttggaggcatcgatgaacttgacacctttgtatgtgatggacaggatgatggtggggatcttcttcatgtgctccgtagatttccgcatcttggcacaggcgtcttgcgtggattctgtccctcgcagatctttgatcagcatggagcccagataattggcttcataaccacaggactcgaagatgagtttctctggctggtgttgccaactctgcactggggcgtagggggctgccaggncttgggggccgcagggtcag

SEQ ID NO: 265011 - DNA, 810 bp, Homo Sapiens
tctcgggtcctctgacaggaagagatcgggatgaccggtgtctggatccaggaccacatcaacagcatgtaagagatggttcttgctgccatcgcaattgcttgcttgaagttgtgctctgtttacttgaagttcttcctcttttgcacacgttctttctcccagttcctttagagcaatttctcttgtttcccgttcaaactccttttcccctgacagaatcttgtttgttccttttggagtttgttgatccaatagatgcatacggcaatgggtatcatcagaataaccacaatgataggcagggccactgcacagggagacacactgggcataaaggattctggaataaaaatgacactttctttcttctggccgagcagggtgttgttgatagagcaggacatgttcctcacagacttgtctctgatgatcacagccgtggtgaccatgaagaggccgtctgcatcaggcatggagacctctttcagggcaggcgcaaccccaccgtaggggtccctccacactgtgaggggctttgggtaccaccctctagatatgcactccagccggatgcccccgtcttcatggcccctcattgaaatgaggggcttagagcctagtctttgagatgggtgtgtcgactccaacttcaaacaggcaggttttggatttcactttctgcttctgggacgacttctcagtagacctcagcttccagaagctctgccactacgaggtgcaggatggcctcatcgtaggacctgccttcttggaagtaacagcggtaggtgccgttttcctgggctg

SEQ ID NO: 265012 - DNA, 1226 bp, Homo Sapiens
  misc_feature (928)..(928): n is a, c, g, or t
ggtacggcccggaatttcgggatatcgtcgacccacgcgtcgcgtgacgcgtggggatgacttcagcttgacctcagaacagcgccttttgatagtcctaagtaattgctgctatctagaacgtcacaccttcctaaatatcgcagaacattttgaaaagcacaacttccagggaatagaaaaaatcacacaggttagcatggcctcattgaaagaactagatcaaagactctttgaaaattacatcgagttgaaagcagatcccatcgttggctccttagaacctggaatttatgcaggatattttgattggaaggactgcctgcctccaacaggtgtcagaaactatttaaaagaagcactggtgaatataattgccgtgcatgcagaggtgttcaccatttccaaagaactggtccctcgggtactatccaaggtgatagaagcagtttctgaagagctcagtcgactgatgcagtgtgtttcatccttcagcaaaaatggagctttacaggcgagacttgaaatctgtgctttgagggacactgtggctgtttacctgacacccgaaagcaagtcaagttttaagcaggctttggaagccctgccccagctttccagtggagcagataaaaagttactggaagagctcctgaacaagttcaagagtagcatgcacttgcagctcacctgtttcccaagcaggcttcttcaaccatgatgaaaacataaatatctgccacataaaaagaagtcccaggaaaataacacgtaataagactgttcactctctaagtaccctaaaggtatctggtgtattaaacattgggtttgccatttttctcttttttcttcctctggacttcgaaaaatcgttggttatacatttcaaccaaaatgacctcatttgaaatgcccaggaagtatnctgtagccattcttactagatcagatcctgtatgacttttaaaatacattttaaaatatatttcgcatctcagcagaaggttgagtgctgcaggaagagctggttctgcagggaggtatcttgcaatgggcgtggcacatatttgaagcattcctcagtgtcccgttcacggaagccgcaaggcaggttcccaggagacccggagaagattggatgatacgaggatttggaaagctaagtaaacattctttgggagctcctcactggcctaaaatgttgaccgctgtgcttaaaaacg

SEQ ID NO: 265013 - DNA, 1071 bp, Homo Sapiens
  misc_feature (778)..(778): n is a, c, g, or t
  misc_feature (972)..(972): n is a, c, g, or t
  misc_feature (1000)..(1000): n is a, c, g, or t
  misc_feature (1023)..(1023): n is a, c, g, or t
  misc_feature (1047)..(1047): n is a, c, g, or t
gccacttatgccacctgctaccctgacttcagacaaaggccacctgagcgctatcctggccatcaaggggaacctatccaacagtgaggtcaagcgcatccggagcatcttggacgtcagcatgggggcgcaggagccctcccggcccctattttcccttataaaaggttggttagcttttcctgtggcctgacctgcctgtgagtgcccagcaagccttgggcacaccacgctgggagctgttaagagcagcgctggttctcggttcctcccgggtctcctgtgctctgatgctacttctgcctagccctggcggaggtgcaggccctgtcagctggaactggacagaccttggtttgtttacatgtccgatgggggcaggagctcccatcctgggcagccaaccaggcaacaccaaggactctttgtaaacgatagctgatcgtgtgcacgcaaggaaagaaccaggagggagagtgcagccaggctcagggatccccggacacctctgtccagagcccctccacagtcggcctcatgactgtcctcctcgtgggtggggccgagggccctcttcagctctctggagacaggggccgagcctcacccatctgccctctgcagcccagggccgccgtgagcgggattcagcaatggtggaatggaagacagaactggaagcagaaagagggaaagatgagctctcgtctggcaggggcttaaagggtcctgtggcgagctgtgagcaccggcagcatttagacgtcacatccaggtngccccacggccctacaggctggccctgcaatggggccctgagccttccctcttcatcccccaaggcctcaactagagggtggtcccccgagggcttggtgtctactaccgaaggcccaagacctcctgggtcctctcaggctcccccttccccaaggcagggacaggccctgggggtgccaccgtgggccctgncacccagaagtctggctgaggtctgggnaggggcagggcaagctttacctnttactgtttgacccttttggcctntgtattttgttttcctattgccgt

SEQ ID NO: 265014 - DNA, 829 bp, Homo Sapiens
  misc_feature (646)..(736): n is a, c, g, or t
  misc_feature (738)..(772): n is a, c, g, or t
ggagtccttagttcaaatgtccactaaacagagtgttacagaaagctctggacgaacctttgttacttaaatgtagctgttgtgccgggtgctcatccgtccaaaccacccaatcctaacttcttaagtaacatgttatgctttttaaggtagaaataattatctttctatgcatttttttctcttaaagcattatagtttggcctgatggtggacacagaagactttcatattcttgttttttaaaagtctcttcagtaggaaaaaagctacagatttaaaaaatatgaccatgactagaatagaatcagcttaaaaagaaacaaagtttttaaaaaatcataatccatgctatgtactcaccaaagtgttttgaaatttgtgttacacatagattaaaacagtggttcttaacaaggggcaattttgtcccccagaggacatttggtctgggagggtgctattggcatgtagtgggaggccagagatactgccaaacaccctacactgcacaggacattccctccaattacgcagtacaaaatatcagtagggccaaggctgataaattttggattataaacagaaataggtcatccccttagaaaagaaatcagaggctgggtgtggtgacttacacttgttnnnnnnnnnnnnnnnnnnnnnnnnnnnnnnnnnnnnnnnnnnnnnnnnnnnnnnnnnnnnnnnnnnnnnnnnnnnnnnnnnnnnnnnnnnntnnnnnnnnnnnnnnnnnnnnnnnnnnnnnnnnnnntacagagtaacttatctgcagagtgctttcaatccctcgtgccgctcgtgccgaatt

SEQ ID NO: 265015 - DNA, 417 bp, Homo Sapiens
  misc_feature (48)..(78): n is a, c, g, or t
  misc_feature (80)..(170): n is a, c, g, or t
  misc_feature (263)..(263): n is a, c, g, or t
ggcacgagggattgaaagcactctgcagataagttactctgtatttcnnnnnnnnnnnnnnnnnnnnnnnnnnnnnnnannnnnnnnnnnnnnnnnnnnnnnnnnnnnnnnnnnnnnnnnnnnnnnnnnnnnnnnnnnnnnnnnnnnnnnnnnnnnnnnnnnnnnnnnnnaacaagtgtaagtcaccacacccagcctctgatttcttttctaagggggatgacctatttctgtttataatccaaaatttatcagccttggcncctactggatattttgtactgcgtaatggggagggggaatgtcctgtggcagtgtagggggtgtttggggcagtatctctgggccctccccacttacatggccaataggcaccctcccaggaccaaatgtccttgggggggacaaaattggccc

SEQ ID NO: 265016 - DNA, 1213 bp, Homo Sapiens
  misc_feature (1167)..(1167): n is a, c, g, or t
  misc_feature (1192)..(1192): n is a, c, g, or t
ccagtgacaggatgggttggggctactataagtttggaataccgttaacccagatacatttgtaaaagtgttcccaaagataaatgctgtacttgaaagtattatcgcagtgctgaaggctcacactagtgtattttccagaggtgacagtgttaatagtcatattggagacgcttagggaacctgggagccatggtttgctcccctaagctacactgcaataaactctaagctcctctagaagtaatatgctatttacaatgtgaagatttcaaattctcaggtatacatgagtgcactgtcagaagatgattaggcccagactctgagggtatgatcccatgatccagagcagaaagcagtcccatcgggggaaactcgtagagtgctaacgcggttttcatgtccaaacaggatggagacccgggaccctttgagaacatcccagacgttgatagtgtaatcattgtatccagcaaacagcaggcgaccactgagggagaagtccacgctggatgctccaaatatgatgctttctttggaatagatggcaacctccctatctgcccgcaggtcatagaggcgacacgtagcgtcatctgaccctgaagcaaaggcatctccactggggtagtaccggacactgttgatgtcagattcatgtgtttcaaaggcctgcacgcactggccggagcgcatgtcccacaccatggctttcttgtcacatcccccagacacgaaggtgtttccagtttctgagggggccaggtccaagcagaggacgtcagccccatgtccgtggaagctctgcagcagctgcccgctctccacgtcccacagggcacatgtgccatcgccgctcgctgtcaggatctgcatgtcagagttggtgaagctgcaggccgacaggtagttggtgtgcatagcaacagacttctttttggcagccatgttttcatttttgtcaaacgtcaaggggtacacagaacacttattatccaaaccaccacaagcaatggcacatcccgatggggcataagcacatgccatcacccacgtgcagggcatggtgaccgcgtgctccttgtttgtggtgaaggaatcccacacgatcaccttcccatcctgtgacgagctcacgatcctcctcttatctttgcaccagtnccatgcacaggactttgttccccgnctcgtgccgaattacttgggg

SEQ ID NO: 265017 - DNA, 441 bp, Homo Sapiens
  misc_feature (43)..(43): n is a, c, g, or t
  misc_feature (423)..(423): n is a, c, g, or t
aaactggtcctcctgacctcaacaggcaaatccatccaggcanccctcctcctttggccctcccctaccttgcctcaagtcctctgtccacaaagaactgggatcctcccatccccccttgatgctcctgagcatccttccaccccatttgggtcgttgagacatatctgtcccatgtctgtctaaaaggggaggagatgagggagaaaaaagggaatctactcagagcctgtgtgtgctgcccagtctaccaaataatttatatacatctcagtcctcacacaaccatccctgttttatagaggaggaagtggcttagagaatgtaactgaccaaagtcacactgccaggaactggaagcactaggatttgacagcatatccaaatatgtcagcaatttcaataaacatgactgtactcaanaaaccaagtgtaaaaaaa

SEQ ID NO: 265018 - DNA, 1074 bp, Homo Sapiens
  misc_feature (507)..(600): n is a, c, g, or t
tcaaccccaacccactgtccgaaggactccttgagcggagtcgggggaaacgtgcaggaggccttcgcacaaggtacgaggagaaacctccgcaatgacctgctggtggcagctgactccatcaccaacaccatgtcatccctggtgaaggagctccattcaggttagcagaggagccggacacagaggaagctcaggcacagaggacgaggagcaaactggccccgacatggcgaaggcaaggtcttcccccagaggcacattcctctccatctttccaccgcacacctggaccaggcttgcaggctgccagacgtcactccacccgccagggagaggggagccagagccggtgggaagcggggaggggctgcgtggcacagctagtgggcctccccctgcacagccctgcatgtactagcaccttcatcactcccctcagggcatggtctcatctccgcatcaggaattcacctggaggttgaaaagagaacagaaaaagcaccnnnnnnnnnnnnnnnnnnnnnnnnnnnnnnnnnnnnnnnnnnnnnnnnnnnnnnnnnnnnnnnnnnnnnnnnnnnnnnnnnnnnnnnnnnnnnngagagagggggcgcgcccccaaaaaatccccccggggggggcgccacatacgcagccgcacccgattctgtcgacaaaaggggcgcccctattgtggagggagttttatatatatcacatggaaggcgcagcggcgcccccgtttatataaaaaccgcctgtcactgagggagaaaaaacgacgctctctaacgtgatataaacatcttgggaagagcacactcctaccatcttcgcggaggggacggacacaactggtggggcaccacacacccccgccaaaaaagacatatacatacaccctctcgtagggggagaactaaatataacaaaataaacgcggcggggactgagctggggtcagcacacaaccactacccctacatatatgccgccgccgccggagagaacaaacatctgctcgccctcagaggaagggatacatatatatacgaagaacaatttctacagggg

SEQ ID NO: 265019 - DNA, 1238 bp, Homo Sapiens
  misc_feature (1022)..(1077): n is a, c, g, or t
tggttcaggttgccattgaaggaagtctcttaggctcccacaaatctggctacagagatgcttttccagatgggaattccagtcactgcatccacaggacgagactgctgatttgcggaccagaatccaaaggaatttgaggaagtcccccaaactccagcaatttcccacaccctgcaatctatccagagttgtgccaagacagggcaggagataaggagatagataaaactttgaatccatcagggaagtaagaggctaaatcctctccccctaacaaaaagcaaaccgatatttaggtgatttgggaaaacattcagtcatgagcagcctctaggagctgttctgagaggccaaaatccctgccccattgcccccagctggcagggtgggttggttttctccaggaggcggccagggaataacctttaatttgatggaaacatgcagaactaaccagtctgggagtctgatccctgaggacaggaggggccaccccagcctgtaggggccggcaaagggacctgcctggggaatgtgtaagttcaattggtcattccttctcccttaacgcagaaaagcctctattattgcattcaaaggaatactgttaactttgactcaaggggtgcagtctgccagagaacccattttaatttctagctcaaaaatgttccttgaggaaaacccttggaatgttctgaaagacgtcagtggggtaaggtccagtatgtggctagccaaaggtcaccttaacctttcccagctggagttccaaaaattcttgacacccttgtttccttgggggctgaagtctggcatattttcaaaaccagtgcattcaagaaataacagtaagatccccaaccagcagggtaggccgagaactgggctactctaaaccagtaattcctacaacattcaatcaacttggaatcatgttttcatgtaggtattatttttgaatcaacaggaagggaatgagctcagctctatttctcaagttttacgaaacactaatnnnnnnnnnnnnnnnnnnnnnnnnnnnnnnnnnnnnnnnnnnnnnnnnnnnnnnnngaatcctcacaaaaccctaagtgctaagaaagctagggtaatttttttctgcattcaagactctacagctaatttggtcttttgctataaaaacttggtctcccactttttgttgaagcgaacaagaatcacaggaactcaccctcagcttcacgaaactc

SEQ ID NO: 265020 - DNA, 916 bp, Homo Sapiens
gaggttcggcaaaaatgtgccggtaatgacctgacttgtaagggacttgcttgctgtctagaccctagtggtcgttcaaatgtgactccctgtaaatctacaaatctctgttggctttaggggatggccagtataacaaatgttaacttcccacttaggaaaagacaaatcttttccaaaaaacatgttacccagaaatacaaaacaaggacagtatagtggtcagattcccagtgacaataaacaaatcctcctctcttcaatgtttactgtaaagccagttaactgccatttatttgaaagaagaaaagaaaaacaagcccccagattggtaaacacattggcaagttgctagactccaagctggctacccttgtcaaatctgttcgagttttttcaaaatacttgggctttttaacggcaaccagcctgctgggcacagttaagtaaaaggcatttactataatctaagaattccctgctattatcatttttaaatgttttcacatttttaaaactgccttacccttttggatgtatttggattccataaaggtgagtacaatcaacgagaaactgaagtgggagattctacgactgcccagaggcagcagcatgcatggggctggttgtgggtgctgtgtgcagtccagaggaatcatgggagaaaggaagtcaagtccttaaacaccctacagaaacaaacactgcaatccagtatggcttattcggatgcatttaccatgaagctaccagaagaaattcaacctacgaggctactcttaaatgtaacaggatcggctatgttgacgatgtacccctcccatggccctccccccaatcccaacacagtctaccatttccagatttacttcactctgaatattgctcatcaattgttactcctgctcttttc

SEQ ID NO: 265021 - DNA, 846 bp, Homo Sapiens
  misc_feature (85)..(129): n is a, c, g, or t
  misc_feature (806)..(806): n is a, c, g, or t
ttgagtgacagcttctggacattcacatttctttcctttctttctgcaggacatgaaagctaaaaaagaaaacacctcaagagcnnnnnnnnnnnnnnnnnnnnnnnnnnnnnnnnnnnnnnnnnnnnnaaaaaattgataaactgtgcatacttcattcacaacagattttctatacattctacatttaaacagaagtacacagttactgttaaagatgcagtattatctctcagatatttgctttattactgttttttgtaaatttgtttgtcaggataaacttgatgtgttaggaattaaacatgtatatttaggtgccaaatatgattgttaaccatatgtaacttattaaatatgtttacagtttatctcagacttttacactaaataagcaatatttttaaatgaagtcttgaattagtgaaatcgtaaataacaaattaatttgaattcgttttgaactttttaggccaaaggcagcatgtaggaaactaacttttaaatgggtattgtggtagaatataactgtatatttttactgttactgcaatagcatctttaatgggatttttaggtgatatactgcatccttaattgtaattgagtgtagcaacactcatgtatcatgtgtagaaattaacacttgcagttaactgcgtaaaaagagaaaaaaactagaacaaatggtcagggctaagtaagattccattaaccttatttgaaaagggacgtggccattttgtaacaaattaggcaatttgaatttgtctccaaatggagcaggatcgtggaacttcctaaanccatctagtccttaaagcaaaccccttcattggaccccga

SEQ ID NO: 265022 - DNA, 1118 bp, Homo Sapiens
  misc_feature (807)..(817): n is a, c, g, or t
  misc_feature (821)..(821): n is a, c, g, or t
  misc_feature (830)..(830): n is a, c, g, or t
cggacgcgtggggtttcagccaaacttcgggcggctgaggcggcggccgaggagcggcggactccgggcgcggggagtcgaggcatttgcgcctgggcttcggagcgtagcgccaggcctgagcctttgaagcaggaggaggggaggagagagtggggctcctctatcgggaccccctccccatgtggatctgcccaggcggcggcggcggaggaggcgaccgagaagatgcccgccctgcgccccgctctgctgtgggcgctgctggcgctctggctgtgctgcgcgacccccgcgcatgtgtcgagatggctatgaaccctgtgtaaatgaaggaatgtgtgttacctaccacaatggcacaggatactgcaaatgtccagaaggcttcttgggggaatattgtcaacatcgagacccctgtgagaagaaccgctgcaagaatggtgggacttgtgtggcccaggccatgctggggaaagccacgtgccgatgtgcctcagggtttacagaagaggactgccagtactcgacatctcatccatgctttgtgtctcgaccttgcctgaatggcggcacatgccatatgctcagccgggatacctatgagtgcacctgtcaagtcgggtttacaggtaaggagttgccaatggaccgatgcctgcctgtctcatccctgtacaaatggaagtacctgtaccactgtggccaaccagttctcctgcaaatgcctcacaggcttcacagggcagaagtgtgagactgatgtcaatgagtgtgcattccaggacactgccagcatggttnnnnnnnnnnncccnaaccccttngccctcaacctgcctggttcctaccagtgccagtgccttcagagcttcacaggccagtactgtgacagcctgtatgtgccctgtgcaccctcgccttgtgtcaatggaggcacctgtcggcagactggtgacttcacttttgagtgcaactgccttccagaaacagtgagaagaggaacagagctctgggaaagagacagggaagtctggaatggaaaagaacacgatgagaattagacactggaaaatatgtatgtgtggttaataaagtgctttaaactgaaaaaa

SEQ ID NO: 265023 - DNA, 1005 bp, Homo Sapiens
  misc_feature (226)..(226): n is a, c, g, or t
  misc_feature (228)..(228): n is a, c, g, or t
cctaaaaagggccaaacccaaaatttcaatcaactgaaaaacctaagaaagaaacgaaaaaagctgatgacccctggggttcgctcttccgctcatgttgaaggggaccttgaagaacagctcctttccctgtatctctccccacagagccctccagaggagtaaaggggtcacagagaagctggcctgagaactctgaccgcatcttcttcctcgtgtatgtggntntgggctgtgcacccaattcgtctttgcaggaatctggatgtgggcagcgtgcaagtctgaacgcagcccctggagaggctgcaccccatggcaggcggcctagactgtaaaggggcagggcctgggctgcacaccttaggatgaagtttgctttcccatggctgggggcgggccatgacagggcctctggattaagccaccctgagctctccctccgctagcacacaagcacagagcgtgaaataaacccatctccagtgcaagtgtgcctcaagggtcagtcttcaatctcgtcctaaataggtggggccctattttttgcttccaacccccattttgctccttaacttttccccattgtccctgtctcccagcccacagcaggcagcctaattgctccttctgcaaccacgactgcctggcctgggccaagaggcactgaggctggggaccagagacaggggcctgaggaaggctgtagagggtggggcggaactcctcctccgaacgcctcctgcagtgtgctggactctagggaaaatggccagtgagcctgcctcccccagccacctaggggactcctgggagggaaaggtcccagacctcaggcctgtgggcgggcgggaatgtgttttaagagagggggtcagtcccgactgcctttcctccaggagctctggctgcttctctgagccctgccacatctctgggctgtaggggagttccgacgcgtgggtcgacgatatcccgggaattccggaccggtacaggcctggt

SEQ ID NO: 265024 - DNA, 912 bp, Homo Sapiens
  misc_feature (537)..(537): n is a, c, g, or t
ctctgctcagagctccaagccacccgcctcctgtgcctccgctctctgctggatccgagtcctaggccaccccttggtgaaggggtagtggagggagccggcatggtccaagaactggaccttaccctccaagccctggggctgcccagacctgcaccagggacccccgccagccagctgctgcaggagttgcatgctaagatctcagagctgcagccttctctgcccccagggtccctgcagcccctcctcagctgctcgctagatgcacccagatgggaagcgttggagtctctgtcccaaagcctcagagatcagtaccgctgccgccgctgcctcctcctcaagcgccttgacctcactacatctgctttccactggagtgaccgggcagaggcccaaggagaggccatgagggcagtgctgatcccaattcgagaggttctgaccccagaatcggacatctccattgcacacgttctggctgcccgagccgacctgtcttgtctcgtcccagccaccagcgtggctgtcccncagagggaccctgctgtgcccatcaacaaggtgccttatgggcaacgttcccagaccgggggggccgccccaaatgagctggagcctccccatgcccaccctggaggagccgaagagaggatggaggcccccagctgttggggtcgcaagaagaagaaagaagaagtaaagggggactggtggtcgggggcggggggtcctccatgagatgctaatgctatcggtaatctctgggggagtccgtttaaggctttcctgtggtatttggcacccaagcccccccatctcctattcctgagtccccaaatgccctgctcccattcacgtcaataccaagaaccatgttctccagagaataaacttaatttatgacag

SEQ ID NO: 265025 - DNA, 1065 bp, Homo Sapiens
ccctgatgcccatctctcagctgaggactttaatatctatggccatgggggccgccagttctggctggtcagctcctgcttcttcttcctggtctactctctggtggtcatccttcccaagaccccgctgaaggagcgcatctccctgccttctcggaggagcttctacgtgtatgcgggcatcctggcactgctcaacctactgcaggggctggggagtgtgctgctgtgcttcgacatcatcgaggggctctgctgtgtagatgccacaaccttcctgtacttcagcttcttcgctccgctcatctacgtggctttcctccggggcttcttcggctcggagcccaagatcctcttctcctacaaatgccaagtggacgagacagaggagccagatgtacacctaccccagccctacgctgtggcccggcgggagggcctggaggctgcaggggctgctggggcctcagctgccagctactcgagcacgcagttcgactctgccggcggggtggcctacctggatgacatcgcttccatgccctgccacactggcagcatcaacagcacagacagcgagcgctggaaggccatcaatgcctgagggcagctgccagggcctgtggaggacaggccagagaggaggccagcaggcccagagtccccaggggaggaggaccaggtcaagggacgttctgtgggcagtagccctgtgtggccctgtttcccaccatgagtctggaggccccacctccctggggctcccaatcccctttgccatctctgctctcactggggaccctcctccccttcccacctgctctcatactgctcagtgacatggcccaggctttccttccagggccatgcttggcaaggttggctgagggcaccctccttctctgcacccttggcacgagggcagggctggctctcccaatgcctccatcccatccccatggtgctttggcctcctcaaagcatccaccatggtggatggactgaagtgtgtatattttcttgatctattttttaataaaaaggaaaaggagcagaaggtgaaaa

SEQ ID NO: 265026 - DNA, 748 bp, Homo Sapiens
  misc_feature (331)..(340): n is a, c, g, or t
catttctcacttcctacgtggaggcctttgtttccgagttgctgtctgtctaacgcttgctgacttgcgtttcaggtgccattactgcaagtcatcctgccacgtgtcttccctccgtattccgtatgcctgcaagctgctcttccaggaactacagtctatgaacatcatccccaggttaaaactgtccaagtacaatgaatgaggatggaaaaaatgattattaaagagaacaagtgatacatccaatgcaacggaaagcagaagggatttaggactacgtctcctcctgtgaagaattcccttgcgtattctctctctaaaacaaccnnnnnnnnnntggagaggctttttatatactctaagactggctaaacaaccttgatcattgagcctcgagccatgggagagatgctgaccatgtggactgcaaggctgcttgattcacagatggatgtgacctaaaggataaataagctattacttatgtgctgatctcttgacattcactcattagaagaccttactccttcaagcaaatgtttggggtcaaatttaccatatcttctggctaaccatattcaagattcttctgaaacttggaggatgtaaagaatccatttgatttggtcagcctggcttttgtcgtggtggctggctcggataaattttcccaacaattaaatcttgcctttacacacccaaactttgtaattttagtcttggtgaaatataatgaatttgttcc

SEQ ID NO: 265027 - DNA, 906 bp, Homo Sapiens
agtagagcttagaaccctggggggagaaaagcagtcaggtgaggtttgagattccttctatagaatgatttcttaaaatgaaaatctgggcccacttaactaccctagataaaacgcttcaatggcttcccatggctcactggataacatctaaattcttcatggaattgaaggcccctatgtgctggttttggctaagatctcccctttgatgtgggtcccctgttgattatacgtgcggccttccagctgcccaccatcacagctacagctcgctccccttggcctctgtgccttggctcgcactgttcctactgaaggcctagcacctgctcttggcctggtgagcccctccaccttccaggcttactcaaagaattctttctgcccctccctgtgtcccgggacctgtttcatatcgcttctgtggtcgtgaccccatggtcttgtaattgtgaacttctttgctgccccttcgaagctggggagtgcttgttgcagatgcatccaagaggggtaattgcgtatcaacagtggatttgcctggttgtttcctacagggctcctgaagcatgcaacatagaacagataccctttaaatttaggggcgcctaaggaaagcaggaaccagtaatcctcttctgtggtgggatgggagggtgggggagaggggtggaatggagaggaaacaggctatcgttggccagccctgggtggaggtgggtgcaagcaggacagatagtgcctgggggtgggggcggagggttcgcctctaggaaggggctagaagggatgaggaaatagttcatagcttcgtgcaggtgatccctattctgcgtgtatgtgtttgcacatgagtgtttgtagaccatagaccattaaaaaatacggaattcaaaagttaaa

SEQ ID NO: 265028 - DNA, 922 bp, Homo Sapiens
ctctcccctccttgaagaagccgcggacacgggaaacccacggcgggcaagggcccagctgtgtgctcctttcctgtcatggcatctgctgatttgaaactccatgacgaacacgttgaactaaacatttttatttaaatttgtatcatgttcatagttgctctcttgttgagagagtcatctgtcctgtttgttaggggtattttttcttgttaaaatgtatctcctgttgaatactcgggaaattcaaagggaagtgtggtcagcacacactgagcgttcttttctggagaggccggttttagcctcgtacctttagcaggaccgacagcgggtggaagggcccgtgtgctggatggggggtgtcgcctcctggatggcacaccctcccgaggacatccagacaggctgtgtcaccctccagcactttatgtgcctgctctgaggtgtcctgaacacacagcaacggcctctccttcatcacaggccggggattccttttgtgtttctgtataacatcgatgacgagctgaagctgttgtcacttcactgccctctttggaatttcttcattgtgctgactgattctattaggggctaacaataaaggcagtctacccactactatcatgcttgggaaacaagcgtcagcttgtacatatgacaagagaggaccctgaatacaccctctcttcatcagcccaagccttactgaggtgggatgaagacctcattctctgttctttaaaacatgtttcgtgaactaatattggtccatgtaatttttgtccttttgggactctaagtgggtcaagaagcaaaaacatccatgtgttgtttggggggaattggcaccattttttcctgactatgtttcaattaactaaagaataaatgatgaagaaattctccttgtagcaaa

SEQ ID NO: 265029 - DNA, 1006 bp, Homo Sapiens
tggtagagattatggcttgtgggtggagcctgtagtagtgtgagtgagggggcttggagcactgtgggtatggtaaatggcactataggtagagcctgtagtggtgtgagtgggcctggcagttctgaagggccagagtctgtggacgtatgaactgagtctaggtgtgcagatggggcagggtctgtagatgtgggtacagagcctgttgtatccgagggtagagcttgtggcagatgtggccagtgtccagggcaggaggaacaggactggggtgctctccatgggtgggagctgggtgtgtaggtgggcctaggtccccaggctaggctttctgggccaacggcgctccacttgaagcctcagccaaggcagcatctacactagcctcactgatgtggctcagagtccgactgtagggtgcatgcccatttgccaggactggggccacggccccctcctcatccaagggcccagagctgggggtctcaggcctgcggaaggcaacttggatgggaaggggctcgggctgctgcaccaggggcctaggggctggtgagtggcgggcagtgcctgagagctgtgggctggatgagtcgtctgaagattcagatgacagggaccactgctgtcccattctccagctcctcctgccgtcgcagcatgttaataagaaagcctgttcccgaagtgagggtgtgtccggtgggctctggctataggtggagaagcgcttggtgactgtggaggccttgttgacagaagaagcagctgagggctggtcatccttgtcgaaggggctccatgtgacttccaggctgagcttgatggtaccaaggtcattgatatccacagccacaacctggggcagggcggcaaacaggtccttggtctcacaggagacactgcccacaaccacatggttgccaggcccttcagttctgtcaccttaatagacagaaattccgtgagtagagggagaaagatggtttcttcctgtgccgaa

SEQ ID NO: 265030 - DNA, 985 bp, Homo Sapiens
ggtaaccggccggaattcgggattcgtcgacccacgcgtcgctaccgccaggcgcagaagcagcttctggagtatcggaccggagaaggagcgggagaagctgctgtgtgagggccgcagggagaagggcagcgaccccgccatggagctgcggctgaagcagcccagtgaagtggagctggaggagtactacccggccttcctggacatggtgcggagcctgctggagggcagcatcgaccccacgcagtacgaggacaccctacgcgagatgttcaccatccatgcctacgtgggcttcaccatggacaagctggtgcagaacattgcgcggcagctgcaccacctcgtgagcgatgacgtctgcctgaaggtggtggagctctacctgaacgagaagaagcggggtgccgctgtgtgggaacctgtcctcccgctgcgtccgcgctgctagggagaccagctaccagtggaaggctgagcgctgcatggccgacgagaactgcttcaaggtgatgttcctgcagcgcaaagggcaggtgatcatgaccatcgagctcctggacaccgaggaggcccagacggaggaccctgtggaggtccagcacctggctcggtacgtggagcagtatgtggggaccgagggccgcgtcaagtcgcccactgagggctcctctgaacctgtgttcctgcagaggaaacctcaagaagtttccgccgccgggtggacgagccgagcaaggcgcgtgcctggccgtgaaggcaggagttctgaagcggtgtggggttgtaagcgctgctcgtgccggcggttcagctcagcctcacagatgggttcctgggacatcgaggacatgtcgtggggaactgtcgggcaaagtgacccgctgtcgccccacttggcggtcaccgtcgaataagacgatcaccgaatagaggcacactcacacgatacggacagccacaccccccccacacacctggc

SEQ ID NO: 265031 - DNA, 1497 bp, Homo Sapiens
  misc_feature (349)..(349): n is a, c, g, or t
ggcaagggctggtaccggtccggaattcccgggatatgtcgacccacgcgtcgggctctgcgccagatgaatgaaggtgccatagactgtggtcaactacgaaggacagtctgcttatgacgtggcagacatgctgaagcagtattttcgagatcttcctgagccactaatgacgaacaaactctcggaaacctttctacagatctaccaatatgtgcccaagggaccagcgcctgcaggccatcaaggctgccatcatgctgctgcctgacgagaaccgggaggttctgcagaccctgctttatttcctgagcgatgtcacagcagccgtaaaagaaaaccagatgancccaaacaactggccgtgtgcttagcgccttccctcttccatctcaacaccctgaagagagagaattcctctcccagggtaatgccaaagaaaaccaaagtttgggcaaaccagatcagaaagatttgaatgaaaaccttagctgcactcaagggctggcccatatgatcgccgagtgcaagaagcttttccaggttcccgaggaaatgagccgatgtcgtaattcctataccaaaaaagagctgaagcccctcactctggaagcactcgggcacctggggtaatgatgactcagctgactaccaacacttcctcccaggactgtgtggatggcctgtttaaagaagtcaaagagaagtgtaaaggcggggtcagctactccacttcggagcaggctgagctgtcctataagaaggtgagcgaaggaccccctctgaggctttggaggtcagtcattgaagtccctgctgtgccagaggaaatcttaaagcgcctacttaaagaacagcacctctgggatgtagacctgttggattcaaaagtgatcgaaattctggacagccaaactgaaatttaccagtatgtccaaaacagtatgggcacctcatcctgctcgagactacgttgttttaagaacctggagcactaatttacccaaaggagcatgtgcccttttactaacctctgtggatcacgatcgcgcacctgtggtgggtgtgagggttaatgtgctcttgtccaggtatttgattgaaccctgtgggccaggaaaatccaaactcacctacatgtgcagagttgacttaaggggccacatgccagaatggtacacaaaactcttttggacatttgtgtgcagctgaagttggaaagatccgggattccttcagtaaccagaacactgaaaccaaagacaccaaatctaggtgatcactgaagcaacgcaaccgcttccaccaccatggtgtttgtttctagaacttttgccagtccttgaagaatgggttctgtgtctaatcctgaaacaaagaaaactacaagctggagtgtaggaattgactatagcaatttgatacatttttaaagctgcttcctgtttgttgagggtctgtattcatagaccttgactggaatatgtaagactgtgc

SEQ ID NO: 265032 - DNA, 416 bp, Homo Sapiens
  misc_feature (351)..(351): n is a, c, g, or t
  misc_feature (357)..(357): n is a, c, g, or t
gcacagtcttacatattccagtcaaggtctatgaatacagaccctcaacaaacaggaagcagctttaaaaatgtatcaaattgctatagtcaattcctacactccagcttgtagttttctttgtttcaggattagacacagaacccattcttcaaggactggcaaaagttctagaaacaaacaccatggtggtggaagcggttgcgttgcttcagtgatcacctagatttggtgtctttggtttcagtgttctggttactgaaggaatcccggatctttacaacttcagctgcacacaaatgtccaaaagattttgtgtaccattctgggcatgtggcccctatcagaggnaaaagnaaagaaaagctgatgaattatttaagttagaaagcatggaaataaaatgagaaacatct

SEQ ID NO: 265033 - DNA, 1082 bp, Homo Sapiens
aagcaggctggtaccggccggaattctcgggatatcgtcgaccacgcgtccgaaaatgactagctcgtattttccccatcttcaagtttcacatcctggtcatcaaaagactcgacagcaagacttagaatgaaaaagggtacttgtttatattaatattttttacttgaacacgtgtagcttgcagcaggttcttgatgaatgtgctttgtgtccaaaatgcctccccattgtacacaggtgtacaccatgcatgcaccaacacctaaaactcaaaactaaatggctattttgtaaggttaatactttcagttaaacagcatgtttgacttgattccatcatggtgctcttaaattacatgtcagtgcatcacatatatcatgatctaatgcagatgactaggctttttccaaaaggaagacagaccctcagacaccaaaagccaatctaaacaactcccaggtttgctgtggacaatcagcatggaatgttttctgcactctcagtcatgaccatctgtatcttgttacctgctttctctctcaacaccacagttctcaaccctgagccttccagagagagctattgatgatacaagaggaatcaccagggcccggatctaagatgcccttagaagaccagcccaagtgccgtcttagccattcagtgaagggcaaacagcccatgggtagtatggcccgagcactgaattcccttgcgccttttcaaagaacagttaacttggtgctaatgtgccctggtgaaataaataaaagatgggcagtttctgtggcattttaggcataggtttgcaatccagatctgattttctccaacataaatatcagctcatgttcttatttcaaaaagatttcttattaccgactaaaagctattttttacctcacctggaaactaccattgtgagggccatcccccaggcactgcacagcaccttggctgatgctgggaagaagagggcagtcagtgtcacttctggggatgtggccccagcactggaggaacaaaatgcaggcatcccccgggggcagcatcagagtggcctttctagaagggagcc

SEQ ID NO: 265034 - DNA, 800 bp, Homo Sapiens
gcgtttaggaccccgtgagcagcaggatcccagggtgaccccagttaagcaacaggcctggagctgaagcctggcccagcctcttgcgttggtccttggaaaaggaggaatattacccgcgatacctggcagcaaagggaaggggctaaagcaggaagtggaggcagaggttcccactgccctaaaaaaatggactatgggtagctgacccaacagggcagcaaagcccaagggtgaggcctgccccacctcccaccccagttcctctaagggccagccctcacggagcctcactgccaggacaccactgacccagtgctggggagggagttggggcagggaaggctggcatccactgaagaataggaatgatgctcttgctttgcgggcaggagcagctgcctatagagtccccgggaaaacccactagggaagggggaccagcaacccaagtctctgggcctagcccgtagaaggcctggactgggtcctgagccagagtagaggccttaatgaaacagaaagtggcaggggttaggagcagggaggtggtgagaaaggcccctgtgaggaccagcttaggtgacccctctgactagctccaaggaagcccaattactacttcaacccaggcccttctggccccatgtcaagtttcgagggctctacccatcacccagggagcacttcccacagggattccacctcctgctcctccccgaggccttgagctacagccggctgcctctgttgaactcggacgcgtgggtcgacgatatcccgtaattccgggccgtacc

SEQ ID NO: 265035 - DNA, 498 bp, Homo Sapiens
  misc_feature (58)..(58): n is a, c, g, or t
tcagtgaggaaagccggcttataggagcccatcagtggatgtgttgccaagttccccngcaaggacttcatgtgagaaactgcccatgcgtaagatggttagcttggtctggttttccgagcccagggcaactacaggtgggtaccatatctgacagttctgtgatgtaggctgtcatctttgttccgtcgccgccgttcaattttcactgtgattttccctgcatggaaagaaagagaagcccccatccaggtggtcacatctggtcatttggtagcagggagagtgatatggataccaagtgtgctgctgaagaatgtggtattcagatttagtgatgcttaagtctcagcagttaaaataaggtttgccaaccttctcatgcaaagcaagcatgaaacagaactaataaggcagacagagaacaagaagataatgtaattcccttccccctatttcctggaaacttcacatcctttgtaaattaccactccctcc

SEQ ID NO: 265036 - DNA, 407 bp, Homo Sapiens
  misc_feature (84)..(174): n is a, c, g, or t
  misc_feature (359)..(359): n is a, c, g, or t
ccccaggaaaggtcaacctgggcaaaaatagtgaagaccttgtctctactaaaaatcaaaaagggccgggcacagtggctcatnnnnnnnnnnnnnnnnnnnnnnnnnnnnnnnnnnnnnnnnnnnnnnnnnnnnnnnnnnnnnnnnnnnnnnnnnnnnnnnnnnnnnnnnnnnacacctctacaaaaaatacaaacaattagcccaggtatgtatggtggtgtgcacccgtagtcccagctactcaggaggcccttctagcacgcaccttggtgaagagccgccaccactgccagttccgcagcttcaggtaggcagcgcagttccgctggaggaccttcatggcggtaagctgcctntccgcttggcaaatgctttcctggccaggtagcccctgcagcaggcct

SEQ ID NO: 265037 - DNA, 413 bp, Homo Sapiens
  misc_feature (60)..(60): n is a, c, g, or t
  misc_feature (88)..(88): n is a, c, g, or t
  misc_feature (107)..(107): n is a, c, g, or t
  misc_feature (140)..(140): n is a, c, g, or t
  misc_feature (148)..(148): n is a, c, g, or t
  misc_feature (365)..(365): n is a, c, g, or t
ggtgcaaccctgggtgaaaaataatgcacaccttgtgctctactaaaaatgcaaaaaggnccgggccaccagtggctccatgcctgtnaattgccagcactttgggnaggctgcaggtaggaggattgctggagcccaanaggttgtnactaacctgggcgaacatggtgagaccacacctcctacaaaaaatacaaacaattaagcccaggtaatgtaatggtggtgtgcgacccgtagtcccagctactcaggaggcccttctagcacgcaccttggtgaagagccgccaccactgccagttccgcagcttcaggtaggcagcgcagttccgctggaggaccttcatggcggtaagctgcatntccgcttggcaaatgctttcctggccaggtagcccctgcagcaggcct

SEQ ID NO: 265038 - DNA, 960 bp, Homo Sapiens
gtacgctccggaatacgggatatcgtcgacccacgcgtcgtctgtggtgtggcccccaaagtggaaatggctcagaggagtgaagagaatgtgctagtcactgaagagcgtggagttcacctggcctgaattcctgggctctaatgaggtaaatgtggaggactttgtgggccacgatggagacagaggtgattgagcaggtggcatttcctgccagcatccctatcaccaaatttgatgcgtctgttattgcccccttcttcccaccactcatgagaggagctgtggtcgtcaacactgagaaagacaaaaacctggatgtgcagccagtacctggcagtggcagtgccttggtgaggctgctccaggagggcacctgcaagcttgatgagattggctcctacagtgaagagaagctgcagcacctgctaaggcagtgtggaatcccctttggcgaagaagactccaaggaccagctccgccttctccttgttggccctctacgaatctgtacagaatggagctagagctatacggcccccacgtcacttcacaggtggtaaaatctacaaggtgtgcccccatcaggtggtctgcggctccaagtatcttgtgcgaggtgagagtgcccgtgaccatgtggacctgcttgcctcttcccgccactggccgcctgtctatgtggtagatatggcacgttcagtgcgccctgtgttgctgacctctgatgaccagagcttgactaaccagatgtggggggagggaaccagggtggttttaagcccgaagagcactgtgaatggtctggccaagctttggccagcttatcctgggcttgagaacgggctcttccggcccgtacaaagcgcgggcttcctgaggccacaacaccgggccggggccacgtcgcgatgtggctgactggcacgggaaacggcgccccggaagacaaaacgagcc

SEQ ID NO: 265039 - DNA, 959 bp, Homo Sapiens
caggctggtacgcctccggaattccgggatatcgtcgacccacgcgttcgaaattaaaatctgaggttaatgaaatggaaaataatctaactcgaaggcgcctgaaaagatcaaattctatatcccagataccttcccttgaagaaatgcagcagctgagaagttgtaatagacaactccagattgacattgactgcttaaccaaagaaattgatctttttcaagcccgaggaccacattttaaccccagcgctattcataacttttatgacaatattggatttgtaggtcctgtgccaccaaaacccaaagatcaaaggtccatcatcaaaacaccaaagactcaagacacagaagatgatgagggagctcagtggaattgtaccgcctgtacttttttgaaccatccagccttaattcgctgtgaacagtgtgagatgccaaggcatttctgagccaaatggccctgtatcttctctaaaaccacattctaaaggtcaagaaactagtctgtcatcgggaaaaagtttcactgctacataggattttgtcaaattgaaggtgtgacaagatggtgttctgctaatgttaaatgtcagcccacagagctaataatacctcagtataatgtcatgagcagttgaaattcatcacatggaaaagtaatctgctgaaagacttggttgcccactgctactgtgtcgtgttaccgtgtcccattttggtactctcatatgttaccacctagtgttcccatatcttttccctctgtcttctggtttggccgggggggcacaccaaggtgctgtgttcttgggcaccttccggaactcttccaggcagggcgcgtccctttgacccggcgctttgctcggttgttcccctcgggccgtgccggtgttccccggtcccctttcctggtggtgtggcgcttcttcgggacccctttgttcttagtt

SEQ ID NO: 265040 - DNA, 1068 bp, Homo Sapiens
  misc_feature (65)..(124): n is a, c, g, or t
tggtaccggtccggaatttccgggatatcgtcgacccacgcgtcggtcgagctgagtcgcgctcnnnnnnnnnnnnnnnnnnnnnnnnnnnnnnnnnnnnnnnnnnnnnnnnnnnnnnnnnnnntagactgcctctgtcaccgggtccctccacccttgtctcctgtgcggccagcgtcagagccatggcgacggaggagaagaagcctgagaccgaggccgccagagcacagccaaccccttcgtcatccgccactcagagcaagcctacacctgtgaagccaaactatgctctaaagttcacccttgctggccacaccaaagcagtgtcctccgtgaaattcagcccgaatggagagtggctggcaagttcatctgctgataaacttattaaaatttggggcgcgtatgatgggcaaatttgagaaaaccatatctggtcacaagctgggaatatccgatgtagcctggtcgtcagattctaaccttcttgtttctgcctcagatgacaaaaccttgaagatatgggacgtgagctcgggcaagtgtctgaaaaccctgaagggacacagtaattatgtcttttgctgcaacttcaatccccagtccaaccttattgtctcaggatcctttgacgaaagcgtgaggatatgggatgtgaaaacagggaagtgcctcaagactttgccagctcactcggatccagtctcggccgttcatttaaatcgtgatggatccttggaatagtttccagttagctatgatggcctccggccccatctggggacaccgcgctaagccagtgcttaagagctccatccgatgagaaaaaaccccccgagtcttcttgtgaaaaggttctcccgaaaggggaaaatcattcctgtggcgccacgctggacacaacttttgaagccttgggctccgcccagcggcgaatatccctataaaacgtatatggcgccacacagtagagcactcgcctatttgcacacctctgcacccggaagaggatacgctgtgcccaatcacacgtgcattatcgtatacttacacaacaatagtaca

SEQ ID NO: 265041 - DNA, 1031 bp, Homo Sapiens
  misc_feature (378)..(378): n is a, c, g, or t
aagcagctggtacggtcggaattccgggatatcgtcgaccacgcgtcgcagagccccctggctagatgacccccgggccaggatggagcaggagtgtctgatgattcatggagtttgccccttcctaagggaaggagatctttatctttctggttggcttgaccagtcacgttgggagaagagagagagtgccaggagaccctgagggcagccggttcctactttggactgagagaagggagccccaggctggagcagcatgaggcccagcaagaagggcttgggttctgaggaagcagatgtttcatgctgtgaggccttgcaccaggtgggggccacagcaccagcagcatctttgctgggcaggcccagccctcncactgcagaagcatctggaagcaccaccttgtctccacagagcagcttgggcacagcagactggcctggccctgagactggggagtggctccaacagcctcctgccacccacacaccactctccctagactctcctagggttcaggagctgctgggcccagaggtgacatttgacttttttccaggaaaaatgtaagtgtgaggaaaccccttttaattttattacctttcactctctggctgctgggtctgccgtcggtcctgctgctaacctggcaccagagcctctgcccggggagcctcaggcagtcctctcctgctgtcacagtgcatcaattctcagtccagtggccatctctggagtgcaagctgggatcaggcccggagttgtacaaagcagtgccgagctgggcccgtcccagggaaggttgggctgcaggcactggattgctgagtagcgcaagtaccaggggaggctgtacgcgtcctcaagggaggtctgggataaaaacagagccacggttggcgtcccaaaaagacacacacaataaaagtgctcagagaagaaacacaaaaagggcgggtcatcggcgccacctcagaatatagaaggccgagaagctgagcacattctgtcggttcgtccttgccgc

SEQ ID NO: 265042 - DNA, 760 bp, Homo Sapiens
ggtaccggtccggaagttcgggatatcgtcgacccacgcgtcgcaggtctacctgggaatccgcaagaagttaaagcccccaacaccgtggggcttcacattgatactagagaagatgcacctctacttgtcctgcactgacgaggatgaaatgtgggatggaccaccagcatccttaaagcccagcacgatgaccagcagccagtggtcttacgacgccattcctcctctgaccttgcccgtcagaagtttggcacatatgcctttgctgcctatccgtggggatgacagtggagccaccctcctctctgccaatcagaccctgcggcgactacacaaccggagaaccctgtccatgttctttccaatgaagtcatcccagggtctgtggaggagcaagaggagctggaggagcctgtgtacgaggagccagtgtatgaggaagtaggggccttccctgagttgatccaggacacttctacctccttctccaccacacgggagtggacagtgaagccagagaaccccctcaccagccagaagtcattggatcaaccctttctctccaagtcaagcacccttggccaggaggagaggccacctgagccccctccaggccccccttcaaagagcagtccccaggcacgggggtccctagaggaacagctgctccaggagctcagaagctcatcctgaggaaaggagagaccactgcaggcctgggaagtcttccagaatcagccaaccggcaggtcaaaac

SEQ ID NO: 265043 - DNA, 947 bp, Homo Sapiens
ttttgtactgctaaagaagcagctttggaggaagcagaattagaaagcctggacccaatgaccccagggccctacacgcctcagcctcctgatttgtatgataccaacacatccctcagtatgtctcgagatgcctctgtatttcaagatgagagcaatatgtctgtcttggatattcccagtgccactccagaaaagcaggtaacacaggaaggtgaagatggagatggtgatcttgcagatgaagaggaaggaactgtacaacagcctcaagccagtgtcctgtatgaggaatttgcttatgtctgaaggagaagatgatgagggaagatgctgggggagtgatgaagaaggagacaatcctttctctgctattccagctgagtgaaagtgggaagtgactctgatgtgggatctggtggaataagacccaaacaaccccgcatgcttcaggagaacacaaggatggacatggaaaatgaagaaagcatgatgtcctatgagggagacggtggggaggcttccccatggtttggaggatagcaacatcagttatgggagctatgaggagcctgatcccaagtcgaacacccaagacacaagcttcagcagcatcggtgggtatgaggtatcagaggaggaagaagatgaggaggaggaagagcagcgctctgggccgagcgtactaagccaggtccacctgtcagaggacgaggaggacagtgaggatttccactccattgctggggacagtgacttggactctgatgaatgaggcttcctttgggcctccttggtcagccttccctgttctccagcctaggtggttcacctttccccaatttgttcatatttgtacagtatctgatcctgaaatcatgaaattaactaacaccttagcctttttaaaagtagtaagtaaatgataataaatcacctctcctaaa

SEQ ID NO: 265044 - DNA, 1111 bp, Homo Sapiens
  misc_feature (1083)..(1083): n is a, c, g, or t
gggttaccggtccggaatttcgggatatcgtcgacccacgcgtcggtttttttcaaagcccaagtataaccacattttgaaaccagaagactgtctctctgaaccgtgcactatattgcagttggacatgagaaccgtgcaaatttctgatctagagaccctgaggggcgaagctgcgcttcgacatcaggaaggcggggaccctgcacggcttcacggcctggtttagcgtccacttccagagcctgcaggaggggcagccgccgcaggtgctcagcacggggcccttccaccccaccacacactggaagcagacgctgttcatgatggacgacccagtccctgtccatacaggagacgtggtcacgggttcagttgtgttgcagagaaacccagtgtggagaaggcacatgtctgtggctctgagctgggctgtcacttccagacaagaccccacatctcaaaaagttggagaaaaagtcttccccatctggagatgacagttgatgctttatttggaaagcagtgtgcatatcttgaggggtgatgaacacaagcaaaccaagttgcacctggcttctgcacactcctgcgaaagtcggtgaacattcactccacattgacccctccctagcctggcaggtgacgtcagggtccttcacagacaaacacgcttgggctcggcaggagctgccgtggccacccccgctgcccagtgtctgccctctagaagtaggctgtgtttccaggtgttcacccgtggtgcccacagtgccgacccgtggctgggtcggagctcccatgttcctaagctaggtctaggtctacactcctaggacgcacgcatatcagcccgtgtaccctgtgacagtgactgtccccacctcctgtgttagtggtgcccttactgccgtcgctcatccactcgtgtgggacgtaggattgcacaggctgtccagtggcgtgtagggaacactgccctggctcagcgtgcgagctaaggtggcgatgtatgcgatgggactctgcatgggatagtacagttgtgtagacgtcttccaaataaattatgtgttgggcatngcacatgctcaataaatatttttaaatg

SEQ ID NO: 265045 - DNA, 937 bp, Homo Sapiens
atatcgtcgacccacgcgtcggtagccaacacttcctggttttgcttaggtacagtgaaagggcatagtgagagctattttgagtgattctgtgctttctgtcagcaacatgaaggagggacgtagaataattttagttggtagaatatttcttcatgaaaggcttagggtgtctttaacaggtgtgggctagagccccaccaggagtgaactgttctctgggggtcaggttccctaggagatctgtcacctcttcaggagtattgagaacatgtgtagttacagcttcactaaatgcacgtgacaggcttctgtgccttgggagccctggcttatgctgaaacttctggctgaccagagcagtacagcaactttgccctgtctgtgttctgcttcctggatgcatccttcagccactaaccagcatgcaagatggagcagggtgaacaagctggagactgaatagtctttgggagtacgcgtttgatatattgcaggcgtgttacaatatactggtgatttacctggtactgtggcacctcccagaaccagtctggtattttgccccatgtgtgatatctactaggcagaaattctttgtcctgttaactgcctcctgggagaaaaagaggcataccagagttaaatccttcatttggcccactgagacaggatgaggctggggtataaccaaaagacaactctatgactagggtctccaggtgccacgtaagtgagaccctctaggggcaataggtactagtacaggtcaaggatggactaaccatagtaggcaagcacacatggccaagcaggccaggaggcaatgccacgggtgggcaaagagaaagatggaaggccaaggcacaagaagaagaggcgtacgagcaggggcccaaacaacccgaagagagccagagaagacacgagacaagcc

SEQ ID NO: 265046 - DNA, 663 bp, Homo Sapiens
  misc_feature (150)..(397): n is a, c, g, or t
aagtctctggataggccctttgtggctgtgggggtgggttgagtgtttacattacattctatatcacaagattgataggatgtttaaagcagatgtttcttatcttcccctgagcccctacaaataaagtcaagacttttctttttttgnnnnnnnnnnnnnnnnnnnnnnnnnnnnnnnnnnnnnnnnnnnnnnnnnnnnnnnnnnnnnnnnnnnnnnnnnnnnnnnnnnnnnnnnnnnnnnnnnnnnnnnnnnnnnnnnnnnnnnnnnnnnnnnnnnnnnnnnnnnnnnnnnnnnnnnnnnnnnnnnnnnnnnnnnnnnnnnnnnnnnnnnnnnnnnnnnnnnnnnnnnnnnnnnnnnnnnnnnnnnnnnnnnnnnnnnnnnnnnnnnnnnnnnngagtgagccacagtgcctggcctgtcaagacttctcttaagttaacttcctgagaagtgatgtctaaaagtatctttgctggtgtgagaactccagtttccaacacatattatttccctcaactatttggaatattttagaattttaattccaaaggattagttttaatacaagtatgccacataactcagttttcgccatcttccatttcttaacagtgtaaattaaaagctaataatcataataataaagtgcatttaattatc

SEQ ID NO: 265047 - DNA, 1005 bp, Homo Sapiens
gtacggccggaattcgggatatcgtcgaccacgcgtcggcttccgagacgcctcactccaggaaccctatcatttcagggggtgaggagcccccagtagtggcaagcgggggcagctatgtatacccacctgtgcaggaatttccactggccttgattgggggcggccgggaacctggcggtggcaggggaaaatctgggagtgaagggccagtgggggctggtgagggggaccggatggaggggataggggctgccaaagtcactttctaccctgagccctacccgctcgtctatggcccccagctccttgccgcctacccttacaacttcagtaacttggccgctctcccggttgctctcaacatggtcctacctgatgagaagggtgcgggggcccttcccttcctaccaggggtctttggctacgcagtgaatcctcaagcagcaccccctgccagcagaacagctcccccaaatcttcatacacaatgcccccctaagggagaaggggaaagggcacggggtagaacgaagaagccagaagggagaatgtggggtgaaccactggggctcaataccgcagcttgccaaacaaagatgggcaagcctatcatgaaagagcgcgcacaaagaacaaagccaaggcaccctgagcacgtggggaccacgtgcaacacgtatgggaacgaaccgggcgaccgaggaggatccccggcgtgagggcatgaatagtagacagccggaggccgagcagaggaggagcacacgagaatcaggagcacgcacagagatgcggacgaaggacgggaaaagacacagacacggcagagaaggagacagtaaaggacgaaaacgacaaggaggaagaaggactcgacactgaaggacgcaaggcagccgtaggaaaaatgaaaaacagaaacgactgtaggtagaaatagacagaagagacagcagcacagcaaaaagaagagacacacaggcgcagagacaacgcggagaa

SEQ ID NO: 265048 - DNA, 673 bp, Homo Sapiens
tgtacggtccggaagtacgggatatcgtcgacccacgcgtccggaaggtcttacctctgaacccctcacagcctagggacaggagcggccggcttacctggtgggttgggggacgtcggcagctcgcgtactacgccagcaggattgaggagcagagaaacagttgcagttggttgtattcagtacctgcatttccgttgggaactccacctgtacttgttattctgtggaacctttttttatttgtagaaggagcaagaatattgaccttactatatagcacacgaaacaatctatgctgtatcgtgcctgctcaatccttaaagttaacttctaatgatagtaaaagaccttcctgctgcctttaaaatgcagcttgtgctagtaacatgcatgtgtcaaattgaagaattagacatagatgactagatagaaagtaattttgtaggtaattttagagttcaactccacccagctttcagtgaaggaacctttcaaataatagatttttgcttaccatagagaaaagatcaaatgacaaagcaaatattgaccattaagctggaatatggtgataattgaacagttgtataaatgaagtaattgaattgtacacatacaatgggtgaattttatggcatgtcaaagtatacctcaataaagctattttttt

SEQ ID NO: 265049 - DNA, 989 bp, Homo Sapiens
cgggaagctgggcgtgaaagggccattggggcctccctttttcatgaataggccaattgctaaaattttttgggggacctccggcgggatcttccaccatggacatagactacaatttgttttagactggaaggatcaaagctaacaagggtaacaccagccggtccagttcaggggcaattgtataaaggcgaccaaggtctgcatactacgcctaatatatagaaaagtttccaacggttcttctgcccactggaagaaggtacagtgtgtaaattttggagaggataaaaaggacaaataatctagaaatgtgtcttcttcagtctggcagaagaccccaggtctccaagcaaccacatggtcaagggcatgaataattaaaattggtgggaactcacaagaccctcagagctgagacacccacaacagtgggagctcacaaagaccctcagagctgagacacccacaacagtgggagctcacaaagaccctcagagctgagacacccacaacagcacctcgttcagctgccacatgtgtgaataaggatgcaatgtccagaagtgttggctgcctccaagtgacaggtaacactgcagaacctatctgaggacctgcccagcctcccgtttcaacgcagccactctgctgctctacaaagtttcacatcaggggtcagcggctttgtaaaggggactccgcaggaacacagctgtgctggggctgctgctgctgtactgcgccagcagagctgagtgggacagtatttaccatctctggtcctttacagaacaagactgctgactcctctcaatgacaagacaaaaactctgcttctcgagactcttacttagaaaaatagcagatttttctctctgtgactgataaataattctgctaacagacttctgaaggaaatcttcattttggggcttagctaagagcgaccgcgtgggtcgacgatatccctaattccggccggtacc

SEQ ID NO: 265050 - DNA, 765 bp, Homo Sapiens
ggcaggagcccaccgcccgggcatgatgagtccctcgtgggacctgtggacccatcctccgccaggcagtcccgagacacggaagtcctgcttgtcgggttagagcctggcacccgatacaatgccaccgtttattcccaagcagcgaatggcacagaaggacagccccaggccatagagttcaggacaaatgctattcaggtttttgacgtcaccgctgtgaacatcagtgccacagagcctgaccctgatctggaaagtcagcgataacgagtcgtcatctaactatacctacaagatacatgtggcgggggagacagattcttccaatctcaacgtcagtgagcctcgcgctgtccatccccggactccgctccagcaccttcttacaacatcacagtgtgtccctgtccctaggtgacatccgagggcacgccgggcttccctcccaagtgcacacccccccctgttcccagtttctgacttcccgagtgacagtggtcagcacgacggagatcggcttagcatggagcagccatgatgcagaatcatttcagatgcatatcacacaggagggagctggcaattctcgggtagaaataaccaccaaccaaagtattatcattggtggcttgttccctggaaccaagtattgctttgaaatagttccaaaaggaccaaatgggactgaaggggccattcttatctgccaactctgttcgacgcgtgggtcgacgatatcccggaattccgaccgtaccagcc

SEQ ID NO: 265051 - DNA, 700 bp, Homo Sapiens
ggccagtgctggtaccggcccggaattacgggatatcgtcgacccacgcgtccgggtcagtagatgtgggcagacaccctggcttggactgggcatgtttctaccagttggtctattaattgttgtgatgatggtgaaggatctcaacaagaagtgatttcctctgaagatattggagctagcattttcaatggacagaagaaggtgctgtattatgctgatgcccttacagaaattgcttttgtggttccttctcctgtggagtccttaactgattcattggaaagtaacatctcggaccaagatagtgattcaaatatggatcttatgccaggaattctgaaacagccatccctgacacttgagcttttccccaatcatacagacaatcttaattcctcacagaggctcagtcccagttccagaatgaggaagctgcctcagggtcgccctgttcctccccttggacctgagacaagagtttctgtagtctgggtggaacgctatgatgatatagaaaactttcccctctcagagctgatgacagagatcagtactggtgtggaaactactgcaaatagtagcacttcactgaggtacactctatttgcttgaagttcatcagcgtgtctttttttaacatactgattgcagcttaataaataaggaattatgaaacgaaagagttgtagacaactag

SEQ ID NO: 265052 - DNA, 1130 bp, Homo Sapiens
  misc_feature (978)..(978): n is a, c, g, or t
ggtaccggtccggaatttcgggatatcgtcgacccacgcgtccgattgtcaacaagagggagtggcaattcagaagcatatttaagccaagtcctcaagactagaaagcatgaagcaggggaggcgttttgaaagcgtaagaacaaaagaccatgggcatggatggccgagtccggggatcagcatcgtaatttgttgagaaggaggccgtgctgtgctgccagttattaatgggtttaatcggttgatacacagccctactggcctaaccagtagcccagggcccgagaggatttgcaggtcgtgtcagaatttgattgaagttccctccacttggcataaggagacaccatcagcctgattgagagggtcatggtgagatggagcccgccaaggtggcagcgcttgagctgaccacaccaccagccatagagtgggagcctttcctgccggcttaactgcagctaatatcaaaagcactggtatgggctgtctatctgtgctggaacctgagtttatctttgtctgcaattacgattcttctcggtttattttgccagctcattatccagcctcctggaatcaggcctcccaaatttagcaggtgctgggggaggaccctagggagtgggtttatgggggctagctggtgaaactgccccttcctttcttgttctatgagtgtgatggtgtttgagcacactgtgggctatgttcagcgcacttcacttgtgcaacgctggcgcagcatcacctaaacgtttaaggcccagatattggttggaaccattttgatttgttcaacttcaatgggattttaaaaggtttcctgaaaatagcgtaaagtggcaaaaatctaagttaacgaccccgtgggtaataagcacccacacgttgttccttttatagtgttatacacacgttgttttaacttgagtaaaattgtggccccgtgtggaaccttcatcgttgtaccangcaacactatgatgggcaccaatgaaccgggtaaaaacaaagggcgcgatcttcagcagaccatcattgaaacacgcgttcataacggcgtcgactgttcttgtgctgctgttatctatactatttttgttcgtgccttctgactatagaca

SEQ ID NO: 265053 - DNA, 994 bp, Homo Sapiens
gccaagagcgtggtacggccggaattccgggatatcgtcgaccacgcgtccgatgctataagtagtaactccattaaacaaaggcatttacaaaagcacacaggtgtttagaaaagcaatagtttcatcaattccaagttatgtggatattgtaactggccacaagaatgaaatggagggcatttggtgtcataagatggcatgtcttgatgacaagaaacaaaacgcccttcattaatatgcctcagtgtaataactattatagaaactgttggcaagcagagtgctttcctataacagaatgtgtcttaattttctactcgagggaaaggtttgtccaggtaacaacactaaagacaaccctaagaacacccactccaggcagtatgtccattagacactaaaactctcccaaattatttgttcaggggagcctgggcgattctgccaagaaggcagggtgtgttgcccttagagcctatacagttctcttgggagaaatagtctttcagggcaccactgttaatcactgagactgattctaatgcaaagcagggaagacagaggcagaaaccaggagagtggtagatcagtgcacgcccagatatcggaatggaggagcaaagtttcattcacggatgttgttgaatgctgctgccaaactcttcctttgtcacctctagggctattccacataagttacttatacaactgtcgggctagaaactgaagggctgggtcaaccgctacctattgtgccatgctgaacgtcagggataactaatacgaactgtccgttcccaacatgcaactgggtaccacaacgacgcacaacggacgactcaggtacggcggtccaccgatgcgaaccaaaacacacagcaagaagacaatacactaaacccataatcgccgaaaggcggcataacgcgcccacgagaccggagcgcaagagcacaaaaaagagagaacggaggacaaacaacacggacaa

SEQ ID NO: 265054 - DNA, 730 bp, Homo Sapiens
  misc_feature (34)..(34): n is a, c, g, or t
aggtaggccagacctgggatgagggtgctgtgtngtgaagggctgcatgacctctccctaggatcacagcttggcttcctctctgcaggtacaggagggccagatcacacacatccagtatgaacaaggagccccgttccttcaggagtcccaggtagggccgtggggggacagggagacctggggcacaggcaggtttctccaggccagcatcttatcagcttctcccctccagatccagtatgtgcctgtgtccccaggccagcagcttgtcacacaggctcaacttgaggctgcagcacactcagctgtcacagcagtggctgatgctgccatggcccaagcccagggcctgtttggtacagacgagacagtgcccgaacacattcaacagctgcagcaccagggcatcgagtacgacgtcatcaccctggccgatgactgagccccgagggcccaacacagatcatggatttgcggccagctctcctgggggtagggggccaccaggactcacctccctcttcatttaggatctccagatactggatagccagcatcctctcattcccagggagccagacctgtgctgttggggttaggggcagccatgggccccagccaggacatgctcgggtgccccagcctgcaggcaggctttgggagagaaatttatttttgtttgggtggacccactggcctgtcagtctcaataaagggaccggagtcc

SEQ ID NO: 265055 - DNA, 1091 bp, Homo Sapiens
  misc_feature (860)..(860): n is a, c, g, or t
ggtaaccggtccggaattccgggataatcgtcgacccacgcgtcggattaacaggccctatatgttcttaccacatacagaggatggcatttattttgctctatgacacttgcaaaaatctctactgtaattaattgggtctattattaactctctgttccatcatagaatgtggccaggccttacaatggagagccagagttaaaacttcaagttgcatctgttttgggctgagtcaccacctttgcctcatgctcctttgtctgcaaaggcctaggattctttctttaaatgaaatgcttaggacttgtggcttgttacatttgtcatttaactgcagtgctattctttgaaagctgctatgtgtattttctctgaagtctgcattttactaaaatttacaacagtctgattgattgattactgtccaggtacattttagaaaaagtgttcttcttccagtttgttttactaagcaaactttgagtaaatcctttgtcctatattgaatccagtcccaaagtgttcaggtgagtttctctagttccataaacaaaacatacatagtgggaactccctggtatgccatagagcacacaagaaccccaatattaatgctaacaattataccagtccattttgtttattctgtggaattgacttgacaaagcatgaaaatattcccagtgtctgtctgataatattttgcatctaagaatgggtttgactcaagatcttgggttaccaagatgtcttaaatgttcagtaaatatctttcttacagtccagtagcttagagcatgtttgctgattgatattacatttaaacttggggctacagcttgttacctagaattttngagatactaagagaatgcaatttttaaatggcccactggttttatttgttttggagagagggtctcattctgtcacccaggctagagtacagtgggaacagtcatggctcactgcagcttaagctcactgcctgggctcaagtgatcttactccagcctcccaagcagctgggactacaccaccacaggtatgcaccaccatacctggctgatttttaaaattttttctag

SEQ ID NO: 265056 - DNA, 998 bp, Homo Sapiens
  misc_feature (178)..(190): n is a, c, g, or t
agcaggcctggtacggtccggaattccgggatatcgtcgacccacgcgtcgcacctgcctgtttacattaattgcaaggagcataacgtacaggctgtatgtacaatcctgggcattgactctgtgacatttctagcatatccaaggcaccaccagtgatttctcctgtttcttggtnnnnnnnnnnnnnaaggtacgtattctgcaatatggctaaaccctttcctgattgagagttaaagcaataggagtcaagttactggtgccacagatctggaggtatgataggtcaggggctaggtgttgaacttagttaaggaagactgagagcagaacaggtttgtcatctccgcaagccagaaagtgatcacaaaaagaggcagatgatagatactggggtagggtcataccacagggaaatacctttcctgggcttgttttctagcatatcactgacctgggatctttgggtgatcaagggtgtggttagtggaggctctgtgctgcacgtatgcagtatcctatctctttctacatcagatcaaaacactaagttggtgtactgcctcgaccttttttcagctcaccctggaacatatacagagttgagagttttagacaatctctaggtagaggagacaagatgtagacccagacagaagaaatctgcttccctaccatggctattccagcaccccaacctgtaattgccaagtcctctaaggtactaatttgtagctgctctgaagtaaggatttcggattcagctggtagggaaagactctgcacctgctgtcttagggaagaaatggttcaaatccatgtggtgacattgcattagtctccctttcactgttttcttattctgtaattgtttgttatatttcccaaaaacgtcttgatcactaagcaaagctgctagtgggattctatatttcgtgtcatcttttttattataatttattgcaaatttttttctgaataaatatatgttgtat

SEQ ID NO: 265057 - DNA, 469 bp, Homo Sapiens
gaaaacaactttggtacacaaagccagctttgtgagcagagctccttcccctctccccgggaacggcagggcactgggacctctggtcggtgcctcccacccactgcagccctagtgccttagctccatgcccagctgcagccccactgctctggactatggattggacgtcagagcatattggaggttgcctgtgtgttccccaccaagtccttcggtaacactctgccacactaagctctgtacaagcatgcaccaacagtccttagtttttgctgtgcactgactctcggcaaaggtggtttccctcatcaccttcctgatggtgtttggtcagtcacctgtcagggtttgtgcgggttgggccccaaaacagcatatgctgctctaagtctgctctctgcatgttttagaaacaaagttgcaagtctgccctgaacctgtaagcatcaaataagcatgagagaga

SEQ ID NO: 265058 - DNA, 653 bp, Homo Sapiens
gtggtaccggccggaagtacgggatatcgtcgacccacgcgtcgggggcttctgccctgaccaagggtacagcctgttcctcgtggcagcccacgagtttggccacgccatggggctggagcactcccaagaccctggggccctgatggcacccatttacacctacaccaagaacttccgtctgtcccaggatgacatcaagggcattcaggagctctatggggcctctcctgacattgaccttggcaccggccccacccccacactgggccctgtcactcctgagatctgcaaacaggacattgtatttgatggcatcgctcagatccgtggtgagatcttcttcttcaaggaccggttcatttggcggactgtgacgccacgtgacaagcccatggggcccctgctggtggccacattctggcctgagctcccggaaaagattgatgcggtatacgaggccccacaggaggagaaggctgtgttctttgcagggaatgaatactggatctactcagccagcaccctggagcgagggtaccccaagccactgaccagcctgggactgccgctgatgtccagcgagtggatgccgcctttaactggagcaaaacaagaagacatacatctttgctggagacaaattctggaga

SEQ ID NO: 265059 - DNA, 621 bp, Homo Sapiens
agtctgagcagaggacagtctgttcacggctaggaatcaagttgaaagttggaattctgtagccctggcctgaggcaggttttgctgtaagaaatcttttcagtttagcaccaacatcttcctaggtttcctgtctagacagtgcaaagcagtgggaacatgcgagaaacgaaaaagccatggaaagggagggagacatgcttgcaaataggcctcaaaaatggaggtctcccactttattggtatcagaattacttggagagttttttagaagggtagatccccaggccccgcccccacctccaaagtcctgagcagctggaggtacacagtcatttggagggggaggaaaactgatggattctacctgaggcaaaaagatgagggaaaggaacaaagaaaaagggctgaaaaaaggtctataaacacatgggtggaaatgagcaaaagcacagaagaaacataaaataacaaacgtggctcatggagctgagtggaacagcagcaaccaggcatatgacctcggtgagaaagcaccatgttgcacgaggcttcataaattctggttctccctggagtctctgcttctagaacacattagccacacaaaatcctcaaaaa

SEQ ID NO: 265060 - DNA, 993 bp, Homo Sapiens
tggtaccggtccggaattccgggatatcgtcgacccacgcgttcgctcaggtaggcaatcttgaaccctctatgcagtgagagcattattaatatgagatgttgaatgatgcctttacagacttcagcagcaaagccatttggttgaggttttctgtgttaatgtgaaaagctaagccactgagatttgcaggggagcttctgagccaccctgcttgtggttatatgaggatgtaaaataggtggaattaaaatgtgagcaggaaaggcaaggcatgtgtgcattttcactcattttggtcaaggttaaactgacatgtatagcactgaggtctgtagggttcttaatatcttttgagtcttgctgtgaaatgaaagtgtgggaggtttcctttgtccattagcagccccaagaaccagaacccttttgctgcttttcttacatacctaacagctctccaatcatgatgaccaaggttgttcttcaatcaaatgtgttgtgggattttcagtccgcaaatgaagtgctctctaatgaatgggacaccatgataaatatgtatttatatttagatgccaaagtatggcaaattatttccaaatgataactacaaatgggaattttcgatattctaaccttttttatagaaccagctcacttttcatttctttttcattttggaattccagacactggtgacgctgtggggggtcccctcgtgtggattgcacgggatggattattcgggtccccttcaagggtggtttctgtgggccccaaaccgggttgaaagtttcacatttccaaatttcttggcccgcttgtgtttaaaacgtcccttttccaagttctctttccaaaaaagaggggaaaaaaccgtttttgcgagacacctcagcaaaaatgaggttgttaaacaataatccgctaaagtagcccaatatatgatacatgcatttctcttctgctcactctttctatctttatattccg

SEQ ID NO: 265061 - DNA, 643 bp, Homo Sapiens
ggtacggtccggaattttcgggatatcgtcgacccacgcgtcggaggtggcgacggccggggccggggtcctgcccggctgcggaggcgggcgcgacgggcggcgggggtcgctgctcctgaggcgatgatgggcaaggaagaggagattgcgcggatcgcccggaggctggacaagatggtgaccaagaagagcgcggagggagccatggatttgctgcgggagctgaaaggccatgccaatcacgctgcacctgctccagtccacccgagtcggaatgtctgtcaacgcccttcggaagcagagctcggatgaggaggtcattgcactggccaagtctctcatcaagtcctgggaagaagctcctgggatgcttccgatgccaaagccagggagcgggggaggggcatgcctctgcccacgtcctcgagggatgcctcagaggccccggatcccagccgcaagaggccggagctgcccaggcaccgtcgactccgaggatcaccacatttcctccggtgcctgtcacctgtgatgccgtgcgcaacaagtgccgcgagatgctgaccgctgcctgcagacggaccatgaccacgtggcatcggtgcggactgcgagcgcctgtcggctcagatcgaggaat

SEQ ID NO: 265062 - DNA, 1337 bp, Homo Sapiens
taactgaagtcggagcaaatgaattgagcattctgagtacttggctaatcaagtgatgaagagcagcaaattatcatcctgatggaactattcaagtaagcaatggtagccttgccttttacccagcacagacgaatgtatttcccagacctactcagccatttgtcaatagccggggatctgttagaggatgtactcgtggtgggagattaataaccaattcctatcggtcccctggtggttataaaggttttgatacttatagaggactcccttcaatttccaatggaaattatagccagctgcagttccaagctagagagtattctggagcaccttattcccaaaggattaatttccagcagtgttataaggcgagggagggacatctggtggtccacgagcaaattcgagagcagggtggagtgattcttctcaggtgagcagcccagaaagagacaacgaaacctttaacagtggtgactctggacaaggagactcccgtagcatgacccctgtggatgtgccagtgacaaatccagcagccaccatactgccagtacacgtctaccctctgcctcagcagatgcgagttgccttctcagcagccagaacctctaatctggcccctggaactttagaccaacctatgtgtttgatcttcttctgaacaacttaggagaaacttttgatcttcagcttggtagatttaattgcccagtgaatggcacttacgttttcatttttcacatgctaaagctggcagtgaatgtgccactgtatgtcaacctcatgaagaatgaagaggtcttggtatcagcctatgccaatgatggtgctccagaccatgaaactgctagcaatcatgcaattcttcagctcttccaggcagaccagatatggttacgtctgcacaggggagcaatttatggaagtagctggaaataatctacgttttcaggctatcttcctttatcaagattgaaagtcagtacagtattgacaataaaaggatggtgttctaattagtgggattgaaggaaaagtagtctttgccctcatgactgattggtttaggaaaatgtttttgttcctagagggaggaggtccttacttttttgttttccttcctgaggtgaaaaatcaagctgaatgacaattagcacttatctggcactttataaattgtgatgtagcctcgctagtcaagctgtgaatgtatattgtttgcacttaatccttaactgtattaacgttcagcttactaaactgactgcctcaagtccaggcaagttacaatgccttgttgtgcctcaataaaaaagttacatgcaaaa

SEQ ID NO: 265063 - DNA, 1019 bp, Homo Sapiens
ctggtacccctccggatttcccgggatatcgtcgacccacgcgtccggggaatcccatttgtgatgatttgggcacactacttgagctgaggctagcagtcacatgatttggctgtctctgacctgaagcttttgaagtaaggttatgtctcttccctgaagcttgtttatagtggtaatttggtgagtttgagctttgagcttgtcttagaaaataagactgtccacctggggaggggagcttatagggaacccgtgttaactcagaatgctgaagaaagtgcttttagccaacaaaagtaagattactatctagaaggtggaaagaagtcattgcttctgttcctccagcagtcagttgactctaggtttcctttggtttatatccccagttcttaatactaaaacttatatgacttcctatcaggaagcacacaaaaaaagcgtcatttaaaaccctggatataggctttaaaggatacaaaaacagcagcattgtcgttttgccaggttcatcaccatttatgatgtgctacccatccttccaacctccctttcctgcccccaagcctcccagccaggccagatgtgaagattctattaatcactgtttcagagaacattaattcttgtatagaataattatctactaaattgcttattatctgtgactaccttgcagagaacatctcaacagtgcagtaaaatagctctcctagacttgagcttccagccaggcatttagatcactcttaagcctttgtggaattctgaggaaaaaaagcaagatgcctcaatgccaatgctgggccataagattctactcccctccctgtagggtggggcgcgtggctcagctttggaaaatcattttgccagtaatattgcctgtgaatccctttaagaagtcgtcctgatctgagcctgtctttctgacactttggtgctgaattgaaaatggtaagtaaagcagtgacagatccacgtagcctctttaacctctttattatcttgccaaa

SEQ ID NO: 265064 - DNA, 891 bp, Homo Sapiens
ggtacggtccggaagtacgggatatcgtcgacccacgcgtcgcccacgcgtccgaatctctgctgtcgtcagcatctgccacagtaggtcatggattgacggcagtcaaggaaaaagcaggagccactctacggattcatggtgtaaattctggatcttctgaaggagcccaaccaaatactgaaaacggagtccctgaaataacagatgcagccacagatcagggccctgcagaaagcccacccacttccccttcatcagcctctcggggtatgctgtctgccatcaccaatgtggttcaaaacacaggtaaaagtgtcttaactggaggccttgatgcgttggaattcatcggcaagaaaaccatgaatgtccttgcagaaagtgacccgggctttaagcggaccaagacgctcatggagagaactgtttccttgtctcagatgttaagggaagctaaggagaaggagaagcagagactggcacagcagctcacgatggagagaaccgcgcactacgggatgctgtttgatgaatatcaaggcttgtcacacctggaagccctggaaattctgtccaatgaaagcgaaagcaaggttcagtcatttttagcatcacttgatggagagaagctggaactcttaaaaaatgacctaatttccattaaagacatctttgcagccaaagaattagagaatgaagaaaatcaagaagaacaaggcttagaagaaaagggagaagaatttgctcgcatgcttacagagcttctctttgaattacatgtggcggccacacctgacaaactcaataaggccatgaagagggctcatgactgggtggaagaggatcaaaccgtggtgtcagtagatgtggcaaaagtgtccgaagaag

SEQ ID NO: 265065 - DNA, 678 bp, Homo Sapiens
tggtacggcccggaattccgggatatcgtcgacccacgcgtccggtggatcgaacctctcttcacattgtagactttttagttcagaacagtgggaacctggataaacagacagggaaaggcagcacagccctgcactactgctgcctgaccgacaatgccgagtgcctcaagttgctcctgcgggggaaggcctccatcgagatagcaaacgagtcaggagagactccgctggacattgccaagcgcctcaagcacgagcactgtgaggagctgctgacccaagccttatctggaagatttaattctcacgttcacgttgaatatgaatggcgactactccacgaagacctggatgaaagtgatgacgacatggatgagaaattgcagcccagtcccaaccggcgggaagaccggcccatcagcttctaccagctgggctccaaccagcttcagtctaacgctgtatctttggccagagatgctgcaaaccttgccaaggagaagcagagggctttcatgcccagcatcttgcagaatgagacttacggagccctcctgagtggcagcccacctcccgcccagcctgcagcccccagcaccaccagcgcccccccgcttcctccacggaatgttggcaaagatcccctgacccccaagccgagccctatgcagtctc

SEQ ID NO: 265066 - DNA, 1041 bp, Homo Sapiens
ggtaccggtccggaatgtcgggatatcgtcgacccacgcgtcgcagatctgttccccttatctgcagaaaatcaagccctgactctgcactccccgaagtagtgatgttaattaacaactgaagaggtaactaaatctcacatgcaggtctaatgactaataattggagtacggctgctagacaactgcattttagtatttctcttccattctcctggttttgtagacccagaagattgaatgagtgacataaatctttagttcggggcaagccagggtgggctagggtggtaagctggaggacttcatccttcagttaggctgcacaagtaacattacctaaaaggcactaacatgctcaggttccccagaaagaggcgtaaggaagggcctctccttaggcagagcttccacctgccatccgtcttggggttcagtgagcttcaagggctcacaatggaagcactgtcatttccccagaaaagctgtgttccctatgctgaacacaccatacacattctcatctggaatctaaggagcagctttttaccctgatccagtatcctgaggaattttaagcctccactcaaatgacctcgctgtgtttgtcatttccatgggaaagaactcttttccaacgagatctggtagttccaggctctaagacaggaacggatgtgcataagtgggtctacttcaccagactccatgagggagaaattatggtgttttcctcctatttcttctgaacccaattctcttgtattcaaggcagcctgtacactaacgtctgaattgcggtctgtatgctctatccaatcaatcataccattaagaggaatccacctttcattatagactctcctattgtcgacagttcgcacgcgaggggaaccttgtcccaagtcgaggtcactcagactacggacctaggggggctccccaccggagggccgccaccaactggtgtgtgaggggacactctgcgttcaaacaaaaaaggcggcacccctgtcacacgggcacatgcataataccagg

SEQ ID NO: 265067 - DNA, 1047 bp, Homo Sapiens
tgtaccggtccggaagttcgggatatcgtcgatccacgcgtcggcttcgggacagcaaactgcagggattgtcctttaagtacacagtattctgatctgctctctagcttgcatgtccaagtattctgcagggtgcatctattattatccatcattccactatactcacaatccttcacaagcagaaaagttacaaaaagacctaaaacggtatctcacaagaaaaatgggttgaagctgttatgagaataaggtgtactaaaggtctttcaatgcacacttttcacggtaacttcttgtccgttctactgatttgttatcccttgccaacatcaatcctgatgctggattgcggtgcagttgtcaattgaagaaagtttaacagatacttccttagtatgttttcaaacagccctattatatacatcaagcaaaggtgagcggagaattagagtacatacactttgtttgccagtggtaagttcactagcagatgtatatgcggcgagtggatgtacaagctgccatctgccttctggcaaacatggctgtggatcggtccgtcttcatcaagtctgtcagatgcaagagatgccttagtgaatgctgtagtggactcattgtctgcatatggctcaactgtctcaaattaacagcactctgccattgatggcgcccagtccctcaagttggttctctctatgttaggcccttctcaaacagaccgcctttagcaccggcgtcacaggcaccccgggtgggactgaacgccgcatatgccagggtggtcagactcaaggtccagcaatggtcactacggcaacaggagcacccagtaatcgggtcaaccgtgccagatacgggcatcctgcaagacggacgcacaacacctccaagaggagacaaacaccaaacagcgacaaagagagagcaaacaagacgaagagagaaaaaggcaggagaaacaacaaacaaaaacccaaaaagaccgcaaagcgcgtgaacgaacaccacacacagaccgagagagcctcataggaccacgag

SEQ ID NO: 265068 - DNA, 965 bp, Homo Sapiens
  misc_feature (887)..(887): n is a, c, g, or t
cgagatatcgtggacccacgcgtcagggctcagtctagcgtccgtgtgtctctgtgagcatcttagacagagtgctcatgatagttagggatatagtgcatcggactggcagcctgaattggtggagaccgcagtcagtaacttgagtgatatatggaatattaagaggacagtaacccatggccctacgccccgtacctgatcacatcgtgccctgctgggcaataccccaaacagcccacctatccatctaggcctggccatggccctgtgccatgccacatagaggattaagtcaggatatcttgagccctctcaaatcccatgttatattcaggcctctgccaaatatagagccagacttctgtccccaacacttccactaccatggagcccacattagtaaaacgctctctgggcccagcgttcgccagaaaagacaccaggggaagcaaggctcaaaccaggggcagctaaatctgatcttgtgggaccagtctctagtaagggctttcagcgtggctgtctgtccattgctttccaaataggatgcagcaatgattggtacatgggtatcaagatcggcagtaggggctagtccaagtttagcaatagccaaactggagagcctctgaagtatgagagtcccagagggatttgtcagctcctggcagacatcctgattttcaccttcctgagtctaccctaccccagagggccccagtctcactgtggtgatggttagcccagtgtgtgctgcactcacacaccagcacggggtccgctttggcaggctggtgggatgctgtcctctgggttaagactgtctcccttctcgggagcactgggagggttctccatcttgcgtgtttcagtgggaagttggncagatacggaaaacaggcccctataggggaaggcagttccatgtaaaatgaattaatttctttcccaaaagacttaaa

SEQ ID NO: 265069 - DNA, 833 bp, Homo Sapiens
aatgggccatcagagccaggactcctggaccaattctccaccaggtacccaatctggattttaacgaccctcgtcaatataccctaaaggataatgttttttaaagaagcttcaaagagacttggcctggatacagtgacatagacagacggtcatttggagtcagtgctctctagaaactaaatccgtctcagaaatgctgcaggcaccagccgttcagaatcttcctgtatgttctagtagagacgctgtatcttctcctcagaaacggcttttggattcagagtttattgatcctttaatgaataaaaaagcccgaatatctcacctgacgaacagagtaccaccaacactaaatggtcatttgaatcccaccagtgaaaaatctgctgcaggcctcccgctgcccctgcggctgctgccatccccacccctccaccgctgccttcaacctatctgcccatctcacatcctcctcagattgtaaattctaactccaactcccctagcacttccagaaggccgggggactcaagacctacctgttgacagttttagtcaaaacgatagtatctatgaggaccagcaagacaaatatacctctaggacttctctggaaaccttaccccctggttccgttctactaaagtgtccaaagcctatggaagaaaaccattcaatgtctcacaaaagtccaaaaagaagtctaaaaaacataaggaaaaggaccaaataaaaaagcacgacattgagactattaaggaaaaggatggtcatggatccagagcggacgcgtgggtcgacgatatcccggaattccgggcggtaccagc

SEQ ID NO: 265070 - DNA, 1010 bp, Homo Sapiens
ggtaccggcccggaattacgggatatcgtcgacccacgcgtgcggagaacacatcttagaagatgaaaaacctgaatctatcagtgacactactgacttggctctaccacctgaaatgccgattttgattgatttccatgctctgaaagacatccttgggcccccgatgtatgaaatggaggtatctcagcgtttgagtcagccaggagtagcaataggtttggcttggactcccttaggtggagaaatcatgttcgtggaggcgagtcgaatggatggcgagggccagttaactctgaccggccagctcggggacgtgatgaaggagtccgcccacctcgctatcagctggctccgcagcaacgcaaagaagtaccagctgaccaatgcttttggaagttttgatcttcttgacaacacagacatccatctgcacttcccagctggagctgtcacaaaagatggaccatctgctggagttaccatagtaacctgtctcgcctcactttttagtgggcggctggtacgttcagatgtagccatgactggagaaattacactgagaggtcttgttcttccagtggggtggaattaaaagacaaagtggtggcggcacacagagcgggactgaagcaagtcattatttcctcggagaaatgaaaaagaccttgagggaaatcccaggcaacgtacgaccaggatttaagttttgtcaacagcaagctgcctgaatgaggttcttaatgcagcttttgatggtggttactggagaccagacgggtctgtgaatagcaaactgtggccaatctccatttttagaatttagtttgagggtcaacgtctgaccgtgtttttcccccatgggttgcgagcccggtttacacttccacggtaaccccagttgcgggcgttcaataactgtgtgcggaagagaaaaaggggcaccgcgagagacatttagagagatgaagggcggaagagaatggtgtacacaaatatgtttatataga

SEQ ID NO: 265071 - DNA, 1211 bp, Homo Sapiens
  misc_feature (16)..(16): n is a, c, g, or t
  misc_feature (34)..(34): n is a, c, g, or t
  misc_feature (72)..(72): n is a, c, g, or t
aaatttaaagaccctnccccgaatcaatactttnctggatttggttaactgcgtcatgtatttaagggaggnaccgaaagccatcatgactgggtgtgctttgaaacacactatgttgcatagttgctggccaacagcatcttctttgctgacctatatgttcatttttccagatcaaccttttcggccttccttgtcccgcaataacagcgtatcctaattactgcaaaaattgatgaaggggatatattcctggcagctgagtcctggaacgcctgacgtttgtaccagctgcatctgcattgatagcgtaattagctgtttctctgagtcctgcccttctgtatcctgtgaaagacctgtcttgagaaaaggccagtgttgtccctactgcatagaagacacaatttccaaagaaggtggtgtgccacttcagtgggaaggcctatgccgaggaggagcggtgggaccttgacaggctgcacgccactgctactgcctgcagggccatgaccctctgctcctgatcgttcagctgcccccctctgccctgtgttggagcccatcatgcgtggaaggaatgttgctgtccaatgtgtccagaaatgtatgtcccagaagcaaccaagtatacccattgagaagacaaaccagtcgaggagaggtttgacctggaggttcccctgtggcccacgccgtagtgaataaatgactatcgtccagtctccctagagatatgggtcacctccaggtagattacagagataacaggtgcagcccaagtgaaggattcgttcacctggactccaatgtgcctacagttgtggttcccagtaagtatatggctctctattataatagctcctatagcatcaatcagaagacacagggataccagtgttcggcgttatcgaaccaccaaggaaagccttctgacctaaaattaatcagtagtatcccggggcggccacaaaaggcaccgcagccagtggagttcccaaaaggtccattgccgaccgctccacgatcagggccccgcggcaaaggacccacagggaatctcccaaagggcaaacgccggggggtcaccaggaaaagacgcgcacacacatggccccgggagctgtggcgccaccacacaggcgggccgaggcacacccaagccagcaaacatcacaaaaaggggaggggagaacacaacagcacacgcc

SEQ ID NO: 265072 - DNA, 1038 bp, Homo Sapiens
  misc_feature (469)..(470): n is a, c, g, or t
ttacggtcggaattacgggatatcgtcgacccacgcgtccggtatttgaacaccagctgaaacacttagtggctgaatggtgcaggtcttagaaactttaagtcatgatacattagtaaccactaaaactcgagcccttaccgtggcgtcatgagctgcgttgtaacaagcctgaggaagaaaaggctcttctggtgcaagtggtaaataaactgggagatcctcagaacagaattgccacaaaagcatcccatctgttagagacattacttgtaaacatcccaatatgaaaggagttgtgtctggtgaagtagaaaggctactcttccgctcaaatatcagctccaaagctcaatattatgcaatttgctttttaaaccaaatggctctgtcccatgaagaaagtgaattggctaacaaattaataactgtttacttttgcttttttcggacttgtgtcaaaaaaaanngatgttgaatcaaaaatgcttagcgcccttttaacaggtgtgaatagggcatacccttattcccagactggtgatgacaaagtaagggagcagattgacacactgtttaaagtgttgcatattgtgaattttaataccagtgtccaggctttaatgttgcttttccaagtaatgaattctcagcagacaatatcggatcgatattacacagcattatacaggtaagaacatacccttccaatatgagacatgaaataataacttgatgtagtacagcacaagcagtgccctctgtggggcaagaaaaagagttagaaaatttggttttaggccccctcagcagcttgctactcgccaccttcaagtaagtcacttaatctttgtttccctgatgggcacaaattatattagatgctttgaatacatttttcattttgagaggttgtaaaatacagaaaaatacccaaaagattcattcatatctaccacctagtatttcagaattaacattttgctatatttgttttaaatcttttgggatattaaagaaataaaattgcagatataa

SEQ ID NO: 265073 - DNA, 669 bp, Homo Sapiens
caggctggtacggtcggaattacgggatatcgtcgaccacgcgtcgcgaccacgcgtccgctccaggactctgggttcttaagatttctgggagcgtgttcacccaccccctttaggaaccaggctggtgttcttgcttgaaagcgtgtgccctctgagtgtctggctgatcacatcagagaggtctgcgtggcagttggggctgtcacgtgaccagtgacccacactctctgctgcccagtactgccaagtggggagggtcctgcctttttctctgccccaggtctgggacgcaggtgatgccagccaggcccaggagtgcccagcatcccccaactgatgacacagtagcactgattctgtcttttcctcagaatctggcctttttccatggcaatgaggtggggcccagcctcctctaaagtgactttgtttctgcacagttgtaactgctcttggggatgtcagtgaggctgggagcagggagccacgggatgctgagagaggaggcccgagaggacaccccaccctcctagcgtggcctttgatccagacttagggacgaggctgtcactggtgggcaccctctgttcctgtttgtgtgtttgaatagtctgaaatgctgtgactttttttgtgtgaataaaagatatgaaacttctgaatctc

SEQ ID NO: 265074 - DNA, 1037 bp, Homo Sapiens
caggctggtaccggcccggaagttccgggatatcgtcgaccacgcgtgccgagaaattatgtagctcccttatgtgggcaaaggagctctatatagtttcaattgtataaaagttaggaccagcgtgtgttacatgtaatattttagattcagaactggagctgaaggaagggaagaaaagtatgtgatttttaccttttttaaccaaatgtgaaaaagtcagttttagaaatttcgtggtagtaagttcggcatttgttacatgtatagagagaagactaataatctctatttataactaaatcattgagatagaaaaagattcccattgactgtagacttcttcccattttgtcttcccttctgcctgtttccccttcaggcttggctctaggaaccaaagtgatttgttgttgttccaacctgggctttgtgactttggttagtgccactaccttcttccctcctttcccccttcaatttggaaataaatttctgtatatgttgcaattttaggtttaggtttgttctttttctttttcattaatcctctctcacctcacagataccccctcccatggcaaataatataataaccagtgaatttgtcaggaatttcaaaattagcttttttccacttaaaggagaaaaaatatttgggactagcagcagaggcagtaagagatgtgaacttggttgagctctggatacaggtgagaaggagattgatacttcatgaaacgagcatgggtagtgttacagaggaagcaggcgataagcaaatcgaggtaaagacttggcggggggggatagcccggggcgccggcaggcggattatctatgacaacgagcgaaagagattctgcagaactaaacacaattgaccaggcggtactcaacggcggttgttcactaggtaacacttgccaaacgaacgcacaacagggggctaaaaaagtccaagcacaagggacccacaacgagcacaacacacaacaaaaccaacccgaacacagacaagacgagagcaacaacaa

SEQ ID NO: 265075 - DNA, 1026 bp, Homo Sapiens
ggtacaggtcggaatctagggatatcgtcgaaccccacgcgtccggaatatttatcagtgccattaaatgtctgtggtttcagtatcaatgaaaatgaacctaaatataacaaagaaagcatatgtggctaggatgtccccctaacatgtcttcctttgttaatgcaggaattccttagtttccttgtaacgctgtcctcgtgagtttgtgtgtgcatgtgcgtgtttgaagtaccaccttgggttttcacttgaaattagaaaaatcgtagttaatttgagaaaatgttacaaattcatcatggctgtaggcacttatttctgttattgagtagtggtgagaattcctattggtacagctgtagggccagaagagggagtattgatgctttttaacttaaccagatgcagctatttttgtttgatgttaccaatgatagaaatcattttaaacaccttagtatctggtatttcaaatacgtagaagtctttaaaggtcttatcgtggggagaaggacttttctttcataacaagagaatttccagatcagtgattacaagtggggcagtaacttgctaagagttgcttcctggagagtagatctgtatgtgtgacatcacaggtagccccaagaattatctaatcagattcgtccagacgagttactgctgccttacgttaacgttacgatttccaaggcgagtcagcacacccagtcctttcggtcagtctcccgtccatgtgctcccccaagtctcgtcttgggagtcaggaaccaaggccgcaggaggcgaacagtctgatgctgtacttgagatctgccctgggtcatgtcaggcaaacaatcggttaatccaatttattcacacggtgtaaggaaatgaaatagactatcccgctgcaggctcagcaagacgctcggtctgaagacagctcacatcacataaatcaccacagctctcgacgacacgggcctcgcgatacacggttccacacatacactcacaggcctcatctattatatc

SEQ ID NO: 265076 - DNA, 1064 bp, Homo Sapiens
tgagttacccggtccggaattacgagatatcgtcgaccacgcgtcgactcttcgccacgccgtcccggcaggtatcctctgtttaggactgacggttgctgtggactcttattttaggcggacagctcacattggccggaaggaaaggtgctttggtacaacactgtcctgaacaaaagctccaactgggggacctccccgctgctatggtacttctactcagccctgccccgcggcctgggctgcagacccagctcttcatccccctgggcttggtagacagaaggacgcacgcggccgacggtgctggccagctgggattcatggcaactctactcccatcctgacacacaaggagctacgcttcatcatctatgccttccccatgctcaacaatcacggctgacagaggctgctcctacctgctgaataatgtataaaaagtcttggctgtacaaaggggggtctcttgcttgtgatcggacacctcgtgggatgaaatgccagactaactcagaccacggccctgatatgtgtcgccatttcaagtaacccaggtggcgtcagacaatgcagaggattgcaccagaagggatgccacacgcacagaagagactgtcctatctgcacatagacggtggaaagccccgccaagcatcgaagtgttgatcagcagatgtgctaccaagataaacagggacctgggaaggtaccgacaagagggcgcgatgtgcgaccggggaatacggaattccaggagcttagagaacattccatcatggagaagcacggccactacggcacgtggcctcctacaggcgagcacacacccgggactgggcaggcgacgggggcaccaccggatgagaagttgaaccgaaccaatggcccgaagtacaagtacaacgagacaaaacagcgggaggacacggaaggaccacatgacgcactaagggaccaagacaccaagcacacggaaccagacggaagtcaagttggcaatcgccaatacaaacgaaagacagaagagcgagagagaacacagggggaccaaaaaggaacac

SEQ ID NO: 265077 - DNA, 643 bp, Homo Sapiens
  misc_feature (132)..(148): n is a, c, g, or t
  misc_feature (173)..(219): n is a, c, g, or t
  misc_feature (517)..(535): n is a, c, g, or t
tccagctcaaaaaagagaaagtaccagattgtacttttaaatctgtctagcgtattgagaattttaatgggagctgttgatttatttctcagggcatacatgttccaatctgtctcattgttgtctctctcnnnnnnnnnnnnnnnnngagacagtctccctgtgtcccccannnnnnnnnnnnnnnnnnnnnnnnnnnnnnnnnnnnnnnnnnnnnnnattcaagcgattctggtgccttagcctcctgagtagctgggacttacaggcacgtaccactataccctgctaaaatttgtatttttagtagagacagggttttgccatattggccaaggctagtcgtaatgtctctttttaacactgaatatgttaggtggtttttcttgatggatttagggttaacctagttaataactaaattgtttcccaggtaattatcaagtttgtgtcattttattaaatctgaagagttaatattgtcatcgatacaacataaagggaaatctgactgagnnnnnnnnnnnnnnnnnnncggaccaccaaacagactgcgcacactgacacaactacgccaccgacacacagacacagaaaaaactcaaaacactccatgcaaccccaactacataagaacacctgc

SEQ ID NO: 265078 - DNA, 488 bp, Homo Sapiens
ttaaatggcctatttctggagaaacaggaggggctaaaaaggaaacccaataatatttgatgaggtgccaatggactagcaacataggagaacattactatctcgaggccgcaagacataagacaagtgtcattggaacctggatgaggactctagccatgggaaagacctggttacaaccaacgggaaggagactatccaacagggtctcctgacagctgctaaaatttgcagcccagcaggaaaggagcaaaggtaataagtgtgcagactctctatctttctgccctctgatctctcatgaggccctccaattggctgaacccaaccagaagtcataaggcaaggatgcactggtaattcgtgcacagaacatagcccctcaagacacatagtatagcggggtagaatggacaatgggcaattagaggataaggagtctatgtgctaactgtgcttatcccttcaggcctaaatcggagattact

SEQ ID NO: 265079 - DNA, 840 bp, Homo Sapiens
ggagctaattatttttggagaggaagaggggcagtgagacagccagcctgggaatgtggggaccaccacaaccacctcccccatgcactgacctatgaggcatgcagcactgataaatggccctgatgacaaagcaggacagaggcctggcagtgtgatgctcaccactcctgcctgtcaactccaggctgaagatgccaaccccgttatgacagactcacttgccagcctgtgccatttgtattcctcatggcagttactcagtagctggcatttataggtctataaagaatataaggttatgaaaaacctgcttctaattttccatgcttttccctacgtcccatgttacagttgcccccccaaataatcagccaccagggtgcatgccctattaacagtcctgaggtgcacacttcaattaaagttctctctgcccttcagtttaaatccctagccccttccacttacccagctgtgtgacttttggaaagttcttaatctttctgtgccttaatttctaattagtaaagtgggagtataataggaccctcctcatagggatgatatgaggattgaatgggttaataggaagcatgtaaaacagtatgtggtctctggtgagggcacttaagtgttggctgtaattatgttactattaatttgtgagttgagatttgaaggataaaaagatgcagccacagattcttacagacactaactctgtaaaccgataggaaaaacatcggcattaaaggagagtcattaacattaagtggaagaatgtccacttcttccctgcctgccctctccctgaaataaagaacagcttgacagaaa

SEQ ID NO: 265080 - DNA, 609 bp, Homo Sapiens
cagaagggacacaccagcacagtctggtaggctacagcaggcaagtctctaaagaaaggctgagaacacccagaacaggagagttcaggtccaggatggccagcctgttccggtcctatctgccagcaatctggctgctgctgagccaactccttagagaaagcctagcagcagagctgaggggatgtggtccccgatttggaaaacacttgctgtcatattgccccatgcctgagaagacattcaccaccaccccaggagggtggctgctggaatctggacgtcccaaagaaatggtgtcaacctccaacaacaaagatggacaagccttaggtacgacatcagaattcattcctaatttgtcaccagagctgaagaaaccactgtctgaagggcagccatcattgaagaaaataatactttcccgcaaaaagagaagtggacgtcacagatttgatccattctgttgtgaagtaatttgtgacgatggaacttcagttaaattatgtacatagtagagtaatcatggactggacatctcatccattctcatatgtattctcaatgacaaattcactgatgcccaattaaatgattgctgtttattaa

SEQ ID NO: 265081 - DNA, 476 bp, Homo Sapiens
  misc_feature (373)..(373): n is a, c, g, or t
  misc_feature (439)..(439): n is a, c, g, or t
  misc_feature (448)..(448): n is a, c, g, or t
acagtctggtaggctacagcagcaagtctctaaagaaaggctgagaacacccagaacaggagagttcaggtccaggatggccagcctgttccggtcctatctgccagcaatctggctgctgctgagccaactccttagagaaagcctagcagcagagtgagggggatgtggtccccgatttggaaaacacttgctgtcatattgccccatgcctgagaagacattcaccaccaccccaggagggtgcctcgctggaatctggacgtcccaaagaaatggtgtcaacctccaacaacaaagatggacaagccttaggtacgacatcagaattcattcctaattttgtcaccagagctgaaggaaaccactgttnttgaaggggcagccattcattgaaggaaattaattatttttcccgcaaaaaggaggaagttggacnttcacaggntttgttcccttcttgtttgttgaagtaa

SEQ ID NO: 265082 - DNA, 770 bp, Homo Sapiens
  misc_feature (361)..(395): n is a, c, g, or t
ttttctcttagcaaggcaggctttatttttctgcacaaagggtgctactcaatagctgtccagctacaagagcacaccaaacaaaggagacagagttacttataacctgacgtgtttaccctactgctgtgtccagtttccattggctggaataggacctcccattttacactttacccgattggctgttagtttaaaactttcttaattaggtaaggggaatagaagaaagaaagaaaaggaagttgcccagggatagttaaggaagcatctccaaataaggaatggcatgcactatgggctggggcttgtctagttctgtccaggcatgctggagcaagctaggacaagtgatttggannnnnnnnnnnnnnnnnnnnnnnnnnnnnnnnnnntacatataaaaatagtgggtagttgtgactttataatcctttgaggaagaactttccctcaaagttttcccacagtgctttgtaagcattgtctccataaaagtcaaccttacttccttaaaattgctggtcataactgatcttaggtacacttcctaaatatgatattccagtaaaaaccttgataatataaccaaaatttccaattatgtcctgttataaggtgaatagattcttattggacttttgctaacaactatatcatcgtggaaataagagtattcagtaaggatttcaaaattctggaaaaatcaggcaagaaaaaaagataaacgcttcatttctgtttacaaaagtataatctactaaattgtt

SEQ ID NO: 265083 - DNA, 184 bp, Homo Sapiens
gtgaagatgattttctccaatgttacgctttaatttctttttatattttgggtgtccattgtacgttggacatgcacacaatggacacacataaaacacaacaattagtattcggtttgcaaatactatctcgtaacccattattttaaatggatgacaacactgattgcagaaataaacaagc

SEQ ID NO: 265084 - DNA, 719 bp, Homo Sapiens
gagtgatgctctaaaaatccacctttcccatcatccctactcatcagaaagacaaatataaaatcccagagaggtggaggagctaaaaaagcaattgctccaccttacaaatttggatagaaaggagatgtagtttatttcatatgggcaaagtagtcctcttccaaagtcctgtacagttgttctctgcaattgacgcacatctgccctaagcgaaatctgtcagaaggaatcaacaaggctccttgcctcccctcccaatcccccttttgggaggacttgtggcttcagtgtcgtcctaagtgaggagtgggcgtgtgcttttttcctgtcccctcctccctccgtgtcctaggacgctgggctgccttctgtgcactcccaggcagatcactacggaagagtcggagcctgtggggttggactggccacactcagtccctgagaaggcgagttgcccatggaaagctgggggcagaggtgtttttggagaggaggcggcaggcaaacattgcctttgacttgctctccgcgtacccggggttgtagagctgctcaggaaggggcaggatgtaaggccagaggtgcctggtgggtgagaaccccaaggcaagggctgggcgccctctccgaagaggtggcagcagggtgaccctgaacaccccaaatggggagtgatgccactggggaaactgagtggatcaaagagatgaaaccaa

SEQ ID NO: 265085 - DNA, 876 bp, Homo Sapiens
  misc_feature (331)..(445): n is a, c, g, or t
gtgttggctaatttctggcaaaccagtctagaacaaaaacaaaagggtggcacatctttcccctcttaattggattccaattaaaatgaatacggtaattactggactctgataacgaaacacattttccagaaaagcacatatacatctttactcagtttgccctgtgttgaatcttaccacattaaggatgtaatccatgaggggaataggaatacgttcctctgtaccaacaaccctgttaggggagaaaagagtgagttacacagaaattcacaataccaatattaagagaacagaggaggagggcactgtataaaattctaggccnnnnnnnnnnnnnnnnnnnnnnnnnnnnnnnnnnnnnnnnnnnnnnnnnnnnnnnnnnnnnnnnnnnnnnnnnnnnnnnnnnnnnnnnnnnnnnnnnnnnnnnnnnnnnnnnnnntggggtagagatgagcctttagactcatataccgcaggaaaaaaacagctgaaatcaatcctgaatctacctttccaagcctgaccaaggttgaaagcataaaggggacaaccaagcctttaaaaactcaacattagtatacatcacaagagaagctatcctatctttgacaaactactgttagggaaatttatccacatgagaacactaaaaataagttcaattaaaagactcaacatttgcttgaagaaagaggctagacaaagaaacacttaaacatcatacgatgtttttgcatcacgtttaaagttatggagagtaggaaatacaatttaatttagttcaaagattcatacacctgaggtctcccttccctaacaattggtatttgcagcatgacagttcctgaactatcaaaaaactgatcaggt

SEQ ID NO: 265086 - DNA, 403 bp, Homo Sapiens
  misc_feature (379)..(379): n is a, c, g, or t
ttattgtagtaaaatttacataaaatgcataaatcttaaatctatacatttttacattacatagaaatgtgtaattatatactccatgctccctcccaatcagtgctgcctcaaaacgaactgctcttctaattttagagcttaactcttctcgtctctatcaccacagattagttgtatttttaagcttcatgtaaaattttccatgtcaactttgaaaacatgacagttaaaagttctaagggaatctccagttctccaactgggtgtgggggaatcaggataacttggactccaggtgtggaattgtggggttactggatgggggatcacctgaggtctggttatgggggccaccccaggtccttagggggcccanggaatttatgggccctgccggggg

SEQ ID NO: 265087 - DNA, 481 bp, Homo Sapiens
gggcaggcaggcccttactgtgaaggtggtattttgagatgaagtagttgggtcagagtcccctgtttgaccacatggagcccaccttgaccagcaaagggccctaagggggagcgggtgcaaagcaaggtgggctggtgagtgagaggagagggatggccatagagctgggtggggggcacaggagccccgtggggaaggtgttccgccctctgaatgaagtggggttgtatcagatacccacgggtgaagcatcgggaagaggatcctgcctgtaaaccctgctcaaggactgcaccatcatcatgcccagtgtgtgcgtgtattaggtttgtatgaatataatgttgccaattgtatctgtttttatgaaatgtttgctatgtgccaatgattattcgatccatggggagaccatagaagaatgatccaaggagttgggaggggaatcaaataataaatcagcgattctgcaatataa

SEQ ID NO: 265088 - DNA, 404 bp, Homo Sapiens
  misc_feature (388)..(388): n is a, c, g, or t
aaagaatagagaaagtgaaatagatgacatttggcttccatctcattccccaccgccctcgcccagcgtcctcttcccagcccttcattttctctagtaggggtgtgtctatgagagagaggatattgcttgttactgatggaagccagaatcctccccatttcttctcccgcaatccagactctcactagaatatctaaatgatgtcctctgaacttaagtcctttatttctgtatgttctcaaatggcagatccattcaaaaaattctggagccaattatttaagttccagataacaagggccgggcactgtgggcttcatacctataaatcccaggcactttggaggagggctgagggcaggatgggatccgttttggagttccnggggattttcaagggc

SEQ ID NO: 265089 - DNA, 894 bp, Homo Sapiens
tctcttgtgaataaagaggtaacggtgatgggagagggtaaaggggagcagctgggggacacagaaccaccttgtaccaaaagaagcctgaggtttaagaccaacactttttgcacaactaccatgacttaggcaaagcagaacaaaacatctctctcctacacactcctcaagttgaattttaatgatttttttctactatttgccccttatattcatttcagtttggtttcagctgcataagttgttgagggctgtatctgtctcctttccctggtcctgtatccccaaggacaaccctgagccccactcttacctaaaccctacaccaacaacatcacaagcaagcctgcagtcattagaattgtgaggggactatattaatccacctccactgataggatttgagaagggcttccatttaatcccactcctcacccctgagggtgccaagccaattgagaaatgcacacagaagccacatatgtaccaaaatacttgtcttcctactggtagcaccaaatcagagagagcaacttggatatgaggttgaaacaaacttcccagtagttgcctcccaggtctagacctgattagcatcccacaacagaaacttttccattcagcctcaaagagaacagaggtctccctcccctcaaatcaagctcatagaacccaagagaggccacatgtgcaagtgactttttacacacagcccactcccaacacagagcccagggggtaccagactcttgccatctcaccaatcagagaaatccctcctcctccctccaccagaaggagccatggagaggtaagccactaattattaagagagtggaagttcctatctttcagagcagcaggaactcagggaaaggaacaaaaattgtg

SEQ ID NO: 265090 - DNA, 490 bp, Homo Sapiens
  misc_feature (33)..(33): n is a, c, g, or t
accttgcctgggccctggccctggtccttaggntttgtcaaggttggtccttgttgggatccctcaaactaggtgataagcactgggaagggggatgacccgccttggacgtgtttctttaacctcatccatataatagggccgtgggatggttgtagaggtaaagcaggatgatggtgttttaagaccagagcttgggaccagggctcctacacctaattttctctcctggtagctgaacaaaggtctaaattagcttaacaaaagaacaggctgccgtcagccagagttctgaaggccatgctttcagtttcccttgttgacaattgctctccagttcctatgaaagcacagagccttagggggcctggccacagaacacaaccatcttaggcctgagctgtgaacagcagggggttgtgtgtctgttctgtttctctgcttgccgaactttcctcaataaaccctatttcttattttatatttacgt

SEQ ID NO: 265091 - DNA, 464 bp, Homo Sapiens
ttacacaatcttgaacattgactattatgtagaaaaaaagaaacatctgaggggaaaaaatacatcctcgggagacacaggaagaatgccgtttgaagtaagaatcttttttctctctgtctctgacacacacaaactcatacacacacattcaactagccttatgagtcatcttctgccatgactgatgccagctaactctgtcctgccagcaacctctgccacccactgatgcagtggaacagtgtttgaccagctcccttcctgatgctggtttatttctggctaaaacctctggtttcacttagggacccagacttgtctggggttccccctggaagtactatttgatggcactgatactcaaagccctatacctaaaacatctttgcatctaagagatactgtggagatcaagccaattctagacccttattggccatgggttttgatatctggtcaaa

SEQ ID NO: 265092 - DNA, 510 bp, Homo Sapiens
  misc_feature (71)..(132): n is a, c, g, or t
  misc_feature (136)..(136): n is a, c, g, or t
  misc_feature (139)..(139): n is a, c, g, or t
  misc_feature (141)..(141): n is a, c, g, or t
  misc_feature (214)..(214): n is a, c, g, or t
  misc_feature (218)..(218): n is a, c, g, or t
  misc_feature (443)..(443): n is a, c, g, or t
cccgcaccgtgcccgactaattattgcatttttagtagagacggagttttaccgtcttgaccaggctagtnnnnnnnnnnnnnnnnnnnnnnnnnnnnnnnnnnnnnnnnnnnnnnnnnnnnnnnnnnnnnntganatncngcgcgcggccgggttattctttcagtgcctgtaacgtcccccttctttgattgatcaacgctctatttgaaanagcncccaagggctgcaatttgccaggtagtctcatccgggttgtttttcgaagaggttctcccggaatggaaatgaccgttatctgcaggagtgcatcggactctggcgccaagagctggaagctgtgaattaaccgtccctcttactgcagttgtacggatcctgggtgacattgacttaccggtgtccattttccatacactttagagaataggcatctcgtctgnatcgctgcagatatgttagggtgggttgaaattattggtgtcaaagcgggacggaaacattaaaggc

SEQ ID NO: 265093 - DNA, 498 bp, Homo Sapiens
  misc_feature (434)..(434): n is a, c, g, or t
  misc_feature (436)..(436): n is a, c, g, or t
  misc_feature (483)..(483): n is a, c, g, or t
ccttgccacaagtcccaggactaacacaagcaaaagactagatgtaaacttgagtctttttgatgctattgcccatgagaatcactcaatttaattatacctgagtggttcactttggttcctttttcccatattatctcctccgccctcatcttttatgcatcctagagacttcttagatcctttgacaaaatgcccaggttgatcaacattgaatatgagtttttccctgaagtgtgaacagatttgtcaatccttttgtaagagaaagtttctggaaagtagttgtgaaagtggagataactttttttctttacagtttcttgctttttataaggagggtacattctaaggcaaggattctttgcttggtaagctggttattggatgtgagacaatgattaacacagcacatgtatacatatgtaacaaancnctgcgttgtgcacatgtaccctagtatttttatttatttatttatanataaataaataaata

SEQ ID NO: 265094 - DNA, 667 bp, Homo Sapiens
  misc_feature (95)..(95): n is a, c, g, or t
  misc_feature (481)..(481): n is a, c, g, or t
  misc_feature (490)..(490): n is a, c, g, or t
ttaagcgctactaatgtagagaatgaattgaattgtgcaatgttgctgttctggggactggggagattagcatcccatttgcccacactgtgganagacggagtggaccaggctgtttttgaagtaagggaagccccttaaaggtacgggtttctgctcttctcatagtgtacacccacctgcctctctggctccagaagctgccagagtgcactggggggaatgttcctcagcagagaagaatgaggagaagtttaaatattttgcccttgaaagtcacctgaggaagtttcccccacttttattttttaaaattaagtaattttttaaagaaggcacttttaaaattaacacacacatgaactgcacaccttcccccataaaatttggaggtggggtgggagaaagagctaaaatcaggctcagttcccctactctggcctctactccccacaccccagtgccactgtgggtgactatnaccgacggncttcctggcttttttctttcctcccttaccccaaattcattgagcacttaaaggagcagagatgcagccagtgtctgggctcccccagtggtgaaatgatctggaagctagatgctagtaacaggtagtgattgggttttttgagtatttttccggggaatgtgtacccctgaaacg

SEQ ID NO: 265095 - DNA, 446 bp, Homo Sapiens
ggcacgagggaattgttgagtgggacctatgacgtatagcaggatggatagaatatgaggcagatgggtcctagtttgctaaagagcttgggccgtctgataagttgtctttcttgccaaacaagggagtcacgtggggtatacacattgtataagcttttcagtcaccgaggttgcctgtccttacctgcctccctgttttcgttgcctccttgcctcccttcctcacttcccttcctttcccacctccctgtccaaaccccttccttcccctgcctctcttcgtttccctttccttcaatctttcctgccctcctgcctacttccctgcctcctttcctttacctcttgtcttagtctattttctgttgctgtaaccacagattggataatggataattttaaagaaaagagatttatcgctgggcgtggtggcttatgcttca

SEQ ID NO: 265096 - DNA, 611 bp, Homo Sapiens
  misc_feature (23)..(23): n is a, c, g, or t
  misc_feature (28)..(28): n is a, c, g, or t
tctatagggaaatttggccctcnagccnaaaaattcggcacgagacagaagcctgtggaaccagatgtaaaggatcagttctgtgtctaggtactccgttcccacagtactgtcagaaagtaagcaagtcaatttgggatggaatttctacccagtatgttgttgctgtgtggtcttctgacctcctggcttttccattttatcacctccatgggaaaggacttaggcagcagatgtggctgtgccacaacttgccacagctgtgggcttgggtggaggagctgtgagctagaggacggccacacccatagcacagctgacatcagccacacatgaagctgggaagctgctctctactctcagcaccctcagggccaagagaagccccaaaagagagtggttactgcccttattccaggccccagaattctctgctttgcaaatcccagctgagccccatggttaaccctctctggttctttgctctaccctttggagagaagacaaagcaatgagaagtggaccaagaacagccctcctaatagaatatcctatccaacctgtgatttcagccaagggtaaaataactactctgggtctatcaaaaggag

SEQ ID NO: 265097 - DNA, 302 bp, Homo Sapiens
  misc_feature (56)..(56): n is a, c, g, or t
  misc_feature (120)..(120): n is a, c, g, or t
  misc_feature (246)..(246): n is a, c, g, or t
ggcaataacagtttcagtgtgtatcttaaaatttttaatctaagaattactgatanttaaaggatgttaaaagggcaaccaaataaagtcctttgttctgataattgaaagaattttttntctgttttaacacctataaagaaattctacaactgcttaccttcacctgttctaatatttaagcttcctagctgttaggaagttcttctttatatcttacctaaatacagcctaaaatgcagaacntctttgtcgtagcttagagtcatgtatgaaaatcaaagaacagttggtcatgttac

SEQ ID NO: 265098 - DNA, 512 bp, Homo Sapiens
acattaaatgtacatgcaaatttttagcaaggttgtgcctaatcaccaccatgaaaacttctttggaatatgagccttggtgtttaccagtagggaaatgacaggttgttcaaaaggaaatgtttcccaagttctggttggaagctggcatcagagaaagagggaaatctagaactgttcttagtttctctagcaacaagatttcaaaaaattgtactgaaagttcagtgaacattgttacagggatttccattcttcataaaaagaataaacttgcaaaaactgagactgaatgatttagcaattgaattataaaagatcaatgttggatattctgtgttttaaaacataataaaaattagattagtttaatttgaattcgagacactaagtgataaagttacatgttcagtatttgaagctgtagctttgcataagcaataaataattaataggattttgaaacttggtccaagcatataaaatagtgcaaataccaagaaatagcatgc

SEQ ID NO: 265099 - DNA, 447 bp, Homo Sapiens
  misc_feature (19)..(19): n is a, c, g, or t
actctccttgctgtgatgnaccacatctgacttcagagaggtggaaatcatctacaacactgcgtttcttgtggttgtgctgttactggtataaagtcaagtgccttcaatgctaaaggctcagaaatttttcttaaactgatttcatgtcctatgcaagtgttttcctacaacctgcataaccagtactttgtaaaacttgtttacgcttcaattgtacatagtgatttttaaagaaatatatagtatttttatttaggtacctccaaacttgaattcgtctgtgtgaagcattgtaaaacgatacatttctcttttgagtaccattacagttgtacagaggttttcactgcttctatttttctactgttactgataagcatgtaacactgactttatcctacatatagttggcatttcaaataaatggcttgtatagaaaaaaaa

SEQ ID NO: 265100 - DNA, 445 bp, Homo Sapiens
  misc_feature (54)..(54): n is a, c, g, or t
cctcaaggcctaagtgggaccataaatgggtgtcacaagtttggcagttttttncccctgtgggaagataataatcttttgtatgtttaattcggttatcattgccttataaattatcacaagcagcacagataactactggagtcatcagtgcaacttaaaacaacaaaactagcatttctcacttgctgtttttcagacacctcccatcatctgcacctggtccccaaaccagctgtccatgagcaatgacaaagaactaaagcggggatgggggagagggggtgtagggcccaagagctggggagcattatggcttgctgtcagctggcagtctaagatgtacttgggaagatgtttcatacccattttccctgtgaaattaaaaatgtgatgctaccaaacctttgcttgtccaccacccttaaaagaatactcattcagt

SEQ ID NO: 265101 - DNA, 461 bp, Homo Sapiens
  misc_feature (154)..(182): n is a, c, g, or t
  misc_feature (404)..(404): n is a, c, g, or t
  misc_feature (436)..(436): n is a, c, g, or t
aagcatcagacttctgttaccagacaacttataagtgccaactattggtagaactgtggacatgaagatagtggaaacagcttctctaggatgctatactcatctccaccaaatgcactttgaacaaaaacaacttgtagaaataggtcttaannnnnnnnnnnnnnnnnnnnnnnnnnnnnacaacatgctgtactgctctccattggtaagtgctagggaaaatcacttagccactagagggagctataacacaaaattaagcaggaaataatccccattatagatacataggaacaaagtagagaccagctaactaccttgatcctctgtatgcagctcttaaagttaggatgggtttggggtaagttttcttggcaacttttacccttgtctttcccatnctttttgtgtaaaaattgcttcccccttttgnggctttttgcatccctttaggggtt

SEQ ID NO: 265102 - DNA, 512 bp, Homo Sapiens
  misc_feature (135)..(160): n is a, c, g, or t
  misc_feature (315)..(315): n is a, c, g, or t
  misc_feature (380)..(380): n is a, c, g, or t
  misc_feature (390)..(390): n is a, c, g, or t
ttgctcttgaaaatagtgaagagcattcagcgaagtacagcaactccaataattcagcaggatctggggccagctcacctctcacgtccccgtcatcgccaactccaccctctacatcagggatatctgcattannnnnnnnnnnnnnnnnnnnnnnnnnaccagcagctcccttgcctcctgcgagcaccgaggcacctgcccagctctcgtctcaggctgtgaatggcatgagccgaggggccttgctcagctccatccagaatttccaaaaaggaactttgaggaaagccaaaacctgtgatcacagtgctnccgaagatcggctgaagcttcctgtttacacttggagggaaaagttcttttttattcctactcanccctaccccncaaactaccctcttcctggggaaagtaattgctgagccagtacagccacaaacagtactattttgcagatgctcatgtaagcagctttttcgagagaaataattctttaagcagaataaagt

SEQ ID NO: 265103 - DNA, 462 bp, Homo Sapiens
  misc_feature (61)..(61): n is a, c, g, or t
  misc_feature (71)..(71): n is a, c, g, or t
  misc_feature (102)..(102): n is a, c, g, or t
ccctggcacaaacccatcccaaatgaggttaagacaagcatccaccccctgttttcctggnatgaaggaantttgaggttacaagaaaaggttaatgtaagnccctgaggtcacctggctaggaattccatagggcaggatttaatccgggtgcctgagtccagaaccttgactctgaagccctgttttgagctaaatgcagcagcagcataaacagcccgttttgtgcctcaaaaggtgaacagtgggaggcacagctgggcagggacgtgtcaggtcaggggaagaaactgaattgggtagtggggattaattggatgctgtctgccagcaatttctgcctcctgcattttatctgctttagggttgcaaggggcagagctatgaacacggatgcccactcaacaagcagttcctgggccaatcaaagggttgggagctgtagcaccagagctctggaac

SEQ ID NO: 265104 - DNA, 533 bp, Homo Sapiens
  misc_feature (351)..(478): n is a, c, g, or t
aaaaggcccattattgtgcccacttccagcagccttggtgagtcatctgatttggctcttggaaagacaaacttctctacatgaatggtgaaagtcagaaacagggtatgagccattgacaagcagacccactatagtttgcagtttgagccttggtaagccatctggttgaactcttggaaagttaaatttctctacatcgatgtcagcaacaaagtatgagccattcacaagaagatccaccatggtgccaatttccagcagccttcgtgagccacctgcttgagctcttgggagataaccttctctacatcaattctgggagagaggcagcatgcttacagtttggannnnnnnnnnnnnnnnnnnnnnnnnnnnnnnnnnnnnnnnnnnnnnnnnnnnnnnnnnnnnnnnnnnnnnnnnnnnnnnnnnnnnnnnnnnnnnnnnnnnnnnnnnnnnnnnnnnnnnnnnnnnnnnngtctctccacacacaatgtcttcccttcactttctgtcatgactggaagcagcgt

SEQ ID NO: 265105 - DNA, 459 bp, Homo Sapiens
  misc_feature (29)..(29): n is a, c, g, or t
gggggggccacttcaccaccattcacaangaacaaaaaacaacggcaaaatgtcaccctcctttgaataaaaattccaggtaagaattggggggaaacgagagaataaaataaagggccctctctttcagcaccttttctcttttagctgatcgtacagatgtgtccttaaatataactaaagtaactactagtattttttactatatgcattttacattaaattttcatttcataattccctatgcaaatactcccaggaaagggagaacactaaaaatataatttcccccgttagatgttatatagtttatacttttcttaattctaactaaagattctttgggctacttaagaaaacaaaagaatccctaccgtctttggggaaaattacaaggcacgcaacaatgtgtaatggaaactccagtagtcatgttccttgagctcatgcacatgcatc

SEQ ID NO: 265106 - DNA, 542 bp, Homo Sapiens
  misc_feature (34)..(34): n is a, c, g, or t
  misc_feature (46)..(46): n is a, c, g, or t
  misc_feature (104)..(104): n is a, c, g, or t
  misc_feature (166)..(166): n is a, c, g, or t
  misc_feature (278)..(278): n is a, c, g, or t
cgaaaattaagttttgcccctggaaacccctttnaaagcaacgggnccttaatgtcccacggaaaggcttttggcttcggaatccacaccgtccccctggctcnaaagctgaaaaggtcttaagattctgtggtgggggaaggccgaggggtgcagggtgggtggngggcagcggctcgaaggagcgactgcgcccagggaaggaagcacatcggatttttgcagtcttgtcattctgcgtggaaagccttcttggccagcgtggagtgcagggcctntggcgctttgccctggcgtggccgtggtggggcccagctggtcccaatcgccggcccattcctaccttcaggcacttcagagaaatactagtgacagccttgggacggtggacgtcgtctgagtcctcacctgcgccaactccccttgcctgtccagagaggctgcggtcaacggcagggccacctacgcctctctgtttctgtggatgtgtgtgtttcattctccttcagctgtcttggttgtagcctctcgtttcccaaaaa

SEQ ID NO: 265107 - DNA, 736 bp, Homo Sapiens
  misc_feature (257)..(257): n is a, c, g, or t
gatactgtggagatcaagccaattctagacccttattgccatggttttgatatctgtcaaaccaggtatcaaacagtggtcactccaccccagaaacatcacggtgaaccaagttatccataatcatcgataactgtatgcccaacaccatgcagaccccacaaccttcatgatgcttacaatataatttcagagattaaaatcagcccaattggaagcttaatcagaccagcccataccaaggcaaaaagaaaaanccaggaagaccccatcatcattcatagagaagttgtgagcaggaacccaagtatgggctacaaaagtcacttcgacttcagattcatactgggccttgaggcagaagtagagtgtatatgaggcagaatatcgatggaagacactgcaggtaaaaagacctctttacaggccataatggaaactctgaagctggctaaccaagaaggcaaccattaagcaagccccactcccctcccacactacagcttcatctctcaaatatggggcataggctttcaggcacagactctaaagaggacagatgtccaagcaggggctcgtgggcactgggtagctggagtaaagtggtatccacttgtcagcagactgaaaagcaggtccaattctcttggattatctccctaagtatgtttctcagacccctgcatcagaatttctgcgatctctccagacctgagaaattaaaaccttgagggga

SEQ ID NO: 265108 - DNA, 355 bp, Homo Sapiens
caaacaaaaccaaaaagttaatactacatgctagatattatgccaagggtgcagtggttaccaaatcagacatagttcctactcttatggagcctacattctttttagcgttgtacaacttatgcaatactttaattataataactcattaaatggttttatgtttaaagcctttgtttaggtctcacattcatgattttcaccactctgtatatcacttatactattaattatttacaatgtttctttaaatgactcacaacctgtgctataggtaaggtaccttatgtatgttttctcatttaatgttcacatgaacctttcaaagtaaagcttatctctatttgtttaaatt

SEQ ID NO: 265109 - DNA, 378 bp, Homo Sapiens
aaattccaagatgaagatttggggtaggggacacagcccaaacccatatccagcccgaaccttatccccatactggaaaatacacatatgtaaaatacagtgtgcagacccactgtttcagagacccaactggacaaagcccttcctgatttaaaacggagtgaaaagaattttttaaaagagtataacaaagtgggcacttttatatacaattagagggactatgattagcaaattttctgtaggccagttaggcagtatttagcaagatcactaaaagatatttctacccttgatccaatgattgcacttataggtagatcacctgagaaaaatcagattccaaacacgattcacacagcgtcttcacttataatg

SEQ ID NO: 265110 - DNA, 613 bp, Homo Sapiens
catgagccctgtgcccggcccatgttaaccatttttaagtgtatagttcagtattgttaagtacttgacattgttgtaaagaactcttaatcttgcaaaactgaaactaaacccactaaacaacagctcctcatccccactcttccagcctctggcaaccaccactctactttctgtctctctgaattcatctactctaggtccctcatgtacatggaattaatattcatatttaaagttagctttcctaataatatagtatctttgggtaatataaactcagcttcttacaataaaatatataggttgggagtatattttataggttttgttaaactaaagaaaaacagaaggtggaactccttaagagccttgttttttctctttctaatgctgagtatgtaactatatattcctctacatataagcccaagcctttttttccagaattcacctccatccataccatctccacatactatactagaaggtggaccagtgtttgcagtctgaccatcctgtctttgaatttaaatggtgtcttaatctatacagccaagaatatccctctgctcaggtttaagtataggtggtaatgtatatttatcttaaa

SEQ ID NO: 265111 - DNA, 464 bp, Homo Sapiens
  misc_feature (421)..(421): n is a, c, g, or t
agcaagaccgacagcgtgcgggctgccggcgcgccccttgcctgcaagcacctagccgagaagaagacgatgaccaaccccacgaccgtcatcgaggtctacccggacaccaccgaggtgaacgactattacctgtggtccatcttcaacttcgtctacctcaacttctgctgcctgggcttcatcgccttggctactccctcaaagtgcgagacaagaagcttctcaatgacctgaatggagccgtggaggatgcaaagacggcccggctgttcaacatcaccagttctgccctgggaccctcctgcatcatcctcgtctttcatcttcctgcggtacccccttcaccgactactaaggcccgccagggaacggcttgcttggcgggagacaaagcacttgaggacatgttttatttctncattgggttccctgaaaacggagggtcccattgagggtttggg

SEQ ID NO: 265112 - DNA, 476 bp, Homo Sapiens
  misc_feature (406)..(406): n is a, c, g, or t
  misc_feature (424)..(424): n is a, c, g, or t
  misc_feature (462)..(462): n is a, c, g, or t
atcgaagccagacagctgggctccagagttcatgctgttagccactacccatgctctgctgggatggtcaggcccatcctgccgtgtgggaacagcctgacaggtgctggggctgctggtgtgggcgctgattgcggacaccccgtaccacctgtatccggcctatggtggggtgatgttcgtcgctgtcttcctctggctggtgacaatcgtcctcttcaacctctacctgtttcagctgcacatgaagttgtacatggttccctgggccactgggtgttaatgatctttaacatcagcgccaccgttctctacatcaccgccttcatcgcctgctctgcggcagttgacctgacatccctgagggggcacccgggccttataaaccagcgggcggcttgccttngttcttttgcggtgtttnggtgatgaatcgcctatgggagtgaggtgccttttttnaggtaacaggggtg

SEQ ID NO: 265113 - DNA, 809 bp, Homo Sapiens
  misc_feature (251)..(305): n is a, c, g, or t
  misc_feature (379)..(393): n is a, c, g, or t
  misc_feature (682)..(696): n is a, c, g, or t
atgcattttaatttttaaataaaaactagggtttggattgcatggaggtttggtaagtgtctattcaatcagaatagaaagcaacattcactaaattatttccatgccaggtttcactttggggcctgtattccttaggtctcagcccatgcagcacctcattcctgcggttgtccctctgcccttcccttgcccctgttatagctgtcatcatagcacccaccttgctgtccagaagctgagggtggacnnnnnnnnnnnnnnnnnnnnnnnnnnnnnnnnnnnnnnnnnnnnnnnnnnnnnnngaacagaggttcagcacagagccctagagggtccagtggctgacatggaatagtgcacagcagatgtttgttgnnnnnnnnnnnnnnnggatacatcagctaaaataaaagccaaaagttaacaactttttatgaatcaaaccagccttagaagaaaccaaacttgtagctagaaaggcatggaggcaaacttggtcttaaattcagcacattcattttgcttcatgtcttttgcttcttggaaaattgtcccaacgccagcaaaactagatttttttcctcttcttttggccctaaattatttctgaaagttacagcatttttagatttgtattgttttattacctgtcatttttattcacgtccgcttttgttgnnnnnnnnnnnnnnnactggacctcttcctagtttaacttgactattcctctgttaagctgttcctcatatggaaagttgcctcttcatcagcacaccataaataatccaacctggtcgacagtcttt

SEQ ID NO: 265114 - DNA, 531 bp, Homo Sapiens
cgcggcccagtaattcggcacgagcactgatggaaaggcccttgtcttcctgaagctcaaagacattccaacgtcctttcatctcccaaaatattttcactctaccaaggaacaaactgcattagagtatccatctgcctttttatgattatcaaccaccaatatttgttgtctagtagtctgaggcatattagtgtaggcagggaaaaataatgctgggagtgaaaagggaagaaacagcataggtctattagccaacctgagaaaatgccttaccatacctttcacaaatcctaaatgaccctgtaaatgtaactattgggctttttgtttctagaatcctagaaagatcatggtctttggagtcagatagacctggattcaaattctacctctgctgcttaaaactctagaactagttccttagccccagcctcagttctgtagaaacctgttttttggctcatacctaacagaattgttgtaaaaattaaagtaacaatgcacatcaaggccaggtatggtggctca

SEQ ID NO: 265115 - DNA, 990 bp, Homo Sapiens
  misc_feature (224)..(298): n is a, c, g, or t
tatttataaagactttggatagaaggagatgtattttattacctcctattctagagccccatgctcctaacaagccagagaggccccaaacaggattgtttctttcctccacagcccttctgcccatctgagattgagggagcatcgtccacttgagatcagggatgggatggagaatgggtcatgtcatgtaatgagaaaagccctcttcgggatcatgagannnnnnnnnnnnnnnnnnnnnnnnnnnnnnnnnnnnnnnnnnnnnnnnnnnnnnnnnnnnnnnnnnnnnnnnnnnaaatgaaagggttgaattgatggatctctaaaggcttttgtcctctatgaggatgtgaaaaactagggaccacaaaagggaacaagcaaaaaagtttggattcgataaagtgatatgtaatagttgcagaaggctttatatatgcttataatgaaaagatattttttgtatattgacagcataatttatttttaatgctgtcattacacttaaagtcacaggaaaaaaatatacatgcttactcaggctttcttaaaaataaatttttatagagatccttgagtaaagacattttgcttaatttcttttttcttattccccacttgtatatcccctaccagtaccgggatctgcacacatctttttgcagttacctcttcatagccatgaaccaaaacgttctatgaggagcatgcaagtaagtcaagcctcctattctgttagtacttattagaggaggagatggttttcattgcatagtgacattttcttagccttaacgttctgatagtagcttactactcacttctctttttcagttttcataataagtattcatttttttgccataatgcttcctgtaaagccaattttatatactaataaaacctgaactgcccactcttcatgcctgccaaacttggggcaattgatgctaaatggtatttttaaaataaatgtttttattcttt

SEQ ID NO: 265116 - DNA, 502 bp, Homo Sapiens
  misc_feature (138)..(157): n is a, c, g, or t
ggcgtataactgtgtgagtggccagatattcactttttaaatcaaaaacctctcttatggaagctttaaaagtttccgtcacacacaattctcttctcaggaagtatttctcatttaggtcttcaaagtagcctgacnnnnnnnnnnnnnnnnnnnnataggttatttataaagactttggatagaaggagatgtattttattacctcctattctagagccccatgctcctaacaagccagagaggccccaaacaggattgtttctttcctccacagcccttctgcccatctgagattgagggagcatcgtccacttgagatcagggatggggtggagaatgggtcatgtcatgtaatgagaaaagccctcttcgggatcatgagacttggttctagtccaatttctgccactgaggatgaatgtaactgtgggcaaactatttaccctcctttatctgtgaaatgaaagggttgaattgatgggtctcttaaaggcttttt

SEQ ID NO: 265117 - DNA, 540 bp, Homo Sapiens
  misc_feature (41)..(41): n is a, c, g, or t
  misc_feature (59)..(59): n is a, c, g, or t
atgttttaatgcttctcctgaatccccctcttctgccctgnacccaagacccagccccnagcccctttattccctctcccattttcaactcccttcccagccctctgtccccctgaaaactgccactggcaaaccccatgggaccctcaggacccagagactgccttgacctcatctggggagggtaaagttccacgggggacaaaaaaatgattccctaaagaagaggcttccctagacccagcataggctcgagaaagacatcccctaggccctggacttctgagcagctttagcccaggctccggacggcagccagaggaggcctttccccattgctcctttccccattgctcaatggattccatgtttctttttcttggggggagcagggagggagaaaggtagaaaaatggcagccacctttccaagaaaaatataaagggtccaagctgtatagtatttgtcagtatttttttctgtaaaattcaaacacacacaaaagaaaaatttatttaaataaaatactttgaaaatgaa

SEQ ID NO: 265118 - DNA, 751 bp, Homo Sapiens
  misc_feature (212)..(243): n is a, c, g, or t
  misc_feature (245)..(446): n is a, c, g, or t
acgccgccattaattcggcacgagcaaaagcaagggaagtgtcagagatggctctgctagactcacgtatttttcagtagaatctgggtcaggatggtgcggtcagaagatgcttctggagctctgggacccacaagcctgcgtgtcccacggtggagtattaggacaacttgaaaacatagtctgcagttcatcctccaccacacccaatnnnnnnnnnnnnnnnnnnnnnnnnnnnnnnnngnnnnnnnnnnnnnnnnnnnnnnnnnnnnnnnnnnnnnnnnnnnnnnnnnnnnnnnnnnnnnnnnnnnnnnnnnnnnnnnnnnnnnnnnnnnnnnnnnnnnnnnnnnnnnnnnnnnnnnnnnnnnnnnnnnnnnnnnnnnnnnnnnnnnnnnnnnnnnnnnnnnnnnnnnnnnnnnnnnnnnnnnnnnnnnnnnnnnnnnnnntaatggatttattccttccaaactgcaactcaccaaaagaagaccagcacgcatcacaatgttgtggccataatcaccacagtgacaataataaatataatcaactctcgagccagccatccccactaaacctagtgggtcacatctggtgtttcactttggggatgctttagtggtcatggtagattgttgtctgactgctggctgtttctaccatgtttcaggaatatagagatgtgtacagatgaccccctaaaattaattagtatgcaattctcaaagagacaaactgtatcccagaagct

SEQ ID NO: 265119 - DNA, 746 bp, Homo Sapiens
  misc_feature (393)..(393): n is a, c, g, or t
ggcagtaaagacaggacgcacccatgtcacaagaggagcacaggcaggggtgttggtgttggggcagccctcagggtctccagacccaagccccactcacacagcagcctaggaaggaagggcagagtcccaggtgtcagctggtgggtctcccaggagctgcccctccctgggaagtcacaggacaggaatgacagatcagggaactgcagggaagctgccacctctggggtcagaatatgcccagcctgcgggggctctctatcggggtcttcgagagccagacagcctgccttgtgctgcatacctggctttgctctgtgcagaacccagcacacgtgattttgtgtgacatgccagcagcctggctcccaggacaggaggcctgccccngggggaggggctgcaggaggagggggggcaggcaccccatgagtctgcccagccttgtcacagatgcatcgcccagcctgcggtcctgatttcagctcacctcagagtaaatcagaataaactgcacccagactttcacgaatgcatgttgacgctttcagttcacccctttctttgctaactttcttcctattttcttctaatgcgagagcttattaattccatatttatcattttgaataacttttctcctttttagtaacaaaatgtacttcactcttagtaaaatgtatttactattttagtaacaaaaatatacttgcctaatcatgtttaaaatatagtgatgtgtg

SEQ ID NO: 265120 - DNA, 545 bp, Homo Sapiens
  misc_feature (23)..(23): n is a, c, g, or t
  misc_feature (30)..(30): n is a, c, g, or t
  misc_feature (44)..(44): n is a, c, g, or t
  misc_feature (50)..(50): n is a, c, g, or t
  misc_feature (70)..(70): n is a, c, g, or t
  misc_feature (76)..(76): n is a, c, g, or t
  misc_feature (90)..(90): n is a, c, g, or t
  misc_feature (107)..(107): n is a, c, g, or t
  misc_feature (134)..(134): n is a, c, g, or t
  misc_feature (177)..(177): n is a, c, g, or t
  misc_feature (199)..(199): n is a, c, g, or t
  misc_feature (313)..(313): n is a, c, g, or t
taaaaactgcccgccaatccccngggggcnagtaagtaaacccnaccctncccccaacccctgtccactntaaaantggcaagtaaaaangggttgtcacttgtggntgttttgtaaagtgcatttctgatgtnctttgaaaggacagaacatcatgggtttggtgccctgtgtcanaccctgagtccatggggacagncggagtcagggttggggctggaaagagaacccgagagggcatttaatcccagtccctgttatgttattgacagaagaaacagaggctctgagagggtgagggatggacccaggnccgctccttgcctcaggaatcacagtgcccggtccctgctggccagtcctcgggctgccttcccacatctctgtgtggattttcccctgatgtcttcagctgtatcttgctggtttgaacaattttcctttcataaaatattgtagttagggcagtcactctggccaacagtgttgggtctgaccaattaaaatatgcttcattaattttttatgataccccatttttatcc

SEQ ID NO: 265121 - DNA, 480 bp, Homo Sapiens
gaagcctggggttaccctcacagtcccccaccccttccaaagtttgaccatagtgcccatccccattggcccagaaacccacagacacaccctaaacctgtggcactgggacagaatagattttcccatttgagaggcacttcctgtgtcagtcttgtttgaaggaggtggtgatggtggatagaggtgaaggaggtagggagtgccctccaagtgcaaaaataacaaatatgattattgaccatcggggaattctcacacattgatttgttttttaagcaattgccagaaacccccttttttagcttttgcttggggtgggggtaggagttaaggtttattcaatcctgtcctgggtagggcgaaagttaatctagccatgtgatttttcagaaaagtaagtggaacatgctgccacttttcaattctgtcagtgcttccacatggaaacaaaatgcaataaaatttttccaaaacctg

SEQ ID NO: 265122 - DNA, 550 bp, Homo Sapiens
  misc_feature (38)..(38): n is a, c, g, or t
  misc_feature (50)..(50): n is a, c, g, or t
  misc_feature (55)..(55): n is a, c, g, or t
  misc_feature (73)..(73): n is a, c, g, or t
  misc_feature (92)..(92): n is a, c, g, or t
  misc_feature (124)..(124): n is a, c, g, or t
  misc_feature (166)..(166): n is a, c, g, or t
taccctaaattttaacccccgggagactgttgcccccngcaggaagatgncccangatgctgggggttacccntcaaaagtccccccacccntttcaaaagttgaccatatggcccatccccantggccccagaatccccacagacacacccctaaaccctgtggnacctggggaccagaatagatttcccccatttgagagggcaccttccctgtgtcagtcttgtttgaaggaggtggtgatggtggatagaggtgaaggaggtagggagtgcccctcccaagtgcaaaaataacaaatatgattattgacccatcggggaattctcacacattgatttgttttttaagcaattgcccagaaacccccttttttagcttttgcttggggtgggggtaggagttaaggtttattcaatcctgtcctgggtagggcgaaagttaatctagccatgtgatttttcagaaaagtaagtggaacatgctgccacttttcaattctgtcagtgcttccacatggaaacaaaatgcaataaaatttttccaaatt

SEQ ID NO: 265123 - DNA, 418 bp, Homo Sapiens
  misc_feature (34)..(34): n is a, c, g, or t
  misc_feature (113)..(171): n is a, c, g, or t
tcccccatgaggcttgtccaaaacgcagtgaacnagtcgcagctgaataacacacagaccattccccgaatcccaagaggtgcatttcaggattcattcctatttcatcagannnnnnnnnnnnnnnnnnnnnnnnnnnnnnnnnnnnnnnnnnnnnnnnnnnnnnnnnnnttcctgccttggccctccccagagggttggaattgcagatgtgaggtgtgtccctggaaccctggctgcacccacagatacagccactcctggggccatgtggatgtaaccttcgagtgccggaatgcctcgtctccatggagaccaaactcatagcctgactggcccagtctaccgagaccatgagacctgctgtgcccctcggccaggccaacccaaattcttgtaaataaaaggcacaagctat

SEQ ID NO: 265124 - DNA, 617 bp, Homo Sapiens
cctcagcctccctgagcaacatggtgcttgctccccttcagtctatgcagcagaaccaggatcctgaagtatttgtgcagcctaaggtgttatccagtgccatcccggttgcaggcgccccactggttactgcaacgaccactgcagtgtcttcagtcctgctggccccaagtgttttccagcagacagttacaagatcttcggaccttgagaggaaagccagctccccttctcctctaactattgggaacgccagaaagtcagagaaagccttccattattctcagcaagtctcagctccaggatacattaatacatctaataaagaatgattccagcttcctcagtacacttcatgaagtctacttgcaggttctgacccaagaacaaagacaacccacaaccctatgactggagcagaataagtctaaaggcagagccccagcctcagagacaaataggcttcatcatggaaacttctgagcagaacattgagtttgagaatcctgaaattgagcctatgagaaagagactcatttcttaagaatgttttccaagtgacattctcagtgataatggaggtttcactgtgaagcatcaccagcagatccttgttt

SEQ ID NO: 265125 - DNA, 406 bp, Homo Sapiens
ggaaaagccttaaaaaactggaacatccttttttcccagtaaatatatatattaaatactgtatatccctggaaaggccccaataaatcccagcagaaaactgttatcacattgctgagctcaaaaaagtaaggaaaatctaccaagaacctaccgacacccaaccttcatttcccacactcaccatctgtctcttatctgcacaaaaaaagggtaaattgaaacctgaacagtaagtagtatgcacttggagatgcaaaagggcaaatgtgcatattagcatttgcccttttgccaattgagcttggactctagaaagttcccaggtagatgacaaatcctatttctcagtagaagcaatttctcagtagaagcaaactgaaatcttctgtggagttaaaaaatt

SEQ ID NO: 265126 - DNA, 577 bp, Homo Sapiens
  misc_feature (184)..(184): n is a, c, g, or t
  misc_feature (213)..(213): n is a, c, g, or t
ataagtcactgcacttgtccatcaagcatattttttaaattactaactccagagaaaacaaaatatacagacaagaaaatataattaggtattacttgggtaaaatctgaatagcatgtgtatgatcatggggaagtggaggtaagaaatatatacataaatagagtggggcaggggagggaantgcaagctcatcttccctaggagggaagntcagggagatagtatctagtagtaagaaattaccccaatagccaaaaatgaccatgttacttggcaatatggaggtaaatacccaaaagaataaactaaaaagagttgaaggtagttacttcctaaggaagcagaaatgggaaagggaagctgggaagcctatgtggagctggttggttccttagatcatatacatggataactgattttgaaaaaactgaaaaaataagcagatgctttagggggtttaagattaacagagttgctaaaaacaaacaacatacacaaaaatagacaaactctccaagatagaatcttatttaggtgtacatgaaaataaagagctaaaaagatgctagagctg

SEQ ID NO: 265127 - DNA, 881 bp, Homo Sapiens
  misc_feature (95)..(95): n is a, c, g, or t
  misc_feature (161)..(161): n is a, c, g, or t
agactacaggcctggcgcaccttgatcttcactttgaaagagtcgatcagaaagaccaccttggggatgccttccagggagggcagctgcccatncatctggcacctccaggtcgaacctctgcagcagccaggccatgatgaggaagagctcctggcggngccaggattctcacctatacaggagcgaggtcctgctccgaagggcaaatagcttactgacgcaaactcaccgatgctgctccagagtggaagaggaaaagtgggtctgggacttcgtactcccttccttgcttcagccttcattgcccccttcattctttccgccagcttcttctttcacctgaagaccagagtaggttggaggtgactagtgtgtgtaagcccaggagaagcaagggcttagagaagaatccaactgtgacatcgagaagagcctgtccagtcccttcccagtagtggctctggggcccaggcccggcttccagaagatggggcagctctactctggggtcaaaagcccaaactactgcttggcctgcccagagtctccccctggaggcggatccttagctttctgtctcctggaagttccctactcccacccctgaccttcagcccagaatggaaggcaagatggggacacagaacgggtttatcatgacgacgaagacaattctaaacaagggaggagggcgtggtctccacctctccttccccattcaatcaaacatcaagcgctgactctgctatgtgtccagcccttaggagtgagagagacaatgacctgaaggctcagacaagctccttaaccccgctaagcctgcttctcacctgcacaatggggataataaaacctacttccaaggggaattcagcgat

SEQ ID NO: 265128 - DNA, 806 bp, Homo Sapiens
  misc_feature (246)..(247): n is a, c, g, or t
  misc_feature (260)..(260): n is a, c, g, or t
  misc_feature (263)..(263): n is a, c, g, or t
  misc_feature (385)..(481): n is a, c, g, or t
  misc_feature (603)..(603): n is a, c, g, or t
  misc_feature (607)..(607): n is a, c, g, or t
  misc_feature (614)..(615): n is a, c, g, or t
  misc_feature (617)..(617): n is a, c, g, or t
  misc_feature (620)..(620): n is a, c, g, or t
gaattcggcacgcagagcttattaaatatgtatatttgtaccacccatttagcagaaattcctattttctttgtcctctctcttgaagtgtctgtttctagacttcacctctcctactcttcagtgcacatgtgtgtatgcatcctgccatctcaccactgtcagtgggagcacaactctcagtcccacccctactaacatgcaggcaccccaccatgccaccagggacggggcatgaatgctggnnacacatttgtctntgncagcaaactacccctgctatgccaccactgcaatcatgtgcaagaatgcttccaccccactcccattggtgccccaccaaagccaatgcacatgcaccccaacatgccactgttgaggaccnnnnnnnnnnnnnnnnnnnnnnnnnnnnnnnnnnnnnnnnnnnnnnnnnnnnnnnnnnnnnnnnnnnnnnnnnnnnnnnnnnnnnnnnnnnnnnnnngtgccattgtgactgctgagacacacaagtgagcatgggttctgctgtcactgccaagatgaagtgctttggccaacaccatccactgaagtgctgtggtcagcagactgagaactcctcangctnctccaannanaanaagttcccaacccaccaaggggcccagaaaacagagctggggacctgttaccagccccagagttagagtacacagcccaggagtgctgaggtgtgctttggtcccctaacatgttccagaagcaaaaccagtcaacccactttataccacaatcaaacctccaagggcatcaaagaagaaaaaggc

SEQ ID NO: 265129 - DNA, 379 bp, Homo Sapiens
tactgaaatacacagattcacttcagctcagcgtttactgagcatctgccatagggcactgttgcttggagctgggatttaaacagctccagtccctggcctgcacagaaagtgaaggccagtggggacaggcatgtaagcccgtagcagcagcacacccggccacagcggccaagtgcagcaagtactcacagaattccagggcgatgccaagaggcttcagaggggccaacctgtgagccagaactttgaagggaccaacggattccccagatgggacaaggaacagaatgggtgttattacccaaggcaagattaaagtgttattgggaaggttgacagagggccagccaacatttggggcacaccacaggggcaa

SEQ ID NO: 265130 - DNA, 488 bp, Homo Sapiens
aactctctctttggcatctctttgggatagattccaaaatctttggtgtgggacctgaggcccttcacaggcagacactaagcccccttcagggtgccagttcagccctgctgtgtcctgggccttgccctgtggtgtgcccattgttgctggcctctgtcacttccatacactttatcttgcttggtatacaccattctgttcttgtccatctggggaatccgttggtccttcaagttctggctcacaggttggcccctctgaagcctcttggcatcgcctggaattctgtgagtacttgctgcacttggccgctgtggccgggtgtgctgctgctacgggcttacatgcctgtccccactggccttcactttctgtgcaggccagggactggagctgtttaaatcccagctccaatgcgacaggctgcgcctatggcagatgctcagtaaacgctgagctgaagtgaatctgtgtatttcagtaag

SEQ ID NO: 265131 - DNA, 338 bp, Homo Sapiens
  misc_feature (51)..(51): n is a, c, g, or t
gggcccacagcggccaaagtgccagcaagtactccacagaaattccccagncgaatgcccaagaggccttccagaggggcccaacctgtgaagcccagaacttgaaggacccaacggattcccccagatggacaagaacagaatggtgtataccaagcaagataaagtgtatggaagtgacagaggccagcaacaatgggcacaccacaggcaaggcccaggacacagcagggctgaactggcaacctgaagggggcttagtgtctgcctgtgaagggcctcaggtcccacaccaaagattttggaatctatcccaaagagatgccaaagagagagtt

SEQ ID NO: 265132 - DNA, 493 bp, Homo Sapiens
  misc_feature (20)..(20): n is a, c, g, or t
  misc_feature (69)..(69): n is a, c, g, or t
  misc_feature (87)..(87): n is a, c, g, or t
aaaaaatttggaaaactggnctctgactgtgcaaaaaagggcaacccccaaaatcaaggccacatggcnaaaaaggtgctgaatccncttcggaaaaagctgttatgcctcacggatgacctcaaaggcacctttgcctacactgagtgacctgcactgtaacaagctgcacgtggacccctgagaacttccctgctcttaggcaacgtgatattgattgttttggcaaccccacttcagcgaggattttaccctacagatacaggcttcttggcagtaactaacaaatgctgtggttaatgctgtagcccacaagacccactgagttccctgtcccactatgtttgtacctatggtccactatgtttgtacctatgtcccaaaatctcatctcctttagatgggggaggttggggagaagagcagtatcctgcctgctgattcagttcctgcatgataaaaatagaataaagaaatatgctctctaagaaaa

SEQ ID NO: 265133 - DNA, 733 bp, Homo Sapiens
agaagtttgattgcacattgctgatttagactctagtttaacatccagagatctcatcatctagcagaactaccccctgcctacctctcaagcccccaaaccatggtgccccaggttggcccttgtctctaacacaatgagttacgtaatttagttcctatgcaccatcaccctcattgttcctttaccttgaccactatttttccattcccttctttccattcacccctccataatcttcaactaatctctgtgtcaaaatttacctcatggtcagctggctccagaaagcttttctaggaaaccatcccatgctgcaaccctgccacaatttagattgtcccctttcatttcttaggtagaagcctatgtatgcatgtatcacatgcttttgctgttgatttattctctccatttagatcagcatttctcagcctcagcactattgacatttggggccagataagataactctttcttgggaaagtagacagctgtcttgtgagctgtaaaatgtttagtctcattcctaacctctactcactggatgtcagtaacctccccagttgtgaccatcagaaatatatctgcacattgtcaaatgttccctggggagcaaaatcaccaatgcataagaaccactaccttagacctatctgttttctaaggagagcctcttgaggtctgtgagacacttcaaaccacagcatggtacataggtcctgcacacctt

SEQ ID NO: 265134 - DNA, 659 bp, Homo Sapiens
  misc_feature (566)..(579): n is a, c, g, or t
cagaattctaccccaagggcaggagttgtgttcagcaggtgcttggtagatgtgtgttggatgttgagtggatgcgagaatcccttgcgtacaactgtctggtttctacaatctgacattgaatgcctgtcagcctcactgctctaagatggtcttaaatgcctcatttgagtacagtattctttcttatttttaagtgaatttgcagtgtgtgctttcatcaagacgttatgatgagtaatttcaaagcagcttcacaattgaagttagccttaatgtacccttttgatcagtgtcctgcctacctgaaagtactacatgtaccagtaggtacataaatttttaattgatttaggtttaacttttaaaaacacgtgtaaattgctttttaaaaacttctgattttagataattatagattcatatgcagttgcaagaaataatagagacacccctttatacccttaaccccagtcctctacccaaaccctcccatttggtaacttcttgaatgactagaccctatcacaaccggaaaaatgacactgatagttctacactcagtnnnnnnnnnnnnnngttgttttttgaaagtttaatacatttaaaggatgattaaagtatttgaactcatgaaattctttaatatttgaggtttt

SEQ ID NO: 265135 - DNA, 769 bp, Homo Sapiens
  misc_feature (541)..(554): n is a, c, g, or t
aagatggtaatgttgtagtttggttccactttaatactccaagagcaagtctgggagttaaaataattacccggataccctggactgagaatgactcccgatgatccagtccggacttcatttgctgggcattgtgcttcacatgttgggagagaaccctcaaactgcaactgggaactgagcttgcaagtcagaatgtcggtccccaccaaggtgtacccggggtggcactggtacttcacaaaatctcctagaagagtcaatgcaacaaaccaggaaattgtgtgtgaccctctgagtgtgtgaaggtgtgacacatgtaggactacttaaatgaattaaatcaacttgcaaatctttttagaaactatgtctgtatttatttttagtccttttaaaaataataccgttttaagttccttaatttaataaaaatgctctatttaagcttagccgatattagtactgaaatgatgtggcagcttttcttccttgactgaggcatccgtgttggtttcccttccccagtgattactgacgnnnnnnnnnnnnnngtaaagtagaagctatggtttaagcaagactgtaaaatcgaatggctttacagcatccacagagactcatctctgaccttggtacttagcacaatgttccaattaactaagccagggtgaggacagcagaaattgggtcacgtagtttgaccagtggtctgaaacacagggcagagttttataactggggctgaaaaatcctgggttgcaataac

SEQ ID NO: 265136 - DNA, 435 bp, Homo Sapiens
  misc_feature (13)..(13): n is a, c, g, or t
  misc_feature (21)..(21): n is a, c, g, or t
  misc_feature (38)..(38): n is a, c, g, or t
  misc_feature (45)..(45): n is a, c, g, or t
  misc_feature (93)..(93): n is a, c, g, or t
acccccggttaanacccctgntgggggaccccgaccantcctgancttgcaagccccagttccccccagttgccagtttgaagggttcctccncccccaacatgtgaaagcacaatgcccccagcaaatgaaagtcccggacctggatccatcgggagtcattcctcagtcccagggtatcccgggtaattattttaactccccagacttgccccttggagtattaaagtggaaccaaactacaacattaccatctttgtggacacatttcaaagtgaaaagcagtttgatgcactggaagtgtttgatggtaagtttctttaatctttgtagagcagtgacctcggcatcattgataaaaacactattacaatgttttagtaacataaagactggaatatattcttgagttaacttatgttttcccaaagcaat

SEQ ID NO: 265137 - DNA, 645 bp, Homo Sapiens
gtaaatgtaactggacaatatttaatcatatacactatttacatgtaatttatgtcataattttcttaacattcaatttccaagcctttgctcttggaaagcttccctggagcttctgggaggttatgtgggagcacagccttatggcaggaggaagatggtgaatccaagtcaggtttcgtgcaatccatctggccattctgaggctgtgtcttttgagctaagatcctggtgaattctctcctgtcaatccctgtgagcatgaggagtgatacatactttggttctgaagaaagaaatggaaaaaactacaggttcctctgctggcaaggggaagggggtctttccctgagaaaatcggtgaagagcacaaattccaatctgcttgcctttgcaccagtgcagtgactgatttcctcattgggggaggaaggaaggctcctggagggcaagatccctcatcttctccagaattatgtatggagaaagtgcttttcagaggctgtttgtgtggaaggcaacagtcaaccggtaaaggctccagatgcaaagcctggaaccaggaattctcatcgctgcacccatcaaatctttctgtggcctgcaatgagcccttctcctcctggacttcattcttcttcttgt

SEQ ID NO: 265138 - DNA, 443 bp, Homo Sapiens
gagaagaaaactcactcacaaacaacataaatgtaaataattcaaaaccctaaaggagagctgtccctagacagtagtggctacaggtgctaagcaaaagtcaggtacactggacagagccatgcgattgattgttcatcttccctctctgggtctccagaaaaggacactggcaatatccccagctctctcctgattggaattctttgaaccctcgaagtgctccagcagtactaccccccacgtagcagtgggcccatgtcgcttgaatattatttttgatttgaccaccaagatgtaatgatgattctattccattttgaaaagggtctgagaaagtgtacaggtctaattatatatacatatttatacatgtgtatttttgtttattgttacattttgacattggactttctattaaataatttttaagagtttaaaaa

SEQ ID NO: 265139 - DNA, 582 bp, Homo Sapiens
  misc_feature (428)..(524): n is a, c, g, or t
gattagactctaagatattcataaccattagtttattaatagctctataaaagttttccatgttctagggtcctgaggggaatggtctagataacctaacagacttttccatccctcatgattcattttactctattgaaaattatcttaaacagaaggaaacgaataggcctggtagaaccagattcgaaacagtgttgcttcagtgggaagggagtggtttcttagtcagtgcttgtggaggctgttactccagaggcagcccgcttctctgcagttagtaaatactactgtagcccagtggcagatactgcggacataaatcttaaagctagtaacatgttgttcttctagggaattccattcagctacagatttaaggtttatcagtagtatttccagaaagatggtccgacacagtggctcannnnnnnnnnnnnnnnnnnnnnnnnnnnnnnnnnnnnnnnnnnnnnnnnnnnnnnnnnnnnnnnnnnnnnnnnnnnnnnnnnnnnnnnnnnnnnnnnttgcctgtagtacccccagctatttgagaggctgaggtggaagaatcacctgagcctg

SEQ ID NO: 265140 - DNA, 309 bp, Homo Sapiens
  misc_feature (38)..(38): n is a, c, g, or t
gccacagaaccacatgctcctggaacacaaaatggagngcccagggcccagcctcaagcgagttggacccgtggctgccacctaccctatgttgaacaagaaaggaccggtacccgctgccacaaatggctgcaccggtgatgccaatgggcatctgcaagaggagcccccaatgcccaccacctgaggccccggtcacacagtttctcggctcttcctccccgctgccccccacgaccctaccttgaaggcccccacaaataaaagcgctgccactcagccctccttccacctggggttcttggggcc

SEQ ID NO: 265141 - DNA, 1153 bp, Homo Sapiens
  misc_feature (19)..(19): n is a, c, g, or t
  misc_feature (606)..(719): n is a, c, g, or t
tggcttgcagcttaaaccnagttggctgcacccaggacgcccttttcactgctaagcagtcctacctgaggcccaggggctgccagattgacccataaataatctccggcgcctcagatccagaagctgctgagcctgatcttagtgcccttctcctttctctgtgtggccccccagcccctttccccactgccttgtgtccaaggccctttccttcatgtatccatggaggagagacaaaaatacacatcaataaaataagatagggaatccataaatagacattcagaagtatgggccaacggatttatcttaaaaccaatggaggaagaagagtttcaataaatgttgtggacttccatttgtcaaagaccaaaacaaaggaaccccaaccttacatgtaatacaaacttaactcaaaatggatcatatatctaaatgtaaaatggaaagctataaaactgaaaacagactatctttacaacctaggcgtaggtatagtttttagacattacaccaaaagcacatgccgtaaaagaaaaaatagataaattggtggatttcattaaaattaaaaaactttttctctctgaaaaatcctgttannnnnnnnnnnnnnnnnnnnnnnnnnnnnnnnnnnnnnnnnnnnnnnnnnnnnnnnnnnnnnnnnnnnnnnnnnnnnnnnnnnnnnnnnnnnnnnnnnnnnnnnnnnnnnnnnnactcttgagggaagagagagaccttctcatattgttttatattgttttatactcagtacctgttttaagaaaaaaacaaggaagtgaaattcaaagacaggcagcccggcaccaggcctgaaaccagccctgggcctgcctggcctaaacctagtagttaaaaatcaacttacgacttagaacctgatgttatccgtagattccaagcattgtataaaaaaattgtgaaactccctgttgtgttctgtaccagtgcatgaaacccctgtcacatatcccctagattgctcaatcaatcacgaccctttcatgtgaaatctttagtgttgtgagcccttaaaagggacagaaattgtgcacttgaggagctcagattttaaggctgtagcttgccgatgctcccagctgaataaagcccttccttctatttaaaa

SEQ ID NO: 265142 - DNA, 463 bp, Homo Sapiens
agaccagggaggaaagtggcaagctgtagaaaatgtttacacgcatggaggggcattgctccagccctcagagcgtccggagcagcaggatacatgggtgggaggttcattcagcacccaccagtcaggtatgttctgagtgaacccacagcagtcgcagaatgagcacctggcagggtgggtttcctaggaataatttattatttttaaaaataggcctaataaagcaataatgttctagacatctgtctaagtaatcagactcaggttccacacacaagcaacaactcgtgggcctcttttctatttcaatgtgctactaagaacccttggatgtaacatactagttagttaatgaattctgtgaattctgtgaagagtaatgtgattgaaaataagtctaaacagctgtaaaagtgaccacaatgacatgaaataaatttaataagtctagatctgcaaa

SEQ ID NO: 265143 - DNA, 673 bp, Homo Sapiens
  misc_feature (614)..(614): n is a, c, g, or t
  misc_feature (634)..(634): n is a, c, g, or t
attcggcacaggacccaggaagacagccaagctcataatcgactttttagcttctgtgcacaacacagacaacaacaagaagctggactgaggccccgactgcagcctgcattctgcacacagcatctgctcccatcccccaagtctgacgcagccaccactctcagggatcctgccccaaatgcggtcggagcgccagtgaccctgaggaagcccgtcccttatccctggtatccacggttccccagagctttggggaccacgcgaaaacctccaagatatttttcacaaaatagaaactcatatggaacaaaataagaaaccccagccatgaaatctaccatgaagtcttcaagttcatgtcactgacaagcttgtgcaaagcagccaccttggaccataattaaatcaaggacattttctttgagacattccttatagttggagactcaagatatttttgttgcatcaggtgtattcccttgcatgggcagtggcttttataggagcattagtcctcattcgctgaaccctgttgtttaggtctaatttaagttttacatagagacccatgtatgactgcagcccattggctcaaaggaccaggggagganaagtgggcaagctgtagaanaatgtttacacgcatggaggggcattgctccagccctca

SEQ ID NO: 265144 - DNA, 299 bp, Homo Sapiens
  misc_feature (192)..(192): n is a, c, g, or t
  misc_feature (226)..(226): n is a, c, g, or t
  misc_feature (248)..(248): n is a, c, g, or t
  misc_feature (253)..(253): n is a, c, g, or t
  misc_feature (270)..(270): n is a, c, g, or t
  misc_feature (276)..(276): n is a, c, g, or t
atgagccatcaagcccggccctaacagttttaaaatgcactgcattttattacataaaagtacaagtagtaaagtaatatactcatttattttaatatacttttaattatttctttgtgtcactataataaagtattgctctggaacatttacggttatacattactttaataggaattttacctacaaacnggcttctccacttggtattttcattatggcgggnctttaccatttttaatgggtcnttacntatttttataggggggnaagggnccattaatgggcccccaaataat

SEQ ID NO: 265145 - DNA, 476 bp, Homo Sapiens
ggaatctttttacctgcaaattgtaaggtactcgagggcagacattggcattttcagatacatgtgaccctgtgtgtttgtgtgaatttctgtgcacacgtacatccccctcccacgccttgacataatgcatacagataaatgttgaggttcagtggcagctgttttgtttcccccacagacattttaccttagattattctggaaaacattctgaagagaatcacaagcattgatcataaagttagaagatgtgatgtttaagacaacatggacataggaattgaaattttctttcccattgtctctcgagtgtttttgaggccagtgtttcttactcttgcttgagtatacctggataacaaaatccagtttctaagattctgccctagagattctgatggatttggtgtgctgcgtgcccctagaccctggagattcttaggacaaagcaaatttgggacactgggaaaaaa

SEQ ID NO: 265146 - DNA, 423 bp, Homo Sapiens
  misc_feature (11)..(11): n is a, c, g, or t
  misc_feature (69)..(69): n is a, c, g, or t
aacctcccccngtttaaccggttgggttttggaagttgtttttgtttacaaatgggtaaccccctggcnttaatcccattcccctggtgttgggacattggggtccttttatgccttcttgcccacccacaagcagtgcctgtagtgggcatcctctgcccaggtgttcctttttgagaacccttgtcacccatgtgtgaaggaaggagtaattttgaggagcccctggtgtcagcaggagaaccctggagggagatgaagtgtggggacggtcagttctagctgtgagcactgtcctcactctggaactcatcagtggcgccgatggatactggctcatagtgcttctgaagatcaggtctggatatctcactctcctgagatgccagtatagacacagaaccaaagcaaagtgtttactaa

SEQ ID NO: 265147 - DNA, 949 bp, Homo Sapiens
tcagatgtgagtgactaaccgcgggacaggccagaccggctccagtcgtgcgcctctcccttgtttctgtcggtgtctctcatcaccgtatctgcagccaaggcttctcagggtggggctccgcaggcactggggctgagatccctcgccaccagccccagcgaggctgctctagggacaacggctccgctttctggggtgactcgccttcttccctctccgcctccgcaggaacagttccattcaacaggtagcccttctttcctggggcgcaggcaccagcaggctatctgcttagttcctttccaccgtctcgcgggtcccccacttggcagtcagtttcctttcctcctcctctcccaggttgcttttcctcgatttccttttgaaattctctgaggaatacttgtgtgttctccgcccacgttccaaggatgagtggccttgctctgtgtgtgtcttccttcttccatgcgtaggaaaggagggaactgtttgcgattgaggggatgggggggagcccaggaagcaacgagggccagggatacctcttctgccaaaagaagggtctcctctcgcgctccttctccacccctctttctggtgagccgtgttttcagaattccacctcgatttcgtttcggtttctgggactgttatttggtaggctgtgagtcccacccaccccctcgctcggttgccttgggtggagtccgcgcaggatgtgaaccgaagagagcaaaatgtgaattaatggaccacgcacaggagctccacgccctccttggatccctcctccttttcctgtatataatgtatagccgcagggtacaagtgagtaccagtttccttgagcaacctaagaccaatttcttgccctttctggtttccacagaaaacttcagggttgtcttaaaaaataaaagacaagatttatatacacataaaa

SEQ ID NO: 265148 - DNA, 621 bp, Homo Sapiens
  misc_feature (28)..(28): n is a, c, g, or t
  misc_feature (109)..(109): n is a, c, g, or t
atatacagcccccatccaccctgccttnagttcctccccacctccgtctcctgctgagcagaggaatcccagggccaaacacaagcccagcccacagccctgggcatcncccaggattctaaaccctccctcctcttcttgctggaggacctgcacctagccacttctggtgaggagctgcgaagagggaaggaaggagctactgtcatctcttgagactataaaatccctagcaatattcattgactctcaaatatatgtctgtagatctaactttagtgttctgttcttaatatcttctcattctacatatgctccctggaacaatcccatccactctcatgggcctcatctctggctttgctaaatctctgtggtcccaatctcacttcttttctaagcaccagatctgtctatccagctgtctactgtacgtctccaccttgttgtcctgttggtacctcagacccaaccctgagctcatcatctccccgcggccaaaatctgctcctgtctgtcctcttagtttcaccatccagccagtcatgtaagccagaaatcttgttgacatctcattctccttcaccaatatccagtcaccatgtcttttcaatcctacct

SEQ ID NO: 265149 - DNA, 483 bp, Homo Sapiens
  misc_feature (404)..(404): n is a, c, g, or t
  misc_feature (430)..(430): n is a, c, g, or t
  misc_feature (441)..(441): n is a, c, g, or t
  misc_feature (455)..(455): n is a, c, g, or t
  misc_feature (463)..(463): n is a, c, g, or t
ttaacaggaagattcctttatgatggcgaattggatggtacacagttctagagtagggtcccagtcactggaccccaggaggcaggaggagcagggctgagagggacgacacactccagggctcatgtcacaccgatagcgcaccaggaatgaccgccatatacttccctaaagctcaacccacccaccagttcagttaagatttatactttaattcgtgtttggccactgaagatcaaatccaccatgatgatagggtttcagcacaacgggccctttccagtcatgacagacagagatgtccagggctctttgagggaggaaacaaaagttcctttgacttcttctttgcaagggaccaaagaggataattttttcttttacggtcttgtttggaatatttntataggcttttttaaaaaccacttancagttcatccngtgctcagtttccngggggaanggttttttcatgatcggccc

SEQ ID NO: 265150 - DNA, 564 bp, Homo Sapiens
tgaccacttgaatagtcctgactttactacgtatcttacttcattagctgacttttataatctcttcatttttccttcgtttgcaataaaacaatggtttctagcaagtaaacaaccaactgatcatctctttttacctttcgtagatgttttcttcttaaaacatatagttatatgtttagcttacatatttatgtatattatatatcaacacttaaagaataataattagattcacagagtacggtggaaatacaatatattaccggtacactattcagcaagcttatggaatgacaaaaaagaatgaatcacttttcatgactagtatcttaattatcctctgtttttttctgactaaggcaaagagattagccatttttcaactgctcagtttcttcttcaatcttgggggccattctacagaggataggaacctaagaggcaaattaaaagtgggagtccgtgacagggcgctttcatggtaaagcctggtctcgtgtgtcttactatgactatatggtcaatgattactgcctggacaggaacgcaggagtgggtgag

SEQ ID NO: 265151 - DNA, 443 bp, Homo Sapiens
  misc_feature (22)..(22): n is a, c, g, or t
  misc_feature (31)..(31): n is a, c, g, or t
  misc_feature (51)..(51): n is a, c, g, or t
  misc_feature (115)..(115): n is a, c, g, or t
  misc_feature (160)..(160): n is a, c, g, or t
  misc_feature (298)..(298): n is a, c, g, or t
tcccaaggcggttcccaaaatngggaaaagntcggggtctaaatgaccctngaagtcaaagaaaaaaccctgacggctgccctcccctcttaattcggccccaaggacttgaaancccggcatcttcccgaccctgccctgccccccacccctgcctgancggagtccctagcaatccccttgggagcagcagcgtcagtggaccccagtgctgagaaaagccccccacatcccggaaaacccactttcctttcacgacccacatctcaatcctgaacatctaggctggaacctgcanacctccccctcagctccgtcgtgaatgggacaacaatctcgtgccctcgttttatggtgcagcttctctagtatttctggggctggggggcggggctggaggggaaggagtgtccacgcatcaataaagatttaacgaactgaaa

SEQ ID NO: 265152 - DNA, 731 bp, Homo Sapiens
tgagggggaggtgtgcaggttccagcctagatgttcaggattgagatgtgggtcgtgaaaggaaagtgggttttccgggatgtgggggcttttctcagcactgggtccactgacgctgctgctcccaaggggatgctaggactccgctcaggcaggggtgggggcagggcaggtcggaagatgccgggcttcaagtccttgggccgaataagagggagggcagccgtcagggttgttcttgactcgagggtcattagacccagacctttcctgatgtgggaacggcctgggaccctggtgaggcccggatttgccgcggctgcggggcgcgccgacgccgataaagggctcggctgtagggcacgaggcaatcggctaggcggaggcgcaggcagaggcggcggtagctggccagagcaagcacgagcagcggcacgaggagcaggaatccggtgaccagtagggccgtgaaaccggggtcccgcaggtgcgcggtgcaagggggtgccctgggagcgcaggaactgagagtggcagaggaagccgaagcccagcatggtgacagcgggtagcaagatggtccctagcaccagcaccagcaggagaagattgaaggcagccaccagcagattctgggctgttacaagaacagcgcaggcccaacagtacagggggtcccggggctctgggccgtcaccaggaaccgctcgctgtgccccggggacatccgc

SEQ ID NO: 265153 - DNA, 710 bp, Homo Sapiens
  misc_feature (326)..(326): n is a, c, g, or t
  misc_feature (501)..(515): n is a, c, g, or t
  misc_feature (629)..(629): n is a, c, g, or t
gtaggtgtgttgtccccaagcatggagggctgggtgcacagtgggtctgtttgatcagattgctttcctctgtggcgggaaagcaggtccctgcatggggtctgcgtgtttctgtgcatctccgtgtgtgtgtttccctgtgtctatgtgcagccctctgcatgtcgattagttgccctttctactcttagctgcagtaatttctgctttgaccacgtgcctaaaagtccatttccctttctaatgtaataaatcaaatccattacacgttaaaaacaaagaacaacaacaaaactaaatttgctaaattgtgcccaaaataagantcacctcggcacagaagatcagagttgtaaccctggctctatctctgtgcaacatttagtttcacagtctctttgaatgtttgctttatcatctctaataggaatcaatgatagatgtcctgcccatatcaaacacccaagaagatagtacagttgaaggctcttagttaaatgnnnnnnnnnnnnnnnctaaatctaaaaacaaatattgcttttactgtgatgctgcttatcagcaaagctcataagcttcaagacactagactagaatcactttgtgatgcctttggggctcagagctanggttccaggcaatgagttacctgtgttcctgagagtcaaatatgtaacctatggataggtaagcataggatttaaaatatg

SEQ ID NO: 265154 - DNA, 322 bp, Homo Sapiens
  misc_feature (29)..(29): n is a, c, g, or t
  misc_feature (64)..(64): n is a, c, g, or t
cccttaacaggaatagggtgtccctcccntctttcaaagcactttgccttgcaatttattttanttttttaaaaatccttcatagagctcagtcaggaaggggatggggcaccaagccaagcccccagcattgggagcggccaggccacagctgctgctcccgtagtcctcaggctgtaagcaagagacagcaatgcccttggccagcgtcctaccctgcccaactccaaggactgggtatggatcgctgggccctaggctcttgcttctgaggctattggagggtcagtgtctgtgactgaataaagttccactttgtggt

SEQ ID NO: 265155 - DNA, 400 bp, Homo Sapiens
  misc_feature (233)..(336): n is a, c, g, or t
tccctctcctcaagcacctttgaaatgcaaagacagaaagacccctcaaagggctgggtaggaaatacctcatcctctggttgggtaggaatactccatcctgtagtggaggaaaataagatcccctaggggtttgggaagggcatggcatgagaattttgtggttgtcctctggatataatgcaaactggcctccaggaatatctaggggctgggtgtgaaggttcatgctnnnnnnnnnnnnnnnnnnnnnnnnnnnnnnnnnnnnnnnnnnnnnnnnnnnnnnnnnnnnnnnnnnnnnnnnnnnnnnnnnnnnnnnnnnnnnnnnnnnnnnnntaggcaactgcagtggctcatgcctgtagtcccaggtatttgggagtctgagatgagaagttca

SEQ ID NO: 265156 - DNA, 405 bp, Homo Sapiens
  misc_feature (25)..(25): n is a, c, g, or t
  misc_feature (103)..(115): n is a, c, g, or t
ccccggaccctcggggtggacctancccatcctcaaccctccctgaagtgccgggggttacggggcatggagacacccgtgcccagccctaatcccccatttnnnnnnnnnnnnnctttcaattttggaaaataaaacaatcccaagaatacagtcatcctcctaacccatcctagacatagggagaagaaaagaaacaatcacacatctttgtagatggaattttttctattacgtaatttttccatacttagccaatcttccctaagcccatgggatttcccatcattgtaagacctaaaatgatgactgcctaataaagaatctgatacttatgaagaatatatttctgccactaaaacccaaacaatccccaaacaactaactaaataaaaatctgcccag

SEQ ID NO: 265157 - DNA, 570 bp, Homo Sapiens
  misc_feature (16)..(16): n is a, c, g, or t
  misc_feature (114)..(114): n is a, c, g, or t
agctcaagcaagggangaatccccatccaaaaccctgtcaaaaaacttccttaatccttccttcactgtccttcctgccctgccggataccccccatgaaaatcattgtcaccnggttcctgtatcatttatgtcctggaggcagggaatgaacgatattatatcctgacatcttccctcgtcctcctgacaagtgggtgaagaattctggtgttcagatttcccaaatattgtctctctggggctcagccttggcctttggagagggtgcatctttgtcctgcatgacattcgattccttcccaaggagtcattagccttttttgcggggtgtgaagcttctcttctgcttgttgaatcactgatcggggatgaggcactggcggaatgggactgatgtgattgaagttgtttcccctttcctctgaaagaccattgcccatattgtgtatggattcatttacaccaatacccagtccattagttttaatctttatcctttcttgaaagtttggtccaggggtcaccgtttctctctgtggggttgtaggcctgtaaaagggattggcc

SEQ ID NO: 265158 - DNA, 640 bp, Homo Sapiens
  misc_feature (43)..(43): n is a, c, g, or t
aactggcccaatcctcaaccctaaaaaactgttaaaggaaggnaaccctaaagcccccaactcccaattgtcctgaagcaacaaaaaggggaaagggtggaacagggctgcccaaagctttcctccttgcccctttccagaaaatatggaatttttgtggggggatttatgatttgtgttttccatgaaggactagcttctgatctttttcctaggaagtggtgttggtttggctggctggtacacctgactatggggagctatggggtggtaggacggtttctctgcttctccttcatcctcctcctcctcatcatcaatcacaaccagctcagcatggatgatcccatcatatcctgtcagaaacttcttatcttcttcactgtcttctgcctgctgataccccatgaaaatcattgtcaccggttctgtatcatttatgtctggaggcagggaatgaacgatattatatctgacatcttcctcgtcctcctgacaagtgggtgaagaattctggtgttcagatttcccaaatattgtctctctggggctcagccttggctttggagagggtgcatctttgtcctgcatgacattcgattcttcccaaggagtcattagccttttttgcggggtgtga

SEQ ID NO: 265159 - DNA, 690 bp, Homo Sapiens
tagaaaaagatcagaagctagtcctcatgaaaacacaaatcataaatccccccacaaaaattccatatctctgaaagagcaagaagaaagcttaggcagccctgtccaccattccccatttgatgctcagacaactggagatgggactgaggatccatccttaacagctttaaggatgagaatggcaaagctgggaaaaaaggtgatctaagagttgtaccacctatataaacatcctttgaagaagaaactaagaagcatttgcaaatttctcttctggatattttgtttattttttctgaagtccaaaaaattatcattacagtgtaccatattaagccatgtgaataagtagtagtcattatttgtgaaaaattcccaaaaagctggggaaaacaaatgtgtaacttttccagttacttgacacgattcagtgggggaaaaccagcattttttattctattgataccaaagcatttctaataagagcttgttaaatttaagaataaagttatttaaaatattctgagtatagtatattaactggcattgtaattttgatgatacaaagattgaaagatcataggaaagcattgcccttcatcacagaagtattcaactctgacaaataaatatgtcatcctgaattaataatgccttaataaaagtacatcctcctgctaactatca

SEQ ID NO: 265160 - DNA, 816 bp, Homo Sapiens
  misc_feature (545)..(560): n is a, c, g, or t
ccaagggaaaagaaatgatttagaaattcatgagcacaaagatgtgctgggccactgcctttgctgggctttccacccagagctctgttgggctgacacctctctccactgggctgacacccattcattcacaaggcatctgttaaatggtatttctttggggatatctttctaatcaccacctccccatgccccaactaaagcaggggctggtacaatgaacttctgggagcaccttgtatttctaaaatcttaccatgggatgaagccttattggggatgacttactgatgcttccctcgtcccctccaaacatccactttcctttgtcagacttgcttactggatacctcccaatatccgttagctagcagtacgtgctgaccgacggggtaactccagatggattcccacatacaaagtgtgcttgacgagaagaggagtgggcgggtactttttgatagatctccttgctgtcctaacaaccctttcctatagggttgaaatagataccgcaaactgctcaaggtgcaatcaggagggannnnnnnnnnnnnnnnggagtcctctcacggttacctaggggttttgggagtggctccttttgctgggaagggcccaggaagagctggctgtgctcactgccctgagtgaggactccaagctgttaccacttctcccaacctgtagcagcttcaagtgccccagacaagtgaggccttgctccaggctaacactggtggacagggccagggaagaaaggggacggagcagtttcccagaaaaccacaacccttctctcctcccagctgctcc

SEQ ID NO: 265161 - DNA, 745 bp, Homo Sapiens
  misc_feature (183)..(363): n is a, c, g, or t
attgaataaacggcatgtttcaggatagagaagtggtttggaggaacaggtgattcctgtttgaaaagtggcagatagagagagttgctctgctggaaccccccggccccggcactagctaggctgcaactggtgatgaccctcatgaggaaatgggactcattaataaagagcctcaacttnnnnnnnnnnnnnnnnnnnnnnnnnnnnnnnnnnnnnnnnnnnnnnnnnnnnnnnnnnnnnnnnnnnnnnnnnnnnnnnnnnnnnnnnnnnnnnnnnnnnnnnnnnnnnnnnnnnnnnnnnnnnnnnnnnnnnnnnnnnnnnnnnnnnnnnnnnnnnnnnnnnnnnnnnnnnnnnnnnnnntggcaatttatatttgatatggacaggtttgatatagttcgttcccacgacttcctagtcacgtaagtacggtcattttttccctgtggggctggatggaggatgtagattcctggaggaaataaaagtgtgtagagaatagatgaattaccctagggagaggataattgggcccaggattgtgactgtgggaatgcagagagagaaattagaacagaattgtaggggaattggttacaaatgggtctgggcatagagtaatgaagagatgaaaaggatgtgctttgaaaactacaagagtttgcagctcatagcactgaatgagttacacgctctgaatctttagttagcaaccactgttttctaaaatgaaataaattat

SEQ ID NO: 265162 - DNA, 151 bp, Homo Sapiens
agaagaaaaatctgcaaaagatctttccaaagacaatgtgccacagatcttttgttctctgtaatgaggattaattgctgtttaaacaaaaatgtaattgttcatctttaaattctttccttttcataagaggatcaagctgtaaaaaaac

SEQ ID NO: 265163 - DNA, 602 bp, Homo Sapiens
ggcacgaggcaagcggcagctgctgcaggaggaggtgggcgccgtgggcgtggagaccatgcggcagctcaaggccgtgctagacccccaaggcctcatgaatccaggcaaagtgctgtgaagggggtctgagcacttagcccacaagttccctgactacggagccggttctggaacttttcttcatgccacggcccctgcaaggaaatagatgctgaggcagtcttcctgccagcgagcccactgtatctgggcccaaggccagagggcccagagagaagcctgagcaccgtgttacctccctggccctctggctggccccaggagcctttggttcagtaaacgacccagggtggttccccagcaaagctgcttcctctctgctcctacgcatcctgtcctggcgggaagagagcgtctgggtccattcaagactctgatgacacccctccccgaggcctcccactgccggggtcccaggacccttcccccttcacctggtgacaggaacactcctttcctggtatggaacgtgagctcccgtgacatgatgataggtcttctccttggggcctcccccaataaatctgtaataaacgtga

SEQ ID NO: 265164 - DNA, 473 bp, Homo Sapiens
  misc_feature (31)..(31): n is a, c, g, or t
  misc_feature (40)..(40): n is a, c, g, or t
  misc_feature (51)..(51): n is a, c, g, or t
  misc_feature (58)..(58): n is a, c, g, or t
  misc_feature (67)..(67): n is a, c, g, or t
  misc_feature (83)..(83): n is a, c, g, or t
  misc_feature (93)..(93): n is a, c, g, or t
  misc_feature (120)..(120): n is a, c, g, or t
  misc_feature (130)..(130): n is a, c, g, or t
  misc_feature (139)..(139): n is a, c, g, or t
aaaggtcccctggaagttgcctgctgcccantgtgaccanaaaggcagccntgtcccnacccattancacaggcaagcagaantctgggcaanagttcatcttcttgaccttttggccantgccttcccnagctggccncccaggggttcccccctgctgaggagagacccaggtggaccccagctgcctgtcacccttcatctgggacttgctgtcaaaccctaggatagtctcataaaggggagctgggccagcctgctgctgtctgcttcagggccaggcagagagtgaggctgggggttctcacaccttactccaccgggcacatcccaacctgcactggggcccactcaagtgcttgttctggtctcagccgctcccttggcagctgcagcccccatgcagaagagctcccaggcccaagctctgtgtgacccagagaaataaagatgcctcagtgtggcccgcaaaa

SEQ ID NO: 265165 - DNA, 444 bp, Homo Sapiens
  misc_feature (328)..(345): n is a, c, g, or t
atcttgtgggaggctttacagacaagttagccaagacacagataagttaggttacgggccaaagtaatacagtgattgagcagtggagctgaaggagatccaggcagcttgactggcagagcctttttcttcaccacgacatgggcagaggttagagagttttgccacactggcggtcgagtgacacatcaaggagggatgtggttgcagcaggctaaaggccataggaagggaggagctggagactccagggtcgcagccaccttggtgggcttggggtggggcaggaggccgcagcaacagagacggggtgggattgaagaagtcnnnnnnnnnnnnnnnnnnaaacaaaagaaatagaacttgtctatatgctggggtgtgggaaaggagcaagtagatggagagaggctgaagatacttgcttctggggaggagctggag

SEQ ID NO: 265166 - DNA, 394 bp, Homo Sapiens
  misc_feature (15)..(15): n is a, c, g, or t
  misc_feature (41)..(41): n is a, c, g, or t
aaaaaaccccccaanaaactcctccggcctgaaaaccctgncccccctaagcctttgaacccactgtcaagcccaccctgtgtccccttgaagccttcggggtccttcaacttcccccacttgggacatcactgctgggacattccccatcgagatgaaaccctgggttcccaatccccagctctgcctttgaagcacttgtggccaccgtcaagtccctttgctctcagaccctgggtttctcatcctttaatgaggtgggttcagaagctctcccatcttcacagcaaccctggcactggcttctcaatgggagggaagcagcagagaaactgaagtgttagacactatgtgtcccaccaccccattacagagacatatgacaatgttaaaa

SEQ ID NO: 265167 - DNA, 403 bp, Homo Sapiens
gaacattgtcatatgtctctgtaatggggtggtgggacacatagtgtctaacacttcagtttctctgctgcttccctcccattgagaagccagtgacagggttgctgtgaagatgggagagcttctgaacccacctcattaaaggatgagaaacccagggtccgagagcaaagggacttgacggtggccacaagtgcttcaaaggcagagctgggattggaacccagggtgtcatctcgatgggaatgtccagcagtgatgtccaagtgggaagtgaagacccgaaggctcaagggacacaggtggctgacagtggtcaaaggctagggggcaggattcaggcagaggagctcttaggggggttgtttgccaccctgtgtgaactcccgagactctaccaggg

SEQ ID NO: 265168 - DNA, 346 bp, Homo Sapiens
  misc_feature (29)..(29): n is a, c, g, or t
  misc_feature (71)..(71): n is a, c, g, or t
  misc_feature (76)..(76): n is a, c, g, or t
ctaaaagaaacccctggccccttaggccnccccctaaagcacctgtgattaccagatggtaaagcctaacnggggncccaagcccccccaatttaaaaaatgtttcctatattttcccacactttttacaatggatcatatattcccttttataatcaaagtaaaagaatagtttttttaaatgataatagaggttgcctatggtggtgtgcgctttagtcccagctacatgggaggctgaggtgagaggattgcttgagccaaaggacttgagtctagcctggacaacataatgagaccctatctctaaaaaaacaaaacccagaccaggcacagtggctcattc

SEQ ID NO: 265169 - DNA, 778 bp, Homo Sapiens
ttttaaatagctgggttacacatacctagaatcacagaacagtggatctggaagggaaattagggatcctcaacttcaacctgttcatgttaaagattaggaaagctgtggatgtgaggggtcaggtgatgtgatggaggcctcacagaatgagtggcagagagggcccctgaaatagcttactctgttttcctatcatttgtaggtagcaaagtatataattaccacttttgtcattagacagttgttacataaaagagtagtcttgcagggtaaaaataattctaattaggatattcacttaccaattaaataattctaacagtgtgaaggttcacttatgatttttttaaaaattatcatgaaataacaaacatgtagccatgttgaggtgggagaaaaggggtccttacgtctaaacagcaagagaaaaaacacacaagaagagccaatctgtcaccacgagagctgcactgagtccttcaatcttgagaataaacatggatagaagttccctctgaaaatgcagttatagtgctaaatgaatgacttaaagacacatctttcctctttgttttgtgccatgatctgagtgccttgagaactagctttcatccgggcacggtatgacatcatctgataagtgtgatgctctatagtcgttgccggaatgggctagggtacaaaacagagaaacacacaggcaggaaggaaggcagagaccagcgctaatttaaacattctatcctgaatatttcagttgctccataaatgttta

SEQ ID NO: 265170 - DNA, 475 bp, Homo Sapiens
  misc_feature (326)..(326): n is a, c, g, or t
  misc_feature (356)..(356): n is a, c, g, or t
  misc_feature (372)..(372): n is a, c, g, or t
  misc_feature (376)..(376): n is a, c, g, or t
  misc_feature (407)..(407): n is a, c, g, or t
  misc_feature (463)..(463): n is a, c, g, or t
aaacatttatggagcaactgaaatattcaggatagaatgtttaaattagcgctggtctctgccttccttcctgcctgtgtgtttctctgttttgtaccctagcccattccggcaacgactatagagcatcacacttatcagatgatgtcataccgtgcccggatgaaagctagttctcaaggcactcagatcatgggcacaaaacaaagagggaaagatgtgtctttaagtcattcatttaggcactataactgcattttcagaggggaacttcttatccatgtttatttcttcaaggattggaagggactcaggtggcaggcttntcgtggggtggacagattggggctccttcnttgtggtggttttttnctcnttggctgtttaaggacggtaagggacccccntttttcttccccaccttcaacagggggctaacaggtttggtaattttcaggataanttttttaaaaaa

SEQ ID NO: 265171 - DNA, 421 bp, Homo Sapiens
gtcaccacagaaacctgcgaatatgttatattacatgaccagggagaagtaaggttgcagatggcagtaaggttgctaatgggctgaccttaagataaggagatgatcctggattatctgggtggaccccaatgtaatcacaagggtccttaactgtggaatagtgaggtggctgagtcagaggcagagtgatgcaatgactgaaagacttaacccagccatcaccggctttgaatacggaagacggtcatgagccagggaatgcaggcaggctctgggagctgaaaaaagcaagaaaatggattctcccctggagcctccagaagggatgcggtcctgccaaccccttgtcagtgagccatttcagatttctgacttccaggactggaagaaaataaacttgtcttgttttcagccacca

SEQ ID NO: 265172 - DNA, 819 bp, Homo Sapiens
  misc_feature (809)..(809): n is a, c, g, or t
ggccagaattcggcacgagcggcacgaggtctaggcttccatttaaaattatatgaatggtttgggatctttttgcactgagcctgggttgagctgggtaggaatccaaatgtatcatcttttccatatccccatctgtaaatcagaaatggagagaagtatgtacgctgtgggttgtgagataattaaagagatcaagtataagacacacttaacacagtggctggtctatgggttgtactgaataagtggtctctcctgtgattttattttttctagcttttcttcaaaataatatgctacatattatgccagtaaatgttttttgacatacccacttatgactcctccaaaaatagcctaacttgatctttcattaacgttatggagtgccttcaaggcagagtcactcaaacatgagtgccttcatttactcagtgagcatctattgaatgcctactcagtgccaagcccatgctagtcacgtgggacacaaagaccctcaaggagttcagcctctagggaaagagacaggcaagtgaacagagaattacagtgccagggtgtaagagcctacaacagatgcaagcacctaattcctacacatagaactgaggaacatttttttgagactggagactggagttaaggaaggcctgcccacagtgggatgactggatcttaaagaatgtgttgaatggagccaggcaatgaaggtgatgaaacatctacccaggcaggcaatacagcctgtgcaaatgcagggacccacgtgtggtggtgggtggtggtgatgcaagagtgtgaantggggtgcaa

SEQ ID NO: 265173 - DNA, 683 bp, Homo Sapiens
ggtcttgcttcaggttttctttagaaatctgaggtttcacaaaacaggtttctatgactttaactgcacataaaaataaatgtgttagtttggtctccaaagctcttgaatccattagaataaactattcccccaccatgatggtcctcaccgtggatttcatcccttttttatcctcaactgtactcacaaatacaatgttaactttgcctgctgcatcctgcctttgcccttcatctctttgtgctgctggagctgtccacagcgattaaggggcagaaagagtacgaaacagatccagctttcttgaaaatagactcccttacctgtctttatgctagcttaccaaaaagaacggaggcttccctttcccaccctgggcagacccgtctgcacaaagctctgggaggcagcagaatatctctaagccccagcctcaagatacatcatcttacaatttgtgctactcctttaaagctccattcagagcaggacactgttttcacaggagaggaagtcattttatgcaagttttctggaagaaaagacactacaattaatgtttggtgagaagatgtgttgaagaggacacaggaactttcaaaaatgtccagtcatatcttgagcatctctgcaaagcttgaaaacatcatacaggtcctggagccaaattgaaaaatctc

SEQ ID NO: 265174 - DNA, 567 bp, Homo Sapiens
  misc_feature (397)..(405): n is a, c, g, or t
  misc_feature (425)..(425): n is a, c, g, or t
  misc_feature (459)..(459): n is a, c, g, or t
  misc_feature (476)..(476): n is a, c, g, or t
  misc_feature (510)..(510): n is a, c, g, or t
  misc_feature (516)..(516): n is a, c, g, or t
  misc_feature (541)..(541): n is a, c, g, or t
  misc_feature (554)..(554): n is a, c, g, or t
ttaaaccaaggaaggtcttgcttctggttttctttagaaatctgaggtttcacaaaacaggtttctatgactttaactgcacataaaaataaatgtgttagtttggtctccaaagctcttgaatccattagaataaactattcccccaccatgatggtcctcaccgtggatttcatcccttttttatcctcaactgtactcacaaatacaatgttaactttgcctgctgcatcctgcctttgcccttcatctctttgtgctgctgggagctggtccacagcgattaggggggcaggaaaggaggtacgggaaacaggatcccaggcttttctttggaaaatagggacttcccctttaccctggtcctttatggctagggcttacccaaaaagggacnnnnnnnnnctttccccttttccccaccngggggggaaggaccccgttttggcacaaaggctntggggggaggggcaggncagggattattcttttaaggggccccagggcctnaagggntacaattcatctttacaattttggngggctaacttccntttaaagggctcc

SEQ ID NO: 265175 - DNA, 415 bp, Homo Sapiens
  misc_feature (19)..(19): n is a, c, g, or t
  misc_feature (33)..(33): n is a, c, g, or t
  misc_feature (39)..(39): n is a, c, g, or t
  misc_feature (46)..(46): n is a, c, g, or t
  misc_feature (55)..(55): n is a, c, g, or t
  misc_feature (66)..(66): n is a, c, g, or t
  misc_feature (71)..(71): n is a, c, g, or t
tcctggaaaaaaaagaacncccccttaccctgnccttanggcctancctttcccnaaaaaagaaanggganggcctccccctttcccccaacccccgggcagaccccgtcctgcaacaaaagcccctggggagggccagcaagaaaatcctcctaaaccccccagccctcaagatacatccatccttaacaatttggtgcctactccctttaaagctcccatccagagcaggacactgttttccacaggagaggaagtcattttatgccaagttttctggaagaaaagacactacaattaatgtttggtgagaagatgtgttgaagaggacacaggaactttcaaaaatgtccagtcatatcttgagcatctctgcaaagcttgaaaacatcatacaggtcctggagccaaattg

SEQ ID NO: 265176 - DNA, 437 bp, Homo Sapiens
  misc_feature (153)..(153): n is a, c, g, or t
  misc_feature (338)..(338): n is a, c, g, or t
ggctggtcttgaactgctggcctcaagcaatccttccaccttggcttcttgccaaaagtgttgtattataggagtgagccactgcactgcacacagcctcaattcatctatttttttattaataaaggtagtttaaaaatatgtatccagggnagtttccagttaatataacctacttttgggttacatatgatcaacacctggggctaatctgttattccatgggccttgtacatttgggaagggaacaggtaattcccaatcccattaccctcttcctggggggttctttaaaatttcagcctacttaggaggaggtccctcaacccctttggggngccttaccctggcatttgggggggacccaataacctgtggtttattacaggggccaattcaggtcttatttaaaggggtcctaaaatagtagggggttt
